United States Patent Application Publication US 2024/0131193 A1 - sequence listing, part 15

SEQ ID NO: 28422 - DNA, 1200 bp, synthetic construct
  source 1..1200: mol_type = other DNA; note = Synthetic coding sequence
atggcggcaccttcacccagtgggggtggtggctctggtggcggaagcggctctggcacccccggacccgtaggctcccccgctcccggtcatccggcagtgtcctctatgcaaggaaaaaggaaagccctcaaactcaacttcgccaatcctccttttaaaagtactgctaggttcactctgaacccgaatcccacaggggtacagaacccccatatcgagcgcctgagaacacattcaattgaatcaagtggtaaactgaaaatatctcccgagcagcactgggatttcactgctgaagatctcaaggacctcggcgagataggtagaggcgcttatgggtccgttaacaaaatggtgcataaacccagtggccagatcatggctgtcaaaagaattcggtctactgtagacgaaaaggagcagaaacagctgttgatggatctggatgtagtgatgcggtctagcgattgcccctacatagtgcaattttacggagctctgtttagagagggcgactgctggatatgtatggagctgatgtccacatctttcgacaagttttataagtatgtatactcagtgctagacgacgtgataccggaggagatccttggtaagattaccctggccactgtgaaagccctcaaccaccttaaggagaatctaaagatcatccatcgcgatattaagcctagcaacatcctgctggataggtccggcaacattaaactttgcgacttcgggatttccggccagctggttgactcaattgcaaagacccgggatgcaggctgccgtccatatatggctcctgaacgcatagatccatccgcttctcggcaggggtacgacgtccggtctgacgtctggagtctggggattactctgtatgagttggccacaggacgattcccttatcctaaatggaattctgtcttcgatcagctgacgcaggtggtgaagggcgatccgcctcaactgtcaaattcggaggagcgcgaatttagccctagcttcataaatttcgtcaatttgtgcttgacaaaggacgaatctaagcggccaaaatataaagagctgctcaaacaccccttcatcctgatgtacgaggaaagggctgtcgaggtggcttgctatgtgtgcaagatcctggaccaaatgcccgcaactccaagcagcccaatgtacgtggattag

SEQ ID NO: 28423 - DNA, 1122 bp, synthetic construct
  source 1..1122: mol_type = other DNA; note = Synthetic coding sequence
atggcccaggagtcccctaaaaattctgcggctgagataccagtcacatctaatggtgaagtcgatgactctcgagaacatagttttaaccgagatctgaagcactcgctgccttccggactgggtctgtccgagacccagatcaccagccacggatttgacaacacgaaagagggagtgattgaagctggcgctttccagggatctcctgcaccacctcttccttccgtaatgtcaccctctcgggtggcggcatcaagactggctcagcagggcagtgacttgatcgttcccgctgggggacagcggacgcagactaagtccgggccagtcattctcgctgatgaaataaagaaccccgcaatggagaaattggagcttgtgagaaagtggtctctgaacacctataagtgcacccgccagataatcagtgagaagcttggcagaggctcacggactgtcgacctggagttagaggcacaaatcgatatactgcgggataacaagaaaaagtatgagaatatcctgaagctggctcagaccctctctacgcagctgtttcagatggtccatacccaacgtcagttgggagatgcctttgccgatctgtccctgaagtctctggaactgcacgaggagttcggatacaatgccgacactcagaagttgctggctaaaaacggcgagaccttactgggcgctattaatttcttcatagcatccgtgaacaccctggtaaacaaaaccatagaggatacattaatgactgttaagcagtacgagtccgcaaggatcgaatatgatgcctacaggaccgatcttgaggaacttaatcttggaccgagagatgccaataccttacctaagatcgagcagtcacaacacctgtttcaggctcacaaggagaaatatgacaagatgaggaacgacgtgagcgtgaaactcaaattcctagaggagaacaaggtcaaagtactacataaccagctggttctgtttcacaatgctatcgcggcatactttgcaggtaatcaaaagcagctcgagcaaaccttaaagcagttccacattaaactcaaaactcccggtgtcgacgccccaagctggctcgaagagcagtag

SEQ ID NO: 28424 - DNA, 654 bp, synthetic construct
  source 1..654: mol_type = other DNA; note = Synthetic coding sequence
atgtactcactgaaccaagagattaaagcctttagccgtaataatctgcgcaaacagtgtacgcgggtgaccaccctgacagggaaaaagatcatcgagacctggaaggacgctagaatacatgttgttgaagaagtggaacctagtagcggcggtgggtgcgggtacgttcaggatctctcatctgacctccaggtgggagtgattaaaccgtggctcctgttggggtcccaggacgctgcacacgacttagacacccttaagaaaaacaaagtaactcatatcctgaatgtggcatacggcgtggaaaatgcctttctgagtgattttacttataaatccatctccattctcgacctgcccgaaaccaatatcctgtcctacttccccgaatgctttgagtttattgaggaggctaagcgaaaagatggcgtggtactcgttcattgcaacgccggtgtgagtagagccgcagctatcgtgattgggtttctgatgaactccgaacagaccagttttacaagcgccttcagcctcgttaaaaatgcccgtccctctatttgccccaactcaggctttatggagcagctgcgaacgtatcaggaaggcaaagaatcaaacaagtgcgatcgcatccaagaaaattcctcctag

SEQ ID NO: 28425 - DNA, 2679 bp, synthetic construct
  source 1..2679: mol_type = other DNA; note = Synthetic coding sequence
atgctgcggactgccggacgggacggtctctgtaggctctccacatacctagaagaactggaggcagtcgagcttaaaaaattcaaactttatctgggaaccgctacggaattgggtgaagggaaaatcccatggggatctatggaaaaggcaggtcccctcgagatggcccagctgctaatcacacatttcggtcctgaagaggcttggaggctggccctgtccacttttgagcgcattaatcgcaaagatctgtgggagcgcggtcagcgcgaagatctcgttcgggataccccacccggaggcccttcaagtttaggcaaccagtctacttgcctgctcgaggtgtctttggtaacaccgagaaaagacccgcaggagacatacagggattatgtgcgccgaaagttcaggttaatggaggatcgaaacgccaggcttggtgagtgcgttaacctgtcacatagatatacccgtctcttgctggtgaaagaacacagtaaccctatgcaggtgcaacagcagctccttgatactggcagagggcatgcacggacagtcgggcaccaggctagcccaattaagatcgaaacactgtttgagcccgatgaggagcggccagagccacctcgcactgtggtcatgcaaggcgcagctggaattggtaagagtatgctagcccacaaagttatgctggattgggcggacggcaagttgtttcaaggccgtttcgattacctgttctacataaattgccgggaaatgaaccagtcagcaacggaatgttccatgcaggatttaatttttagctgttggcccgaacctagcgcaccactacaggagttaattagggtgcctgagcggcttctgttcattatcgacggtttcgacgaactgaagccgagttttcacgatccacaggggccttggtgcctctgctgggaggaaaagaggccgactgaactgctgttgaactcactgatcagaaagaagctgctgccagagctgagcctgttaatcaccaccaggcctacggctctggagaaactacatagacttctagagcatccccgacacgttgagattttgggcttctccgaggccgaacgaaaggagtacttttacaaatactttcacaacgcagagcaggctgggcaggttttcaattacgtcagggataatgaaccgctgttcaccatgtgcttcgtgccccttgtctgttgggtggtctgtacttgtctgcagcagcagcttgaaggcggaggcctgctaagacagacaagccggacaaccactgctgtctatatgctctacctattatctctgatgcagccgaagcccggtgcaccgagactgcagcctccacctaaccagcggggactatgcagtttggcagccgacggcctctggaatcagaaaattttgtttgaagagcaagatctgcggaagcatggtctggatggcgaggacgtgagtgcctttttgaacatgaatatatttcagaaagatatcaattgtgaacgatattatagttttattcacctgagcttccaggaattttttgctgccatgtattacatccttgatgaaggcgaaggcggagctggacccgatcaggacgtgacccggttgctcaccgagtacgccttcagcgagcgcagctttcttgctctgacgagtagattcctgttcggcctgctcaacgaggagactagaagccacctcgagaaaagcctgtgttggaaagtcagtccccatatcaagatggacttgcttcagtggattcaaagcaaggcacagtccgatgggagtactctccagcagggatcacttgagttcttttcctgtctgtacgaaatccaggaggaagaattcattcagcaagccttgagtcactttcaggtgatcgttgtcagcaatattgcaagcaaaatggagcatatggtgagcagtttctgcctgaaacgatgtaggtcagcccaggtgttgcatctctacggcgcaacctactctgctgacggggaagacagggcacgatgttccgccggagcacacacccttttggtgcagcttcccgaacgcaccgtgctcttagatgcctacagtgagcacctggcagctgccctgtgcacaaaccccaatcttatcgagctctccctgtataggaacgcactgggctctaggggggttaaactcctctgtcagggactgcggcaccccaattgtaagctccaaaatctaaggctgaagcgctgtagaatctcatcaagcgcttgtgaggatctctccgctgccctcattgcaaataagaatctaacccgcatggatctttctggcaacggggtgggatttcccggtatgatgctattatgcgagggactccggcatccacagtgtcgccttcaaatgatccagctgcggaagtgtcaacttgagagcggagcgtgccaggaaatggcctccgtgctgggtacgaacccccatcttgtcgagctggatcttaccggcaacgccctcgaagatttggggctgcgtctcctgtgtcaagggctcagacaccctgtgtgcaggttacggacgctgtgctggatgcttttcggcatggacctgaataagatgacacacagcagattggccgcactgcgtgttacaaagccttacttagacattggatgctag

SEQ ID NO: 28426 - DNA, 945 bp, synthetic construct
  source 1..945: mol_type = other DNA; note = Synthetic coding sequence
atgcagacctttctaaaaggaaagagagtgggctactggctcagtgaaaaaaaaatcaagaaactgaacttccaggcctttgccgagctctgccggaaacgcggaatggaggtggttcagctaaacctgtctcgtccaattgaggaacagggccctcttgatgtcattatccataagctgacagacgtgattttggaggctgaccagaacgactcccagagtctggaattggtacatcggttccaagaatacattgatgcccaccctgaaaccattgttttggaccccctccccgctatccgcaccctcctcgatcgtagcaaatcatacgagcttatacgtaaaattgaggcttatatggaagacgatcgaatttgttcccccccatttatggagctgacatccctatgtggggatgacaccatgagactgttggagaagaacggcctgacttttccattcatttgtaaaacgcgggtggcacatggaactaacagccatgaaatggcaatagtgtttaatcaggagggactgaacgctatccagcctccatgtgtcgttcaaaattttatcaaccataatgctgttctctataaagtgttcgttgttggagagtcttataccgtggtccagcgcccatctttaaaaaatttttctgctggcacaagtgatcgtgagtccattttctttaatagtcacaacgtcagcaaaccagaaagctcatcagtacttaccgagctggacaaaatagaaggggtctttgagagaccctctgacgaggttattagggagctcagtcgggctttgagacaggctttaggtgtgtccctattcggtatcgatattattattaataaccagacaggccagcatgctgttatcgatatcaacgctttccctggggattgccaagtctgtttcatcgagggctggaagacagattag

SEQ ID NO: 28427 - DNA, 630 bp, synthetic construct
  source 1..630: mol_type = other DNA; note = Synthetic coding sequence
atgcctgtcgctgttatggctgagagcgctttttccttcaagaagcttctcgaccagtgtgagaaccaggagctggaagccccaggtgggatcgcaacccccccagtttatggacagctgctggccctgtacttactgcacaacgacatgaataacgctagatacctgtggaagcgcatccctcccgcaatcaagagtgccaatagtgagctcgggggaatctggtcagttggtcaacgcatctggcaacgggacttcccgggaatttacacaaccataaacgcgcatcaatggtccgagactgtgcagcctattatggaagccctgcgggatgctacacgcaggcgtgcatttgctctagtgtcacaggcatacacaagtattattgcagatgatttcgccgctttcgtgggcttgcccgttgaggaggccgtgaagggcatcttggagcaaggttggcaggccgactccacaacgcgcatggtcttgcctcgcaagcctgtcgcgggagccttggatgtctcttttaataagttcattccactgtccgaacccgcacctgttcctcccatcccaaatgaacaacagttagcaagactgactgattacgtggcgttccttgagaactag

SEQ ID NO: 28428 - DNA, 4935 bp, synthetic construct
  source 1..4935: mol_type = other DNA; note = Synthetic coding sequence
atgttctggtgcgggacatgttttgttaccaataatatgaagggaagcgaagtgagcctcgaaaaaaaaaaaaagataaagatgcccgtgaagcgcctgagagaggtggtgtcacagaatcacggcgatcacctcgtgctgctgaaagatgagttgccttgcgtgcctcctgcactctccgcaaacaagcgtctgcctgttggaaccggcacctcactgaatggcaccagtcgaggctcatccgatctgacaagcgcacgcaactgttatcagcccctgctggagaaccccatggtgtccgaaagcgacttcagcaaggatgtggctgttcaggtgctaccattagataagatcgaggagaataacaaacagaaagccaatgacattttcatcagccagtacacaatggggcagaaggacgccttgaggacggtgttaaaacagaatgtgtccctttgcctcaccggttggtctgaccacagtggtgtgattaccacccactgttctctctacctcttgcgcctgatgcgctcatctcacttgtccctcccttcatcctgggattatcgggcacagagcatgcccgtgtttaaggaagtgaaagtgcatcttctcgaggacgctggtatcgagaaagacgcagtgacccaagaaacccggatctcaccctccggcatcgatagtgctacaacagtggctgccgctactgcagccgcaatagcaaccgccgcacctcttatcaaggtccagagcgatctggaggcaaaagttaattccgtgacggagctcctatccaagctgcaggaaacagataagcatctgcagagagtaaccgagcagcaaacttctatccaaagaaagcaggagaagctacactgccatgatcacgagaaacaaatgaatgttttcatggaacaacacatacgtcatctggaaaaactgcagcaacaacagatcgatatccagacgcactttatcagtgctgccctcaagaccagtagctttcaaccagtatcaatgcctagcagcagggctgtcgaaaagtacagtgttaagcccgagcaccccaaccttgggtcgtgcaacccaagcttgtacaacacttttgccagtaagcaagctccgctcaaggaagttgaagacacaagctttgacaaacagaaaagtccattggaaacgccggctcctcgtcggtttgctccagtgcctgttagtagggatgacgagctgagcaagcgagaaaatctgctcgaagaaaaggaaaacatggaggtgtcttgccatcgaggtaacgtgcggcttctagagcagattcttaacaataatgactccctgacaaggaaatcggagtcctctaacaccacatctctgaccaggtctaagataggctggacccccgaaaagactaaccggtttcccagctgtgaggagctagaaaccaccaaagtgacaatgcagaagtcagacgatgtcctacatgacctcggccaaaaggagaaggaaacaaatagcatggtacaacccaaggaatctttaagcatgttaaaactacctgacctccctcagaattccgtgaagctgcagactacgaataccacacgatccgtcctcaaggatgctgagaagattctgcgaggggttcagaacaataagaaggtgttagaggaaaacttggaggcaatcattcgcgctaaggacggggcagccatgtactccctcatcaatgccctctccaccaatagggagatgtctgagaaaataagaatccgtaagactgttgatgagtggatcaaaacaatctctgccgagattcaagatgaactgagcagaacagactacgagcagaagcgctttgaccagaagaatcagcgcaccaaaaagggtcagaatatgaccaaggatatcagaacgaatacgcaagataagaccgttaacaagtctgtgatcccccgtaagcattcccaaaagcagattgaggaacactttagaaatcttcccatgagaggaatgccagcatccagcctgcagaaggagcgtaaggagggccttcttaaagccacaacagtgattcaggatgaggactatatgttgcaggtgtacggaaagcccgtttatcaggggcacaggagcaccttgaaaaaaggaccttatttgaggttcaacagccctagtccaaaatcccgccctcaacgaccaaaagtcattgagcgcgtaaaggggactaaagtcaagtcaattcgaactcagaccgacttttacgccactaagcccaagaaaatggactccaagatgaaacacagcgtccctgtccttcctcacggagaccagcagtacctcttctcccccagcagggagatgcccacattttcaggcacactggaaggtcatttgatccccatggcgattctgctcgggcaaacccagtccaactccgatacgatgcctcccgctggagtgattgttagcaagccccaccctgtcaccgtaactacaagcatcccccctagttccagaaaagtggagacaggagtaaagaaaccaaatatagctattgtagagatgaagtcagagaagaaagatcctccccagctgaccgttcaggtgctcccttcagtagatattgattcaatatccaattccagtgcagacgtgttgagccccttgtcaagtccaaaggaggccagtttgccccctgttcagacctggattaagaccccagagatcatgaaggtcgatgaagaagaagtaaagtttccagggactaatttcgatgaaattatcgacgtaatacaggaagaggagaaatgcgatgagatacccgactctgaacctattctggaatttaataggtccgtaaaggcagatagcaccaagtacaatggacctcccttcccaccagtcgcttccactttccagccaacggcagatattttagataaggtgatagaaaggaaggagactttggagaactctttgatccagtgggtcgaacaggaaatcatgagcaggatcataagcggcctgttccccgtgcagcagcagatagctccaagtatttcggtgtccgtcagcgagacctccgaaccccttacctctgacatcgtcgagggaactagttctggggcactgcagctcttcgtggacgcaggagttccagtcaatagcaacgtgattaagcacttcgttaacgaggccttagccgagacaatcgctgtgatgttgggggaccgagaggcaaaaaagcagggccctgtcgctaccggcgtcagcggggatgccagcactaacgagacctacctgcccgcaagagtctgcactccgttaccaaccccacagccaaccccgccttgctcaccaagcagtccggcaaaggaatgtgtgttggtcaaaacccccgattcttccccctgcgatagcgaccacgatatggcctttcccgtaaaagagatttgtgctgagaagggcgatgatatgcccgctattatgctggttaatacgcccacggttacccccactaccacaccccctcctgcggctgccgtgttcacccctaccctgtcggacatcagcatcgataagctcaaggtgtcttctccggagctgccaaaaccctggggagacggggacttaccgttggaggaagaaaatcccaacagccctcaagaagagctgcacccccgtgctatcgtgatgtccgtcgcaaaagatgaagagccggaatctatggacttcccagctcagccacctccaccggaacccgtgccattcatgccgtttccagctggtacgaaggccccatcaccttcccagatgcccggaagcgacagcagcacacttgaaagcacattatcagtgacggtcactgagacagaaaccttggataagcccatatccgagggcgagatcctgttctcctgtggccagaaactggcacccaagattttggaggacattgggctgtatttaaccaatctgaacgatagcctgtcctcaacgctgcatgatgccgtcgagatggaggacgatccaccatccgagggacaggtcatccgaatgtcacataagaagtttcatgcagatgctatcctgagcttcgctaagcagaatcaggaatctgcagtgtcacagcaagccgtttaccatagcgaggatctcgagaactctgttggagaactaagtgagggtcagaggcctcagctgactgccgcagccgagaatatcctgatgggtcattctctgtacatgcaaccccctgttacgaatacgcagtccctggatcagcagtgcgacccaaaacccctcagccggcagtttgatacggtttctggatcgatttatgaggattcctgtgcttcccacgggccaatgagtctcggagagctcgagcttgagccaaattccaaattggtgctgcctacaaccttgcttaccgcgcaggaaaatgatgttaatctgccagtagcagcggaagatttcagtcagtaccagctgaagcaaaaccaggatgttaagcaagtggaacacaagccatctcagagctatctccgggtgcgcaataaaagcgatattgcaccatcacagcagcaggtctctcccggagacatggatcgaacgcaaattgagctaaacccctatctaacctgcgtttttagcggtttgggcgttcacgtaaagaaagtcagctgcatcggtaaactcggcctctggaggtttgtcatccagattatctcttctcctagatgggaaagctccgcgacactccggtttacagatgccccttgtcaggacgttagcgacgcagcagtgtcagagccacgtgggttactgtccgtttccgagagtcagcataacgctggcggtcacggggtttttggaggcaggtatctgcttaacggtaagagacagcccgctcagtgcctgtgtcactggttctag

SEQ ID NO: 28429 - DNA, 3138 bp, synthetic construct
  source 1..3138: mol_type = other DNA; note = Synthetic coding sequence
atgctaacagttcaggttaaaaccagttctgccatcgagttgccagacagtctcgcctttctgtggatcattcccatgtggtattgtgaaggtaaggaactggagaattccccggatattcatatcgtccaggctgggaatctgcacagcttgaccatagccgaggccttcgaagaagatacaggaaggtactcctgcttcgcatcaaatatctacgggaccgactcaacctcagccgagatttacattgagggcgtgtcctcatccgatagcgagggtgaccccaataaggaagaaatgaatcgaatccagaagcccaacgaggtgtcctctcctcctaccactagtgccgtcattccgcctgctgtcccacaggcgcagcacctggtggcgcaaccaagagtggccaccatacagcagtgtcagtcacccaccaactatctccaaggtctggacggaaagccgataattgccgcacctgtgtttacaaagatgttgcaaaacctgagtgctagtgaggggcagctggtggtgtttgagtgtcgcgtcaaaggagcgccatccccaaaagtggagtggtatcgcgagggcacacttatcgaagatagccctgacttccgtatcttacagaagaaacctagaagtatggctgagcccgaagaaatttgtaccctggtgattgcggaagtctttgctgaggacagcgggtgctttacatgtacggcctccaacaaatatggaaccgtctcatctatcgcgcagctccacgtgcgcggaaatgaagacctctctaataatggttcactgcatagtgcaaactcaactactaatctcgctgccattgagccgcagcccagccctccacacagcgagcctccatccgtcgagcagcctcctaagcccaagttggaaggggttcttgtgaaccacaatgaaccccgttcatcatcccgcattggactcagagtccacttcaacctgcctgaggatgataaagggagcgaagcctcttctgaagcgggagtcgtgaccaccagacagacccgccctgattcgtttcaggaacggttcaacgggcaagccactaagacaccagagccaagcagtcccgtaaaagaacccccacctgttttagcaaagccaaaattggactccacgcagttacagcagctacacaatcaagtcctcctggagcaacatcagctacagaatcccccaccctcatcacctaaagaatttcccttctctatgacggtgctgaacagtaatgccccacccgctgtgaccaccagctctaagcaagtgaaggctcctagctcgcagacttttagcctggcaagacctaaatatttcttcccaagcaccaacacaaccgccgcaacagtggcgccttcatcatccccggtgttcacacttagttctacaccacagactatccaacgcacagtgtctaaagagtcgctgcttgtgagccatccttcagtccaaactaaatcccctggcggtctgtctatacagaatgagccattgcctcccggaccaactgaacccaccccccctccttttaccttcagtatacccagcggaaaccaatttcaacccaggtgcgtcagcccgattcccgtgtcaccaaccagcagaatccagaatcccgtggcctttctttcctctgtgctgccaagcttgccagccattcctccaactaacgccatgggtctgcctcggtcagcgccttcaatgccaagtcaggggcttgccaagaagaacaccaagtccccgcagccggtgaacgacgacaacatcagggaaactaaaaacgctgtgatacgcgacctgggcaagaaaattaccttttctgacgtccgtcctaatcagcaagaatataaaatcagctcctttgaacagaggttgatgaatgaaatcgagttccgcctagagagaactccagtggacgaaagcgatgacgagatacagcatgacgaaatccctacaggaaaatgcatcgctcctatatttgataagcggttgaaacattttcgagtgactgagggttcgccagtgactttcacgtgcaaaattgttgggatccctgtgcccaaagtgtactggtttaaggacgggaaacagataagcaagcggaatgaacattgcaaaatgcgaagggaaggagacgggacctgctctcttcacattgaaagcacaacttcagatgatgacggcaattacacgataatggcagccaatccacaggggagaatctcatgcagcgggcacctgatggtccagtccctaccaataaggtcacggctcacatccgccggtcagagtcaccggggacgatccagggtgcaggagcgcgataaggaaccactacaggagaggttctttagaccccatttcctgcaagccccaggagacatggtggctcacgaaggcagactctgccggcttgattgcaaggttagtgggctgcctccgccagaattgacctggctgctgaatggccagccagtcctgcctgatgcctcccacaagatgctggtaagagaaactggagtacatagcctcttgattgaccctttgactcagcgggatgccggaacgtacaagtgcatagctaccaataaaacgggacagaatagcttctctttggagctgtctgtggtagctaaagaagtcaagaaggctcctgtgatcctagaaaagttgcaaaactgtggcgtccctgagggccacccagtcaggcttgagtgccgggtaattgggatgcctcctcccgtgttttactggaagaaagacaacgaaactatcccctgtacaagggaacggatatccatgcaccaagacacaaccggctacgcatgccttctaatccagcccgctaagaaatcagacgcaggctggtatacactctccgccaagaatgaagccggtattgtgtcatgtactgctcggctggatatctacgcacaatggcaccaccagatcccaccacctatgtcagtacgcccttcaggctccaggtacggaagtctgacttcaaaagggttggacattttcagcgcattttcttccatggagagtactatggtgtatagctgctcttcacgttctgtggtagagagtgacgagctgtag

SEQ ID NO: 28430 - DNA, 951 bp, synthetic construct
  source 1..951: mol_type = other DNA; note = Synthetic coding sequence
atgaccccatctgaaggagctcgcgctggcaccggtcgggaactggaaatgctcgacagtttgctggccctcgggggtctggtattactgcgagacagcgtggaatgggaaggcaggtcacttttaaaggcactcgtgaaaaaaagcgccctgtgtggcgagcaagttcatattttaggctgcgaggtgtctgaagaagagttcagggaagggtttgacagcgacatcaacaacaggctggtataccacgacttcttccgggatcctctgaattggagcaaaacagaagaggcttttcccggtgggcctctcggagcgctgagagctatgtgtaagcggacagatccagtcccagtgaccattgccctggactcactgagctggctcctgctcagactgccatgcacaacgctgtgccaggtcctgcacgccgtctcgcaccaggattcttgtcccggtgactcatctagtgtgggcaaggtaagtgtcctaggcctcctccatgaggagttgcatggccctggaccagtgggcgctctgagctccttggctcagaccgaggtcactctagggggaacaatggggcaggccagcgcccatattctatgccggcgaccgcgacaaagacctacagaccagacgcagtggtttagcattctgcctgacttctctctggaccttcaagagggcccatctgttgagagccaaccctactctgaccctcacataccacccgtggatcctaccacccacctcactttcaaccttcacctgagcaagaaagagcgagaagcaagggatagcctcatcctgccattccagttttccagcgagaaacagcaggccctcctgcgccctcggccaggccaggcaacaagtcacatcttctatgagccggacgcctacgatgacttggatcaggaggaccctgacgatgatcttgatatctag

SEQ ID NO: 28431 - DNA, 1473 bp, synthetic construct
  source 1..1473: mol_type = other DNA; note = Synthetic coding sequence
atgaacggagctctcgaccattctgaccagcctgatccagatgccatcaaaatgtttgtgggccagatccctcggtcctggtcagagaaggagttgaaagagctgtttgagccatatggtgccgtgtatcagatcaacgtcctgcgggataggtctcagaaccctcctcagtcaaaaggctgttgtttcgtgaccttttacaccaggaaagctgcactcgaggcccagaacgctctgcacaatatcaagactctgccgggaatgcatcaccccatccagatgaagccggctgatagcgagaaatctaacgctgtggaggatagaaagctgttcattggcatggtgtcaaagaaatgcaacgagaacgacatacgcgttatgtttagccctttcggacagattgaagagtgccggatccttcgagggcctgacggtctgtcccgcggatgcgccttcgtcacattctccacacgcgctatggctcagaacgccatcaaagccatgcaccagagccagactatggagggatgctcgtctcctattgtcgttaagtttgccgacacacagaaagacaaagagcagaggcggctgcaacaacaactggcccagcagatgcagcagctcaatacagctacttgggggaatctgactggactgggtggactcacaccgcagtacctcgcactcctgcagcaggcgacgtcatccagcaacctcggggcattttctggcatacagcaaatggccggaatgaacgccttacagttgcagaatctggccaccctggccgcagcagcagccgcagctcagacgagtgccacctccacaaacgcaaaccctctgtcaactaccagttctgctctgggggctctgacgtccccagtagccgcaagtaccccaaacagcactgcaggcgcagcgatgaactccttgactagcctgggcactctgcaaggcctcgctggcgctaccgtgggcctcaataatatcaacgccttggccgtggctcagatgttgagtggcatggccgcactgaatggaggactgggggcaactgggctcacaaacggtaccgccggaaccatggatgccctgacacaggcctacagcggtatccagcagtacgcagccgcagccctgcctacactgtacagccagagcctgcttcaacagcaatccgctgctggatcgcagaaagagggacccgaaggtgctaatctgtttatatatcacctgccccaggagttcggtgatcaggatattctgcaaatgtttatgccctttggtaacgtgattagtgccaaggttttcattgacaaacagaccaacctcagcaagtgctttggctttgtgagctacgacaatccagtgagcgctcaggccgctatccaggcgatgaacggctttcagatagggatgaagcgactcaaagtccagctgaaacgcagcaagaacgattccaagccgtactag

SEQ ID NO: 28432 - DNA, 1428 bp, synthetic construct
  source 1..1428: mol_type = other DNA; note = Synthetic coding sequence
atggaagccctactcgagggcatccagaaccggggacacggagggggatttctgacctcatgcgaagccgagcttcaggaactgatgaaacagattgatattatggtcgctcataaaaaatcagagtgggagggcaggacccacgccctagagacatgcctgaagatcagggaacaggaactgaaatcgctgagaagccagctggatgtcacgcataaggaggtgggcatgctccatcagcaagtggaggaacacgaaaagatcaaacaggagatgacaatggagtacaaacaggaattgaagaaacttcacgaggaactgtgcatactaaaacggtcctatgagaagcttcaaaagaaacagatgagagaatttcgaggcaacaccaagaatcaccgggaggatcgcagcgagatcgagcgattaacagccaagattgaggaatttcgccagaaatccctggactgggaaaagcagaggctaatctatcaacagcaggtgagcagcctcgaggctcaaagaaaagccctggcagaacagagtgaaattatccaagcccagctcgtaaacagaaagcagaagcttgaatctgtggaacttagcagccagagcgaaattcagcatctgagcagtaagctcgagcgcgcaaacgacactatttgcgcgaacgagcttgagatcgaacgtctgaccatgcgggtgaatgacctcgttggtaccagcatgactgtcctacaggaacagcaacagaaagaggagaagctccgcgaatccgagaagctgctcgaggccctgcaggaagagaagagggagctcaaggcggcattacagagccaggaaaacctgattcacgaggctcgtattcagaaggagaagctgcaggaaaaggttaaagcgacaaacactcaacacgcagtcgaagctatttcacttgaatccgtctccgctacttgtaagcagctgtcccaggagctcatggaaaagtacgaggagttgaaacgcatggaggcgcataataatgagtacaaggccgaaataaaaaaactgaaggaacagattcttcagggtgagcaatcttacagctccgcgcttgagggaatgaagatggagatctcccatctgacacaggaactgcaccagagagacattactatcgcttcaacaaaagggagcagctctgatatggagaagaggctgagagccgagatgcagaaagccgaagacaaggctgtcgaacacaaggagatcctggaccagctggaatcactgaaactcgaaaaccgccacctcagtgagatggtgatgaaattggagctcggcctacatgagcggtggggctttaccatgctgagtagcctggtactaaattttggcatacaggcaatccgccagccccagcggccaaaggtcctggagttacaggtttag

SEQ ID NO: 28433 - DNA, 2340 bp, synthetic construct
  source 1..2340: mol_type = other DNA; note = Synthetic coding sequence
atgagaatcgaggagcgtaagagccagcatctcaccggcctgaccgatgagaaagttaaagcatatttgagccttcatccacaggtgctcgatgaattcgtctctgagtctgtgtcagcggagacggtggagaagtggctcaagagaaagaacaataagtccgaagacgagagtgcccctaaagaagtgtcgaggtatcaggacacaaatatgcagggagtcgtgtacgagttaaactcctatatcgagcagaggctagatacgggcggagacaatcagctgcttctgtacgagttgtccagcattataaaaatagccacgaaggcggacggcttcgcgctttactttctgggcgagtgtaataacagcctatgtattttcaccccgcctgggatcaaagagggaaagccacgcctaataccagctggtccgatcacacaaggcaccactgtgtcggcctacgtagccaaaagtcggaaaaccctgcttgttgaagacatcctaggagatgaacggttccctaggggcacaggacttgagtccggcactaggatccaatctgttctgtgtctgcccattgtgacggcaatcggcgacctcattggcattctggagttgtatcgtcactggggcaaagaggctttctgcctcagccaccaggaggtagccaccgctaacttggcctgggcctcggtggccatccaccaggttcaggtttgccggggtctagccaagcaaactgaactcaatgattttctgcttgatgtctctaagacatattttgataatatagtcgcaattgattccctcttggagcatatcatgatctacgcgaaaaaccttgtcaacgccgaccgctgcgcactcttccaggtcgaccataagaacaaggagctgtactcagacctgttcgacattggcgaggagaaggagggcaagccagtgttcaaaaaaacaaaagagattagatttagcatcgagaaagggattgccggacaggtggccagaaccggtgaggtactgaacataccagatgcatatgctgaccctagatttaatcgagaagttgatctgtatacagggtataccactaggaatatactatgtatgccaatcgtttcacggggaagcgtgatcggcgtggtgcagatggttaacaaaatatccggcagcgccttttcgaagactgacgagaacaatttcaagatgttcgctgtattttgcgctctcgctctccattgcgctaacatgtaccaccgaattcgacactcagaatgtatttatagagtgacaatggaaaagttgtcttatcactctatttgcacaagcgaggagtggcagggcctaatgcaattcacactgccggtcaggctgtgcaaggaaattgaactgttccactttgatatcggaccatttgagaatatgtggcccggaatttttgtatatatggtgcatcgaagttgtggcacaagctgttttgagttggagaagctgtgtcgttttattatgagcgtcaagaagaattatagacgagtaccataccacaactggaaacacgccgttactgtggcccactgcatgtacgctatcctgcaaaataatcacacattgtttaccgacctagaacgcaagggattgctgattgcctgtctgtgccatgatctggatcaccgcggtttttccaattcttatctgcaaaaattcgatcaccctctcgcggctctctactctacgagtaccatggaacaacatcacttcagccagacagtttcgatcctgcagttggaggggcataatatcttcagcactctgagttcctcagaatacgaacaagtgcttgagatcattcgtaaggctatcattgcgaccgacctcgcactctactttggcaatagaaaacagctggaggagatgtatcaaacaggttcactgaatctgaacaaccagtcccaccgggaccgtgtaattgggctgatgatgacagcttgtgacctgtgctccgttacgaagttgtggccagtaacaaaactgactgcgaacgacatatacgctgagttctgggccgagggcgatgaaatgaagaagctcgggatacagcctatccccatgatggatcgcgataagaaagatgaagtgccccagggacagctggggttctacaacgcggtcgctattccctgttataccaccctgacccaaatcctgcccccaaccgaacctctgctcaaagcctgcagggataatttgagtcagtgggagaaggtaatccgaggagaagaaacagccacatggatctccagccctagcgtagcacagaaagccgcagcatcagaagattag

SEQ ID NO: 28434 - DNA, 2112 bp, synthetic construct
  source 1..2112: mol_type = other DNA; note = Synthetic coding sequence
atggcggcagcaaccggggaccccggactctctaaactacagtttgccccattttcaagcgccctcgacgtaggtttttggcatgagcttacacagaagaagctgaatgaatatcgcctcgacgaggccccaaaagacataaagggatactactataacggcgacagtgctggtttgcccgctcgactcaccctggaattctccgcgtttgacatgagcgccccaactcctgccaggtgttgcccagcaattgggactctctacaatacaaatacgctcgagtccttcaagacagctgacaagaaactactgcttgagcaagccgcaaacgagatttgggagagtataaagtccggaaccgccctcgagaaccccgtcctgctgaataaatttctcttgctcacttttgcagacttgaaaaaataccacttctactactggttttgctatcccgctttatgcctgccagaatccctgcctctgattcaggggccagttggactggatcagcgtttttcactcaagcagattgaagcccttgagtgtgcctatgacaacctatgtcaaactgagggagtgacagcactaccttattttcttattaagtatgacgaaaacatggtgctggtatccctactgaagcattactcagacttctttcagggacagcgcaccaaaattaccatcggtgtgtatgatccatgtaacctagcccagtatcccggatggcccttgaggaacttcctcgtgctggccgcacataggtggtcgtcttccttccagagcgttgaagtggtttgttttcgcgataggactatgcaaggcgcaagggacgtcgcacactccattattttcgaggtcaagcttcctgaaatggcgttctcacccgattgccctaaggccgtgggatgggaaaaaaatcaaaaaggcggaatgggcccacgcatggtgaacctgtctgagtgtatggatcctaaacgattggccgaaagctctgtggatttgaatttgaaactgatgtgttggcggctggtgccaacactcgacctggacaaggtggtcagtgtgaaatgcctgttactgggtgccggaacccttggctgcaacgtcgcaaggacactcatgggttggggagtgcgtcacattacgtttgttgataacgcaaagattagttacagcaatcctgtgcgccaacccttatatgagtttgaggactgtctggggggagggaaaccaaaggcgcttgccgcagcagatcggctgcagaagattttccccggagtcaacgccaggggtttcaatatgagtatcccgatgcccggacatcctgtcaatttttccagcgtcactctggagcaggctcggcgagacgtcgagcaacttgagcagctcatagaaagtcatgacgtggtattcctactcatggatacacgggaaagccgctggcttccagcggtgatcgccgcttccaaacgcaaattagtcatcaatgcggctctgggctttgatacttttgtagtgatgcgacatgggttgaaaaaaccaaaacagcagggggcaggagatctgtgtcctaatcaccccgtcgcctctgctgatttgttaggaagctccctcttcgcaaacattccagggtacaagttaggttgttacttctgcaatgatgtagttgcccctggcgattccacgcgagatcgtacccttgatcagcagtgcactgtatctagacccggacttgcggtaattgccggagcattagctgtcgagttgatggtttccgttttgcagcaccctgaaggagggtacgccatcgcatcctcatccgacgatcgcatgaatgagccacccacctctctgggccttgtgccccaccaaatccgcggatttctgagcaggttcgataatgtcctgccggtttcgctcgcattcgataagtgcacagcttgcagctccaaagtactggatcagtatgagagggaaggttttaacttcctggccaaggtgtttaactccagccacagctttctcgaggatttgaccgggctgaccctgctccaccaggagacccaggccgctgaaatctgggacatgtccgatgatgaaaccatctag

SEQ ID NO: 28435 - DNA, 3246 bp, synthetic construct
  source 1..3246: mol_type = other DNA; note = Synthetic coding sequence
atggagtccgcaggcctcgagcagctgctgcgggaactgttactccccgacactgagaggatccgccgagccacggagcagctgcaaatagtgctgagagcccctgctgccttacccgcactttgtgatttgctcgcatcagccgcagaccctcaaattagacagtttgcggctgtgctgacacgccgtagactcaacacaaggtggcgtaggctggctgcggagcaacgggaatccctcaagagcttaatactaacagctctgcaaagagagacagaacactgtgttagcctaagcttagctcagctgagcgccaccatttttaggaaggaagggctcgaggcctggccacaacttctacagctgctgcagcacagcacacacagcccacattccccagagcgggagatgggcctcctgctattgtcagtggtggtgacgtctaggccagaggctttccagccgcaccacagggaactgcttcgtcttctaaatgagacacttggagaggtcggatcccccggacttctattctacagcttgcgaacacttaccaccatggctccatatttgtcaacagaagacgtccccctcgctcgtatgctggtcccaaaactgatcatggctatgcagaccctgattcctattgatgaagcgaaggcatgtgaagcactggaggccctggatgagctgcttgagtcagaggtgcccgtgataaccccatacctgtctgaggtgctcacattctgccttgaggtggcacgtaacgtggctcttggaaatgccattagaatcagaatcctatgttgcttgacattcctggttaaagtgaagtccaaagctctgctgaagaaccgcctcctgccccctcttctccacactttgtttccaatcgtggctgcagagcctccacccggtcagctagacccggaggaccaagactccgaggaggaggaactagaaattgagctgatgggcgaaacaccaaagcattttgccgttcaggtcgtagacatgttggcactacatctgcctcccgaaaaactgtgtcctcaacttatgccaatgttggaagaggcactgagaagtgaaagcccgtaccagcgtaaagctggattgctggtgttagcggtgctgagtgacggtgccggagaccacatccggcaacgccttctgccgcctctgctgcagatcgtctgtaaaggactcgaagatccttctcaagtcgtacgcaacgctgccctgtttgctctggggcagttttcggagaacctgcagccacatatctcgagctactctcgggaagtcatgccacttcttctggcgtacctcaaaagtgtgccccttgggcacacgcaccatctggccaaagcctgttacgcactcgaaaactttgtggaaaatctgggaccaaaagtgcagccatatttgccagagttaatggagtgcatgctccaactcctacgaaatccctctagcccccgagccaaggagctcgctgtttcggccctgggggcaatagccactgccgcacaggccagcttgctgccttattttcccgctatcatggagcatctgagggaatttctgcttacgggtagggaagatctgcagcctgtccagattcagtctctggagactctgggcgtccttgctcgtgcagtcggagagccgatgcggcctttggctgaggagtgttgtcaactgggtttggggttgtgcgatcaggtcgatgatcccgatctgaggcgctgtacatattccttgttcgctgctctttctggcctgatgggcgaaggattagctccccatctggaacagattacaacgctcatgctcctgagtttgcggtccacggaagggattgttccccagtacgacggatcctcatcctttctcttgttcgatgacgaatctgatggagaggaggaagaagagctgatggacgaagacgtggaagaagaggacgattccgagatcagcggatactctgttgagaatgctttctttgatgagaaggaggacacatgtgccgcagtgggagaaatatccgtgaacactagtgtggcgttcctgccttacatggagagcgttttcgaggaagtgttcaagctgcttgagtgcccccacctcaacgtgagaaaggcggctcatgaagctttagggcagttttgctgtgcactgcataaagcctgccagtcatgccccagcgaaccaaacacagctgccttacaggccgcattggctcgcgttgtgccctcctatatgcaggcagttaaccgggaaagagaacgccaggtcgtcatggcagtacttgaggcccttactggagtactacgctcttgcggtacgcttacactcaagccaccaggcagactggctgaactgtgcggggtgctgaaagctgtgttgcaacggaagaccgcatgtcaggacacagacgaagaggaagaagaggaggacgatgaccaggcagagtacgacgctatgctgctcgagcacgccggagaggcaatacccgcattggctgccgctgccggaggtgattcctttgctccatttttcgctggatttctgcccctgttggtatgcaagaccaagcagggatgcactgtggcggagaagtcctttgctgtcggaactctggcagaaaccattcagggcctcggggctgcaagtgcgcagtttgtgagcagattgcttcctgtccttctctctacagctcaggaggctgaccctgaagttcgctccaacgcaatattcggaatgggagtgttggcagagcatggcggtcaccctgcacaggagcattttcctaagctgctgggactcctgtttccacttctcgccagggagcggcacgacagggttagagataacatttgcggagccctggctagactgctcatggcctctccaacaaggaaacccgagccccaggtgctggctgcattgcttcatgcactccccctgaaagaagacctggaggaatgggtcacgatcggacgactctttagctttctctaccagagcagtccagaccaggttattgatgttgcacctgaattgcttcgaatatgctctctgatcctcgctgataacaaaatccccccagacaccaaggccgcactgctcttgctcctgacctttctggccaaacagcacactgactcttttcaggcggcactcggttctttacctgtggacaaggctcaagagcttcaggctgttctgggcctttcctag

SEQ ID NO: 28436 - DNA, 7223 bp, synthetic construct
  source 1..7223: mol_type = other DNA; note = Synthetic coding sequence
atggtaggcgagcgtcatgccggagaccttatggtcccactgggccctcggcttcaggcgtaccccgaggaacttatcagacaaagaccaggccatgatggtcatccggaatatctgattcgatggagcgttctgaaatgtggagaagtggggaaggtgggcgtagaggaaggtaaggccgagcatatcctgatgtggctaagcgcgcctgaggtgtatgctaactgtcccggtctgcttggggaacgagccctgagcaaagggctgcaacacgagccggcaggcgtgtccgggtccttccccagggaccctggcggtctggatgaggtggccatgggggaaatggaagctgacgtccaggccttggtgcgccgtgccgctcgccagctagctgagagcgggacaccttctctcacagctgcggtcctgcataccatccacgtgctgtcagcgtacgcctccataggtcccctgaccggtgtgtttcgagagacgggggcactggatctattgatgcatatgctctgcaaccccgagcctcaaatccggagaagtgctggcaagatgctgcaggcactagccgctcacgacgccggtagtcgggctcatgtgcttctctcactttcccagcaggacgggatcgagcaacatatggacttcgattctagatacacactgctcgaactctttgccgaaaccacatccagcgaggaacactgcatggccttcgagggaattcatttgccccagataccgggaaagcttttgttctcactggtgaagaggtacctgtgcgtgaccagcttgttggatcagttgaatagttctcccgagctgggagcaggagatcaatctagcccttgcgccactcgcgaaaagagtcgtgggcaaagggagctggaattctctatggcggtcggaaatctcatctccgaactcgtcagatcaatgggatgggcccgtaacctaagcgagcagggcatgtccccacctagacccacaagatccatctttcagccatacatctccggaccatctttgctgctacctacaattgtgacaacccccagaagacaaggttgggttttcagacagcgatccgagttcagcagtagaagcggatacggcgagtatgtacagcagacactgcaacccggtatgagagtcagaatgctcgacgactacgaggagatttctgccggagacgaaggtgagttccgacaaagtaacaacggcattcctccagtccagaccctcggggagaaggcactcggagagatttctgtgagtgtggaaatggctgaaagccttctgcaggtgctgagcagtcgcttcgagggaagtacattgaacgaccttctaaattcccaaatttataccaagtatggcctgctgtctaatgagccctcaagctccagcacttcccgaaaccatagctgtactcccgacccagaggaagagtccaagtcagaggcatcctttagcgaagaagaaacagaatccctgaaagccaaggctgaagctccaaaaacagaagctgagcctaccaagacccggactgagactccaatggcgcagtctgatagtcagctattcaatcaattgctggtgaccgaagggatgactctgcccaccgaaatgaaggaagcagccagcgaaatggccagggccctccggggacctggcccacgcagctctctggatcagcacgtggcggctgttgtggctacagtgcaaatctccagcctcgacacaaatctccaactctctggactgtccgctctgtcacaggccgttgaggaagtgacagagcgcgatcaccctttagtgcgtcctgatagaagtcttcgtgagaaattggtgaaaatgctggttgagctgcttactaaccaggtcggagagaagatggttgtggttcaggctcttagactgttatacctgcttatgaccaaacacgagtggcggccactgttcgctagggaggggggtatctatgcagtccttgtctgcatgcaggaatacaaaacgtccgtcctcgtacagcaggccggtctcgctgctctgaagatgttagccgttgcctcttccagtgaaatccccacatttgtcacggggcgtgactccatccattcactgttcgatgctcaaatgacacgggaaatctttgctagtattgattctgcgacccgccctggctctgagtccctgctcctgacagtacccgcagcagttatactcatgttaaacacagagggatgttcctcagcagccaggaatggcctgttgttattaaaccttctgctgtgcaatcaccatacgctgggggatcagattatcacgcaggaattacgtgacacactgtttcggcatagcggaatagcccctcgtaccgagcctatgccaaccacgagaaccatattgatgatgcttctgaataggtattctgaaccaccgggaagtcctgagagggcagcactggaaacaccgataatccaggggcaagacggatctcccgaactgctgatcagaagtttagtggggggtccctccgctgagctcctgttggacctcgagagagttctgtgccgtgagggtagcccagggggtgctgtgcgtccccttctcaaaaggctacagcaggagacgcagcccttcctgctgttgctccggactctcgacgcccctggccctaataagacgctcttattgtctgtgctcagggtgatcacaagattattggatttccctgaggctatggttctaccctggcacgaggtgttggagccttgcctcaactgcctgagcggaccctccagcgatagcgaaatcgtgcaggaactgacgtgctttctgcatagactcgcgtccatgcataaagattacgcagtggtgctttgttgcctcggagccaaagaaatcctgtcaaaggtcttggataaacattcagcccagcttctgctggggtgtgagctgcgagaccttgtgactgagtgtgagaaatacgcccagctgtattccaacctcacatctagtatcttggcgggttgcattcagatggtgctcgggcagattgaagaccaccggagaactcaccagccaatcaatataccattcttcgacgttttcctccgacacttgtgccaggggtctagcgtagaggtgaaggaggacaaatgttgggaaaaggtggaggtcagctcaaatccccatcgcgcttccaaactcaccgaccacaatccgaagacttactgggagagcaatggatctaccggcagtcattacatcacactccatatgcaccgtggcgtgttggtgaggcaattaacactgcttgtggccagtgaagattcgtcttatatgcccgctcgggtcgtggttttcgggggtgacagcaccagctgtatcgggacagagctgaacactgttaatgtcatgccatctgctagcagggtgattctgctggaaaaccttaacaggttctggcctataatccagattaggatcaagcggtgccaacaggggggaatagacaccagggtccgcggagtggaggttctgggtccgaagcccacattttggcctctgttccgagaacagctatgccgccgtacctgcttgttctacaccattcgggctcaggcctggtcccgcgatatcgctgaagaccacagaaggttgctgcagctgtgcccaagactcaatagggtcttgcgtcatgaacaaaactttgccgacaggtttctgcccgacgacgaagctgcacaggccctcgggaaaacctgttgggaggcacttgttagcccactggtgcagaatatcacatccccagatgcggaaggcgtgtccgcactcggttggttgctcgaccagtatctggagcagagggagacctctcggaatccactctctcgagcagcaagcttcgcatcacgggtgagacgcctctgccacctattagttcatgttgagccacctcccggaccatctcccgagccgagcacgcgcccattctccaaaaattccaaaggacgggataggtcccccgcaccttccccagtcctcccctcctcgagcctgcgaaacataactcagtgctggctgtctgtagtccaggaacaggttagtcgatttctggctgccgcttggcgtgccccagatttcgtcccccgttactgtaagttgtacgaacatttacagcgggctggtagcgaactcttcggcccacgtgcagcatttatgctcgcgctcaggtcaggatttagcggtgccttgctgcagcagtctttcttgactgcagcccacatgtccgaacagtttgccagatacatcgaccaacagattcagggaggattaattggtggagcaccgggagtagagatgttagggcagctacagcgccatctggaaccgataatggttctctctggattagaattagccactacctttgaacacttttaccaacattacatggccgacaggctcctctcatttggcagctcgtggctggagggcgctgtgctcgaacagataggtctctgttttcctaacaggttgccccagcttatgctgcagtctctgagcacatctgaggaactgcagagacagttccacctgtttcagctccagcggctggacaagctttttctggagcaggaggatgaggaggaaaagaggcttgaagaggaggaggaggaggaggaggaggaggaggccgagaaagaactgtttattgaggacccaagcccggctatttcaatcctggttctgagccctcggtgttggccagtcagtccactctgctatctgtaccaccccaggaagtgcctgccaaccgagttttgtgacgctttggataggttctctagtttctatagccagagccaaaatcacccggtccttgatatgggcccacatcgccgactgcagtggacctggctggggagagccgagctccagttcggcaaacaaattttacatgtctccaccgtgcagatgtggctactgttgaagtttaatcagacggaagaagtcagcgtggaaacgcttttgaaagatagcgatctgtcgccagaactgctcctgcaggcattggtgcccctaacatctggcaacggccctctcacccttcatgaaggacaagatttccctcacggcggagtcctgcggctgcacgagcctggccctcagcggtcaggagaagcgctgtggttaatacccccacaagcatatttgaacgtggagaaagacgaggggaggactttagaacaaaagcgaaacttgctttcatgccttctggtgagaattctgaaggcacacggcgagaagggactgcatatagaccagctggtgtgtttggtgctcgaggcgtggcagaaagggccaaaccctcccggtaccctaggacataccgtcgctggcggagttgcatgtacctccactgatgtactgtcatgtattctgcacctgctcggtcaggggtatgttaagcggagagatgatcgtcctcagattctgatgtatgctgccccagagccaatgggcccttgtcgcggtcaggccgacgtccccttctgcgggagtcagagcgagactagcaagcctagcccggaggccgtcgccaccctggcatctcttcagttgccagctgggcgaacaatgtctccgcaggaagtggaaggcctgatgaagcagaccgtgagacaggtgcaggaaactcttaatctggagccggacgtagcccagcatctcttagcccactcacactggggagccgagcagttactccagtcttacagtgaggaccccgagccgctgcttcttgccgcagggctgtgcgtgcaccaagcgcaggccgttcccgtcaggcctgatcactgtcccgtgtgcgtttcccctcttggctgcgacgacgatttgccctccctgtgttgcatgcactactgttgtaaatcctgttggaacgaatacttgacaaccaggattgaacagaatctcgtgctaaactgtacatgcccaatcgctgattgccccgcacagccgaccggggcttttatacgggcaattgttagtagccctgaagtgatctcaaaatatgagaaggcattgctgcgtggttacgtagagtcgtgttccaacctgacctggtgcacgaacccacaaggctgtgaccgcattctgtgtcggcagggcctgggctgcggcaccacatgttccaaatgcggttgggcttcatgttttaactgttcctttccagaggcccactaccccgcttcttgtggacacatgagtcagtgggtggacgacggcggatattatgacgggatgagcgttgaggctcaatccaaacacttagccaaattaatcagtaagcggtgccccagctgccaggccccaattgagaaaaacgaaggctgtctgcatatgacctgcgctaagtgcaatcacggattttgctggcgctgtctgaagtcctggaagccgaaccataaggactactataattgttccgctatggtgagcaaggccgctcgccaggaaaagaggtttcaagactacaacgagcgatgcacatttcatcatcaggcacgtgagttcgccgtcaatctgcgcaaccgagtgtcagcgattcacgaggttcctcctcctcgttctttcacctttctcaatgatgcgtgtcagggtcttgagcaggcgagaaaggtactggcttacgcttgtgtctattcattttactcgcaggatgcggagtacatggacgttgtggagcaacagacagagaacttggagctccacaccaacgctctgcagatccttcttgaggaaaccctgctgcggtgtcgagatcttgcctctagcctgcggcttctcagggcggactgcttgtctactggcatggaactgttgcgtcgtattcaggaacgtcttctggcgatcctccagcactcagcccaggacttcagagtggggctgcagagcccttctgttgaagcctgggaggctaagggccctaatatgcccggatcccaaccacaggcctcttctggcccagaagctgaagaagaagaggaagatgatgaggacgacgtgcctgagtggcagcaagacgagtttgatgaagaactggataatgatagctttagttatgacgagtcagagaatctcgaccaggaaacattctttttcggcgacgaagaggaggacgaagatgaggcgtacgacta

SEQ ID NO: 28437 - DNA, 672 bp, synthetic construct
  source 1..672: mol_type = other DNA; note = Synthetic coding sequence
atggaggatgtgaaactagagttcccttccctcccacagtgtaaggaagacgccgaggaatggacatatcccatgcggagagaaatgcaggagatcctgcctggactgttcctggggccttacagctccgccatgaagtcaaaactccctgtcctgcagaagcacgggattactcatatcatatgtatccgccagaacattgaggcgaacttcattaaacctaattttcagcagctttttcgctaccttgtcctggacatagccgataacccagtagaaaacatcattaggttctttcccatgacaaaggaatttattgacgggtcactgcagatggggggtaaggtgttggtgcatgggaatgccggaatctctcgatctgcagcctttgtgattgcctatataatggaaacattcggcatgaaataccgcgatgccttcgcctacgtgcaggaacgcagattctgcatcaacccaaatgccggatttgttcaccagctgcaagaatacgaagccatctatcttgcaaagttgaccattcagatgatgagccccctccagatagaacgatcactctcagtgcatagtggaaccaccgggtctttaaagagaacacacgaagaggaggacgacttcggcaccatgcaggtagcgactgcccagaacgggtag

SEQ ID NO: 28438 - DNA, 1689 bp, synthetic construct
  source 1..1689: mol_type = other DNA; note = Synthetic coding sequence
atggatgacaagggtgatccttcaaatgaggaagcgccaaaggcaatcaaacctacttctaaagagttcagaaaaacctggggtttcagaaggaccaccattgccaagcgggagggagcgggagatgctgaagcagatccactggaaccccctccgcctcagcagcagctcgggctgtccctccggcgtagcggtcgacagcctaaacggactgagcgcgtcgagcagtttctgaccatcgccaggcgaaggggtagaaggtcaatgcctgtttccctggaagatagtggggaacctaccagctgtcctgcgactgacgcggaaaccgccagtgagggcagtgttgagtctgcctcagagaccagatccgggccacagtcagcatctacagccgtcaaggaaagaccagcttcctcggagaaagtcaaggggggagatgaccatgatgacacgtcggactccgactccgatggtctcactctcaaggagctccagaatagactcagacggaagcgagagcaggagcctacggagcgtcccttgaagggtatccagagccgtctcagaaagaagcgacgcgaggaagggccagccgagaccgtgggctccgaagccagcgacacggttgagggggtgttgccttccaagcaggaacccgaaaatgatcagggagtggtgagccaggccggaaaggacgatagagagtctaagctggagggaaaggctgctcaggatatcaaagacgaagagcccggagacctgggcaggccaaagcccgagtgtgagggatatgatcctaatgcactctattgcatctgtcgacaaccccacaacaataggttcatgatctgttgcgataggtgcgaggagtggttccatggggattgcgttgggatttccgaggcccgagggaggcttctcgaacgcaatggcgaagattatatctgtcctaactgtacgatcctgcaagtgcaggacgagacacactccgaaactgccgatcaacaggaagccaaatggcgccctggagatgctgatggtaccgattgcacatcaatcggaaccatcgaacagaaatccagcgaggaccagggtatcaagggccgaatcgaaaaagccgcaaacccctccgggaagaaaaagctgaagatcttccagcctgtgattgaggccccaggcgcatcaaaatgtatcggacctggctgctgccatgtggcccagcccgactctgtttattgttccaacgattgtatactcaagcacgcagcagcgacaatgaagttcttgagctccgggaaggaacagaaaccaaaacccaaagaaaagatgaaaatgaagccagagaaaccttccttaccaaagtgtggcgcacaagctggaatcaaaatcagctccgtgcacaaaagacctgctccagagaagaaggagacgaccgtgaagaaggcagtcgtggtgccagccaggtcagaggcactcggcaaagaggccgcatgcgagagttccacccctagctgggcaagcgaccacaattacaacgctgtgaagcccgaaaaaactgctgcaccaagcccttcgcttctgtataagtgcatgtatcatctcggggtgggtctcctcgatccatcacgaagcttctggatcgccatcccctgggcctgtcccggtctcggcgtggcggctctttgctag

SEQ ID NO: 28439 - DNA, 360 bp, synthetic construct
  source 1..360: mol_type = other DNA; note = Synthetic coding sequence
atgatcctgcagcagcccctgcaaagaggaccccagggcggagcccagaggctccctagagcggcactgggggtgacctggggcctggacgctcgagagccactacgcaaacagtttctgtctgaggaaaacatggcgacccatttttctcagttgtcccttcacaatgatcatccatattgctcaccacctatgaccttttcaccagccctaccacccctacggagcccctgttcggaattgttactttggcggtatcctggtagtctgatccctgaggccctacggcttctgcggcttggcgatacccctagccccccttacccagccacacctgcaggagatattatggaattgtag

SEQ ID NO: 28440 - DNA, 1794 bp, synthetic construct
  source 1..1794: mol_type = other DNA; note = Synthetic coding sequence
atggttcctgaggagcgcagggtcgggctaagttccgatgagacttcgtccgatagtctgaagagttggcatagcatttgtgtgttggactccaaggaacagccacttgcttgccaacaaaagcaacgacagttcgtgaaacccgtgacagagtccgaacaacccacagtactcgagcttctgcttgccgaactccgcactctgttctccgccgtcctccaggactcttcacctgctgcctggcggtacctccacgctgtcctgggtctactaccaccttaccgggaactgctcgtgggtcacttagacctactccccttcttggagcagctctactgttgggccccatgggttcagacgcatctccacctggacctgttgggggcaattgtgcaggcattcccaccagactctagcctcctggattccgcttcccatgccgattgctgccctcaaaagcggcgactgcaccaccggcctccttgccctgcatgcccttttgtgcaggcccagtggtcaaggcagcaggtcaaagaggaactcgcaacatggctccggcctcttaccttaccggagcttcagagatgtttgggaatagtcggtgcacaggtcgccttggaagaagccgtgtggttggatggcctttctctgctaccgctggccctggccgctgacatcccagtgcgatatgaatctagtgacactgacaacgccgaagtggaacctgtgggcaggaaagaaactcggagccagctcgattacgaagtgcccagggagaaagctttccagaagtccagcacagggttcagtccggaaacttccttccttgatagccaggtcatgaccgccctcaaaatggagaggtacctgaaaaagatccacttcctttatcttaacgtggcccctagccgatactttagaccctactctctgatggtcgtccccccagacaaagtcaatccggagcactatatctttagccccttcggaattctgcatgtgcatcccgtggagggctctgagactatgacactggggacttggcaccaccactgtgttttatggcagcagttacagttcattccgttcttcaaatattgtttgctgaggaagtcatttacgtgctggaagaaaaacgtcaggttgcaaggactgcatcgactccagaaatttctggagaaccatctgctgctggcagtgccacacttcggggctggcttattacacatcagcaggctgctgcaggagttgcactccgtgtcctggctcccgcaggagcttgaccgctgttacgaattactcgatctgcagacagctcttgccgaagaaaaacataaggccctgaggctgctccaccggtgcctgaacttgtgcacaagtattctgcggttagtgcacgaggatacctatcatatgcagcagtgcttgcaagaacgggtccaaaactgcgaccgaatcaggaccggtcagggcagtatttacctccagcgagtccagcacaagcagttagagcagaagcttaaacaggcagaggcatggtggctgcagctgggtaaattcgcgcgtttagtcgattacatgatatgccagtctctgatttcggttttggaagaacagatcacatccttcgttgcaaatatacttcaggcacctcggcagaagccctttctttcaagtcaattagtcttcgatgaccatggtcaactttctcatgtgccctgtgttgaaaacatgatacagactcttactggtgggctccagagcgttaaaaccagcgcactgcaggtgttctag

SEQ ID NO: 28441 - DNA, 591 bp, synthetic construct
  source 1..591: mol_type = other DNA; note = Synthetic coding sequence
atggaagatttgttcgagactttccaggacgaaatggggttctctaatatggaagacgatgggccagaagaagaagaaagggtcgctgagccccaagctaacttcaacacaccacaggctctgaggtttgaagagctgcttgccaaccttctaaatgagcagcatcagattgctaaagagttgttcgagcagctgaagatgaagaagccaagcgccaagcagcaaaaggaggtggaaaaggtgaaaccgcagtgtaaagaggtgcaccagactctgattctggatcccgctcagaggaagcggctgcagcagcagatgcagcagcacgtgcagctgctgacacagatccacctgttagcaacctgtaacccaaatctcaatccggaagcttcctctactaggatatgtctaaaagaactcggaacgttcgcacagtcttctatcgctctacaccatcaatataatccaaagttccagacgctgttccagccctgcaacctgatgggcgcaatgcaattgatcgaagatttctctacacatgttagtatcgactgctccccacacaagactgtgaaaaagaccgtttgctag

SEQ ID NO: 28442 - DNA, 888 bp, synthetic construct
  source 1..888: mol_type = other DNA; note = Synthetic coding sequence
atggagttgatccaggataccagtagaccccctttagaatacgtgaaaggcgtccctctgatcaagtatttcgccgaggcccttggcccactgcagagtttccaagctcgccctgatgaccttttgatcaacacatatcccaagtctggaactacctgggtttcccaaatcctggatatgatctaccagggcggtgacctggagaagtgcaaccgcgctcccatatatgtgcgcgtgccttttcttgaagtgaacgaccccggagagccatctggacttgaaacccttaaagacacaccacctccaaggctgatcaaatcccatctgcctctagcactgctgccccaaacactgctggaccagaaagtcaaggtggtatacgtagcacgaaaccccaaggatgtggctgtgagctactatcatttccacaggatggagaaagctcaccccgagcccggaacatgggattcctttctagaaaaatttatggccggagaggtgagctacggtagttggtaccagcacgtccaggaatggtgggagctatcccgaacacatcccgttttgtacctcttctacgaggatatgaaggagaaccccaagagggagatccaaaagattctggagtttgtcggccgatctctcccagaggagaccatggacttcatggtccaacatacaagttttaaagagatgaagaaaaaccccatgaccaattacacaacagtgccacaggaactcatggaccattccatcagtccgtttatgcgcaaaggcatggctggagactggaaaaccaccttcactgtagctcagaacgagcgattcgatgccgattacgctgaaaagatggccggttgtagcctgtcttttagatccgaactgtag

SEQ ID NO: 28443 - DNA, 915 bp, synthetic construct
  source 1..915: mol_type = other DNA; note = Synthetic coding sequence
atgaagagagcccatcccgagtattcctcctccgatagcgagctggacgaaacaattgaggtggaaaaggaatccgccgacgaaaatggaaacctgtctagtgcactagggtctatgtcgccgactacctcctcacagattctcgctaggaagagaagacgcggaattattgagaagaggagacgggacaggattaacaactctctctcagaactcagacggctcgttcccagcgctttcgaaaagcagggatccgccaaactggaaaaggcagaaatcctgcagatgaccgtggatcacttaaagatgctgcacacagccggtggaaaaggttattttgatgcacatgctcttgccatggactataggagcctgggctttcgtgagtgtctcgccgaagttgctcggtacctgagcataatagaggggctggacgcttcagaccccctgcgcgtgcgactggttagccacctcaataactatgcgagtcagcgcgaggcagcatcaggagcgcatgctggactaggccatatcccgtggggcactgtcttcggccaccacccacacatagctcaccccctgctgctgcctcagaatggccacggaaacgctgggacgactgccagccctacagaaccacaccatcaaggcagactggggtcagcccatcctgaggcccctgcactgcgagctcccccttccggatccttaggccctgttctgcccgtggtgaccagcgcttctaaactgagccctcctctcctcagcagcgtggcctctctgtcagcttttccgttttcattcggctcgttccacctgctgtctcctaatgctctgtctccctctgcccctacacaggccgcaaatttagggaagccgtacagaccctggggcaccgaaatcggtgctttctag

SEQ ID NO: 28444 - DNA, 2529 bp, synthetic construct
  source 1..2529: mol_type = other DNA; note = Synthetic coding sequence
atgtgcgggagcgagcgcattctccaagccggaaatattctagagattagggtgggccaggccggagctcggagggtcgctacaatgacctcccctgtgctggtggatattagggaggaagtgacttgccccatctgcctggagctgctaactgagccactctctattgactgtggccactcattttgccaggcatgtattacccccaatggaagggagtctgtgatcggccaggagggggagaggagttgccccgtttgccaaacatcctaccaaccagggaatttaagacccaaccgtcacctggcaaacatcgttagacgactcagggaggttgttcttggtccgggaaaacagcttaaagcagtcctctgtgccgatcatggggagaagctgcaactgttctgccaagaggacggaaaagttatctgctggttatgtgaacgttcccaggaacatagagggcatcataccttcctggtggaggaggtcgcccaggagtatcaggagaaattccaggagagccttaaaaaattgaaaaacgaggagcaagaggctgaaaagctcacggctttcatccgcgagaagaaaacttcttggaagaatcagatggagccggagcgctgtaggattcagaccgagttcaatcagctgcgaaatatactggatagggtcgaacagcgcgagctgaagaagctggaacaggaggagaagaaaggccttaggatcatcgaggaggcggagaatgacttggttcaccagacccagagcctgagggagctgattagcgatctggaacgaaggtgccagggctccacgatggagttgctgcaggacgtgtcggatgtcactgagcgcagcgaattctggacattacggaaaccagaagccctgcccactaaactgagatccatgtttcgggcacccgacctcaagagaatgttgcgggtttgtagggagctgactgacgttcaatcctactgggccatccagggatctcttacaaggagggagaggcgggcttccggggtaaggacacggaggagccaaggtagctccgctatggccagcaaaattttgctgaacgttcaggaggaggtgacatgccctatatgcctggagctgttgaccgaaccactatccctggattgtggccattcactatgtagagcatgcattactgtgtcaaataaggaggcagtgaccagtatgggaggcaaatcatcttgtcctgtgtgcgggatcagttacagctttgagcacctgcaggccaaccagcaccttgcaaatattgtcgagcgcctcaaggaggtaaaactgagtccagacaacggaaaaaaacgtgacctctgcgatcatcacggagagaaactcctgctgttttgtaaggaggatagaaaggtgatttgttggctgtgtgaaagatctcaggagcaccgcggacaccatacggtgctgactgaggaggtgttcaaggagtgccaggagaagctgcaggccgtactgaagaggctgaaaaaagaggaggaagaggcagaaaagctagaggccgacatacgtgaagaaaagacatcatggaaataccaggtgcagacagagcgccagagaatccaaacagaattcgatcagctcaggtcaatcctcaataacgaggagcagagagaattgcagcggttggaggaggaggagaaaaagacccttgataaattcgcggaggcggaagatgagctggtgcagcagaagcagctggtgagagagcttatttccgacgtcgagtgtcgctcccagtggtccacaatggaactgctgcaggatatgagtggcatcatgaagtggagcgaaatctggcgactgaagaagcctaagatggtgtcaaaaaaactgaagaccgtcttccacgcgccagatctctctcgtatgctgcaaatgtttagggagctcacagccgttaggtgctattgggtggatgtgaccctcaattcagtgaacctgaacttgaatctggtgctgtctgaagatcaacgccaggtgatctctgtaccaatttggccctttcagtgttataactacggagttcttgggtcacaatatttctcttccgggaaacattactgggaggtggatgtgagtaagaagacggcctggattctgggagtgtattgtaggacatattcaagacacatgaagtatgttgtcaggcggtgcgctaataggcaaaacctttacaccaaatacagacctttattcggttactgggtaattggcctgcagaataaatgtaagtacggagtgttcgaggagtccttgagctcagatccagaggtccttaccctcagtatggccgttcctccatgtagagtaggcgtcttcttggattacgaggccggaatagtgagttttttcaacgtgacgagccatggtagcctcatctacaagttttctaagtgttgtttctcccagcccgtctacccgtatttcaacccctggaattgtcctgcccctatgactctgtgcccaccttcatcatag

SEQ ID NO: 28445 - DNA, 1497 bp, synthetic construct
  source 1..1497: mol_type = other DNA; note = Synthetic coding sequence
atgaacggggcactggatcactctgatcagcctgatcctgacgccatcaaaatgttcgtggggcaaattccaagatcatggagcgagaaagagctgaaggagctcttcgaaccatacggggctgtgtatcagataaatgttctacgtgaccgatcacagaatcctcctcagtctaaaggttgctgttttgtgacgttctacacgagaaaagcagcattggaggcccagaacgcgctacataatatcaaaaccctgcctggaatgcatcatcccattcagatgaagccagcggattctgagaagagcaacgccgtagaagaccggaagctgtttatcggcatggttagcaagaagtgcaatgaaaacgacattcgggttatgtttagccccttcggacagatagaagagtgcagaatccttaggggaccggatggactttcccgcggatgcgcatttgtgacattctctacgagggccatggctcaaaatgctattaaggcaatgcatcagagccagaccatggagggttgtagctcgcccatcgtggttaaattcgcagatactcaaaaagataaagagcagcggagacttcagcagcagctggcgcagcagatgcagcaactgaatacggccacctggggtaatttgaccggcctgggcggtctcacgccacagtacttagcactcttacagcaggcgacatccagctcaaatcttggggcattttctgggattcagcaaatggccggtatgaacgccctgcaactgcagaacctcgccactcttgctgccgctgctgccgcagctcagacctctgctacctccacaaacgctaatcccctgagcactaccagttcagctctcggagccttgacatctccggttgccgctagcaccccaaattccactgctggcgcagccatgaattcactgacctcacttggtactctgcaaggccttgccggagccaccgtgggcttgaacaacatcaacgcccttgctgctcccagatcaaagagactcctcctgcctaaggacaacaatggcatggccgctttgaatggaggactcggggctactggtctgacaaacggaacagcaggcacaatggatgccctgacacaggcttactccggcatccagcaatacgcagctgcagctttgccaacactctacagccagagtttacttcagcaacaatcagccgctgggtcacagaaagaggggccagagggagctaatctctttatttatcacctccctcaggagtttggcgaccaagacatcctgcaaatgtttatgccctttggaaatgtgatctccgccaaggtgtttattgataaacagacaaacctgtccaaatgtttcggatttgtgtcctacgacaaccccgtgtcagcgcaggctgccatccaggctatgaatggattccagataggcatgaaaaggcttaaagtgcagttgaagcgcagcaaaaacgactctaagccttactag

SEQ ID NO: 28446 - DNA, 2580 bp, synthetic construct
  source 1..2580: mol_type = other DNA; note = Synthetic coding sequence
atgctggaggtgctggaagagatctggagtgtgcgggctcggagggcccaccggccatgccctgggccatccctcgcagatgacacggatgctaactctaatggatcatcagggaacgagtcaaacggtcatgagtctagaggcgcttcacagcgatcctctcattcttcttcctccgggaacggtaaagatagtgcccttcttgaaaccactgagtctagtaaatcaaccaactcccagtcaccctccccgccttccagcagcattgcttacagtctgctgagcgcctccagcgagcaagacaacccgagtaccagcggatgcagttctgagcaatccgccagggctaggacccaaaaggagcttatgaccgcactcagagaactgaagcttcgtttgccccctgagcggagaggcaaaggacggtccgggaccctggcaacactacaatatgccctggcttgtgtgaaacaggtgcaggctaaccaggagtattatcagcagtggagcctggaagagggtgagccttgcagtatggacatgtcaacctataccctcgaggagctcgagcacatcacttccgagtacacgttgcagaatcaggacacgttctccgttgcggtaagctttcttacaggtcgaatagtttacatttcggagcaagcggcagtgctactccgctgcaaaagagacgtgttccggggtactcgttttagcgagctgctggcaccccaagacgttggagtattttacggcagcacggcgccttcccggctgcctacatggggcacaggtgcttcagccggaagtggtttgcgggattttactcaagaaaagtccgtattttgccgaatccggggtggtcccgaccgcgatcccggacctcgttatcaacccttcaggctgacgccttacgtgacgaagattagggtcagcgacggagcgccagcccaaccctgctgcttgctcatagcagagcgcatccattctgggtacgaggccccaagaattccacctgacaagagaattttcacgactcgacatacccccagctgtttatttcaagatgttgatgagcgtgccgctcctttattgggctatctgcctcaagacttattaggcgctccagtccttttgttcctccatcctgaagatcggcctctcatgttagccattcacaaaaaaatccttcagctcgccggacagccatttgaccacagccccatcaggttctgcgcaagaaatggcgagtacgtcacaatggatacgagttgggctggcttcgtgcatccgtggtcgaggaaagttgctttcgtgctcggtcggcataaagtgaggacggcaccattaaacgaggatgtattcaccccgcctgcacctagtcccgcaccctctctggataccgatatccaagagctatctgagcagatacatcggcttctactgcagcccgtgcatagtccttccccaaccggactctgtggcgtgggggcagtgacaagccccggacccctgcatagcccgggatcctcaagcgatagtaacggcggagatgccgagggacccggtccacccgcaccggtgaccttccagcaaatttgcaaggacgttcacctggtgaagcatcaagggcaacagctgtttatagagagccgagctaggccacagtccagacccaggctgcccgcaaccggaaccttcaaggccaaggccctgccatgccaaagccccgatcccgagcttgaggccggatcagctcctgtacaggctccactggcactcgtccccgaggaagcagaaaggaaagaggcaagttcatgcagctaccaacagatcaactgcttggactctatactacggtatttggagtcttgcaatctgccaagcaccacaaaacggaaatgtgccagctcgtcttcttataccaccagcagcgcctccgacgatgatcgccaacgtaccggtcccgtgagcgtgggcacaaagaaagacccgccaagcgctgcactgagcggtgagggagccacccccagaaaggagcctgtagtcgggggaacactatctccgctggctcttgcaaacaaggcagagtccgtggtctccgtgacctctcaatgcagtttttcaagtactattgtgcacgtaggagataagaaacccccagagagcgacattatcatgatggaggatctgcctggactggccccaggccctgcgccatcccccgcacccagtccaacagtggctcctgatcccgctcctgacgcctatcgccctgtcggcctgactaaggctgttctctccctccacacacagaaagaggagcaggcgttcttatctcgatttagggacctcggccgattgagaggccttgatagctcctcgaccgcccctagcgcccttggcgagcgtgggtcacacctcgggccacccggagcctgcccccttcctagtctgggcctagactgctggggggttggcctgaagggaggcgtgtcagctccgggaactcaggccggtgtggcaagcaccactcgtccttgcttggggaccggaccaagtcttgccagcccacattag

SEQ ID NO: 28447 - DNA, 1266 bp, synthetic construct
  source 1..1266: mol_type = other DNA; note = Synthetic coding sequence
atggcttcatccagtgtccccccagccactgtatcggctgccacagcaggcccaggaccgggatttggcttcgccagcaagaccaagaagaaacacttcgtgcaacaaaaagttaaggtttttagagctgctgaccctctcgtgggagtcttcctgtggggtgtggcgcattcgattaacgagttaagccaggtcccccctcccgtcatgctgctcccagatgacttcaaagcaagttcaaagattaaagtcaacaatcacctttttcaccgggagaacctgcctagtcattttaagttcaaagaatactgcccccaggtgtttcggaatctccgtgaccgattcggcatcgacgaccaggactatctggtttcattgactcgcaaccccccaagcgagagcgagggatccgacggaagatttctcataagctacgatcggacacttgttattaaagaagtgtcttcagaggacattgccgacatgcactcaaatttatctaactatcatcaatatatcgtgaagtgccacggtaacacccttctgccccaattcctggggatgtacagagtctcagtggacaacgaggattcctacatgctcgtgatgaggaacatgttttctcatcggctcccggtgcaccgcaagtatgacctgaagggaagcctggtgtctcgtgaggcaagcgacaaggaaaaggtgaaggagttgcctaccctgaaagacatggacttcctgaacaagaatcagaaagtatacatcggcgaggaggaaaaaaagatatttttggagaaattaaaaagggacgtcgagtttcttgtgcagctgaagataatggactactccttgctactcggaatccatgacattatccgaggatctgaacctgaagaagaggcgcctgtgcgtgaagatgaatcagaagtcgacggcgactgttcgcttacaggcccacctgcactggtcggatcttatgggactagcccggaagggattgggggttatatccattcacatagaccactcggccctggcgagtttgagagttttatcgatgtttatgcgatccgctctgcggagggggctccacagaaagaggtctatttcatgggactgatcgatatcctgacccagtacgacgccaaaaaaaaggccgctcatgctgcgaagaccgtgaagcatggtgctggcgcagagatcagtaccgttcacccagagcagtacgcaaagagattcttagactttattactaacatttttgcgtag

SEQ ID NO: 28448 - DNA, 2031 bp, synthetic construct
  source 1..2031: mol_type = other DNA; note = Synthetic coding sequence
atggccgcagctactggcgaccccggactgagcaaactgcagtttgcacccttttcttcagccctagacgtcgggttttggcatgaactgacgcagaaaaagctgaacgagtaccggttggatgaggcccctaaggatataaagggatactactacaacggggacagcgcaggtctacctgcccgtctcaccctcgagttctcagctttcgacatgagtgctccaacccccgctcggtgctgtcctgccatcgggaccctgtacaacaccaacaccctcgaatcatttaaaaccgccgataagaagcttctgctggaacaagcagcaaacgaaatttgggaatctataaagtccgggaccgccttggagaaccccgttttgctgaacaagttcttgctcctgactttcgccgacttgaaaaaataccacttctactactggttctgctaccccgctctatgtctgccggagtctctcccccttattcagggaccagttggcttagaccagaggttctctctgaagcagatcgaagcgctggagtgcgcatatgacaatctctgtcagacagaaggtgtgacagccctcccttacttcttgattaaatacgacgagaatatggtgcttgtttccctgctgaaacattacagcgacttttttcagggccagcggactaagattaccatcggggtctacgatccatgtaatctcgcccagtaccctgggtggccactgcgaaacttcttagttcttgcggcacacagatggtctagtagcttccaatccgttgaagtcgtttgttttcgcgacagaacaatgcaaggagccagagacgtggcccactcaatcatcttcgaggtgaagctccccgaaatggcattcagccccgactgtcctaaagccgtgggctgggagaaaaatcagaagggcggaatggggccacgcatggtgaatttaagcgagtgcatggaccctaaaagactggcagaatcttcggtggatctgaacctcaaattaatgtgttggaggcttgtgccaaccttagacctcgacaaagtggtttccgtcaagtgcttgttgctaggggctggcacccttggctgcaatgtggctaggaccctcatgggctggggcgtacgacatataacatttgtagataacgccaaaattagctactcaaatcccgtgcgacagcccctttatgaattcgaggactgcctgggtggcggtaagcccaaggctcttgccgctgccgacaggttacaaaaaatttttccaggcgtaaatgcccgaggcttcaatatgagcatcccaatgcctggccaccctgtaaacttctcttctgtgaccctggaacaggcgaggagagatgtggaacagctcgagcagctgattgagagtcacgatgttgtgttcctccttatggacacgagagaatcgcgctggctgcccgcagtcatagccgcttccaaacgcaagctggtgataaatgctgccttggggttcgatacctttgtcgtgatgagacacggactgaagaaaccgaagcaacaaggggcaggggacctttgtcccaaccacccagtggcctcagcagacctgctggggtcctctctgtttgctaacatccccggatacaagctcgggtgctacttctgtaacgatgttgttgcaccgggtgatagtacacgcgacaggaccctggatcagcaatgtaccgtgagccggccaggcctggccgtaatcgcgggtgccctcgccgtggaacttatggtgtccgttctgcagcaccctgaggggggatatgctattgcttcctccagtgatgaccggatgaatgaacccccaacatctttaggcctcgtcccccatcaggtactggaccagtacgagcgagaaggatttaacttcttagccaaagtgtttaatagctcacacagcttcctggaagatcttacgggcctgacactactccaccaggaaacacaggccgcagagatttgggatatgtcagacgacgagacaatctag

SEQ ID NO: 28449 - DNA, 1329 bp, synthetic construct
  source 1..1329: mol_type = other DNA; note = Synthetic coding sequence
atggcctcagacggcgcttctgccctgcctggacctgacatgagtatgaagccctctgccgctccatcaccaagcccagcccttccattcctgcctccaacctctgatccccctgaccaccctccccgagaacctcccccacaaccgatcatgccctctgtcttttcccctgataacccgttgatgctgtctgccttcccttcatcactgttggtgacaggcgacggcggaccttgcctgtccggagctggagctgggaaagtgatcgtcaaggttaaaacggaagggggtagcgccgagccctcccaaacccagaacttcatcctgactcagactgcccttaacagtacagccccaggaacgccatgtgggggtctcgagggaccggcacctccatttgttactgcttccaatgtgaaaacaattcttccaagcaaggcagtaggggtgtcgcaggaagggcctcccggtttgccaccccagccgccacctcctgtagcgcagctggtacctattgttccattagagaaggcgtggcctggaccacacggaacgactggcgaggggggtcccgtggccactctgagtaaaccgtcactgggggaccgttccaaaattagcaaagatgtgtacgaaaattttcggcagtggcaaagatataaggctttagccaggaggcacctgtctcagagccccgatacagaagcggttaaggagtacgtcgacatcatggaatggcttgtggggacccatctggccacgggcgaatctgacggcaaacaagaggaagagggccaacaacaggaagaagaagggatgtatcccgaccccggactccttagctacataaacgagctctgcagccagaaggtcttcgtgtccaaagtcgaggccgtgatccacccccagttcctggcagatctgctgtcgccagagaagcagagagatccgctggcattgatcgaggaactcgaacaagaggagggactcactctggcgcaactggtgcagaaacggttgatggcactggaagaggaggaggatgcagaagccccaccttcgttctctggtgcccagttagactccagtccgtcagggtccgttgaagacgaggatggcgatggaaggctcagaccgtcacctgggctgcagggcgcaggaggggctgcttgcctgggcaaggtgtccagcagtggtaagagggccagggaagtccatggagggcaggagcaggccttggactcccctaggggcatgcacagagacgggaacacactccctagtccatcttcctgggatttaccgactaacggagagagccagtgctag

SEQ ID NO: 28450 - DNA, 666 bp, synthetic construct
  source 1..666: mol_type = other DNA; note = Synthetic coding sequence
atgcaagttcaggacgacggggtgaatctcattcccttcgcaaagtgtagtcgtgtggtgagtcgcagcccccctccacgcctgcccagtcagtcgctgcgacctatgccgcagagatacggcgacgttttttggaagaacctcaaccaacgccctactcctacctggctggaggaacagcacatcccgcctatgcttctgccccctcccgagatgctgtggagaagaaaaaaacgaaggccctgtctggaagggatgcagcagcaaggccttggcggagtgcctgcaagggttagagcggtcacctatcacctggaggatttgcggagaagacagtccattattaatgaactcaaaaaagcccaatggggcagcagtggcgcagcatcagaacctgtcgtcctcggcgaggagggatgtggattccctagcacaaacgaatacccagacctcgaggaagagagggctacatacccccaggaagaggatagattcctgacacctggccgagcgcaactcctgtggagcccttggagtccattggaccaggaggaagcttgcgcctctcgccagctccactcgctcgccagcttttctaccgtgacagctagaaggaatcctctgcacaatccctggggcatggaattggccgcatccgaggagtag

SEQ ID NO: 28451 - DNA, 480 bp, synthetic construct
  source 1..480: mol_type = other DNA; note = Synthetic coding sequence
atgcagcgtgtcggaaacacatttagcaatgagagtagggttgcaagtcggtgccctagtgtaggactggccgagcgcaatcgtgtggccaccatgcctgtgagactgctgcgagatagcccggcagcccaggaggataatgatcatgcacgggatggattccagatgaagttagacgcacatggatttgcccctgaggagcttgttgtgcaagtcgatggtcaatggctgatggtgaccggtcaacagcagctagacgtgagagaccctgaaagggtgagctatcgaatgtcgcagaaggttcaccgcaaaatgctaccatctaatctttctccgaccgctatgacatgctgcttgacccctagcggccagctgtgggtaagagggcaatgcgttgccctagccctgcctgaggctcagaccggaccttcccctagactcggtagcctcggaagtaaggcatctaacctgacccggtag

SEQ ID NO: 28452 - DNA, 1782 bp, synthetic construct
  source 1..1782: mol_type = other DNA; note = Synthetic coding sequence
atggaaaaactgagcgccctccaggagcagaaaggggaattaaggaagcgtctgtcctacacaactcacaaactggagaagttggaaactgagtttgactccactcggcactatctggagattgagttgagaagggcgcaggaggaactcgagaaggtaacagaaaaattgcggaggatccaaagtaattacatggctcttcagaggattaaccaggaactagaagataagctgtacagaatgggacaacattatgaagaggagaaaagggccctgtctcacgagattgtggcacttaactctcaccttctggaagctaaagtgactatcgacaagttgagcgaggataatgaattgtatcgaaaagattgcaacctggctgctcagctgctgcaatgctcccagacctacggaagagttcacaaggtatcggagctgccaagcgattttcaagaacgggtgtcactacacatggagaagcatgggtgcagcttgccatctcctctttgtcatccagcctacgcagacagtgtccctacctgtgttatcgcaaaggtgctcgagaaaccagatccagcttcccttagttccaggctgagtgacgcttctgctcgtgatctggcattctgcgacggtgtcgagaagcccggacccagacccccatataaaggcgacatctactgcagcgacactgccctgtactgcccagaggagcggaggagagatcgcaggccgagcgtcgacgctcctgtgaccgatgtcggcttcctgcgtgctcagaattctactgatagtgcagctgaggaggaggaggaagcagaggctgctgcttttcccgcaggtttccagcacgaagcattcccctcatacgctggttccctccctacaagtagctcctattcgagtttctccgcaacttctgaagagaaagagcacgcacaagctagcaccttaactgcctcacagcaggccatctatctaaactcacgcgacgagctgttcgacagaaaaccacccgcaacgacctatgaaggctctcccagattcgccaaggccactgcagccgtggccgcacccttggaagcggaagttgctcccggatttggacgaactatgtccccctatcctgcggagactttcagatttcctgccagtccagggccacagcaagctctgatgcccccaaatctgtggagtctgagggccaaacctggaacagcaagactcccgggtgaagatatgaggggccagtggcgcccattgagcgtggaagacatcggcgcttactcatatccagtttcggcggctggtcgtgcctccccgtgttcatttagcgaaagatattacggcggagcaggcggtagccccggaaagaaggccgatggaagggcttcgcctctatatgctagctataaggcggacagcttcagtgagggggatgacctgagtcaggggcacttggcggaaccctgttttctgcgggctggcggagatttatccctctctccaggacggtcggccgaccccctgccaggctacgcgccttctgaaggcggagacggggatcgactcggtgtgcagctctgcggcaccgcttccagccctgagccggagcagggatcccgtgattcccttgagccctcgtccatggaggcaagtccagagatgcaccccgctgccaggttaagccctcagcaagctttcccaaggactgggggtagcggtctgtccagaaaggactctctgacaaaagcacagttgtacggaacattactgaactag

SEQ ID NO: 28453 - DNA, 2610 bp, synthetic construct
  source 1..2610: mol_type = other DNA; note = Synthetic coding sequence
atggggaacagggagatggaagagttaatcccacttgtgaataggctccaggatgcattctcggccctgggacagtcgtgcctgctggagctgccccagatcgccgtagtgggcggtcagagcgctggaaaatcttctgtcctggagaattttgtcggaagagacttcctgccacgtggatctggcattgtaacgcgtcgacctctcgtgctgcagctcgtgacctctaaggccgagtacgcagagttcctgcactgcaagggcaagaaattcactgactttgacgaagttagattggagatcgaagcagagacagatagagtcaccggcatgaacaagggcattagttctattcctattaatcttagagtgtattctccgcacgttctcaacttaactttgatcgaccttccaggcatcaccaaggtgccggtcggagaccaacctccagacatagaataccagattagagagatgatcatgcaatttattaccagagagaactgtctgatccttgctgtgactccagcaaataccgacctggctaattccgacgcactgaagctcgcaaaagaggtggacccacagggcttgcggaccataggggttataaccaaactggatcttatggacgaggggaccgacgccagagatgtgctggagaataaacttctgccactccgccgaggctatgttggagttgtcaaccggtcccagaaggacatagacgggaagaaggacatcaaggccgcaatgctggcggaaagaaaattcttcctctcgcacccagcctaccgacacatcgccgatcgtatgggcacacctcatctgcagaaagttctgaatcagcagctgacaaatcatatccgcgatacactccctaactttaggaataagctgcaggggcaattgctatcaatagaacatgaagttgaggcatacaaaaattttaagcccgaagatcctacaagaaaaacaaaggccctgcttcagatggttcaacagtttgctgttgacttcgaaaaaagaatcgagggtagtggggaccaagtggatacattggaactgtccgggggagctaagattaatcgaatttttcacgaacgattcccatttgagatcgtgaagatggaattcaacgaaaaagagctccgtagggagattagctacgctatcaaaaacatacacggtatccggactggcctatttaccccggatatggccttcgaggctattgttaagaaacagatagtgaaactcaaaggtccatccctgaagtctgtcgacctggtgattcaagagctgatcaatactgtgaagaagtgcacgaaaaaactggctaactttccccgtttatgtgaggagactgaacgcattgtagcaaaccatatcagagaacgggaaggaaaaaccaaggatcaggtacttctcctcatcgatatacaggtgtcatatatcaacaccaatcatgaggactttattgggtttgcaaacgcccagcagcgctccagccaggttcataagaaaaccacggtagggaaccaaggaaccaatctgcctcctagtcgtcagatagtcattcgcaaagggtggctgacgatcagcaacattggaatcatgaaggggggaagtaagggctactggttcgtgctaactgccgaaagcctgtcatggtataaggatgatgaagagaaggaaaaaaaatacatgctgcctctagacaaccttaaagtgcgcgatgttgaaaaatcctttatgtcaagcaagcacatttttgcactgtttaatactgagcaaaggaatgtctacaaggactatcgcttcttagagctggcgtgcgattcccaggaggacgtcgactcatggaaagcatcccttttgcgggcaggggtctaccccgacaaatcggtggcagagaatgatgaaaatggtcaagccgaaaatttctcaatggatccacagctggagcgccaggtggagacaattcgcaatctggtggattcttatatgtccattataaacaagtgcatcagggatctgattcccaaaaccatcatgcatttgatgatcaataatgtaaaagactttatcaattcggagttgctggctcagttgtactcctcggaggaccagaacacactgatggaggagagcgccgaacaggctcaacgccgtgatgagatgcttcggatgtaccaggcgcttaaagaagcactgggcattatcggcgacatctcaactgctacagtgtccaccccggctccacctccggttgacgattcatggatccagcactcgcggaggtcgcctcccccatcccctacaacacaacgcaggcccacccttagtgctcctctggccagaccgacgtccggaagaggtccagctccagctataccctcgccaggaccgcacagtggcgcaccaccggtacccttcaggcctggccctcttcctcccttcccttcttcatccgactcattcggcgcaccaccccaggttccctcacggcctacaagagccccaccttccgttccgagccgtagaccccctccttcccctaccaggcctaccataatccggccacttgagtcatctctgctcgactag

SEQ ID NO: 28454 - DNA, 1896 bp, synthetic construct
  source 1..1896: mol_type = other DNA; note = Synthetic coding sequence
atgaactctagcgacgaggaaaagcagctccaacttatcacgagcttaaaggaacaggctatcggcgagtatgaagatctgcgggcagaaaaccagaagaccaaggaaaaatgtgacaaaatcagacaggagcgcgacgaggccgtgaagaaactggaggagttccagaaaatctcccacatggtgattgaggaggtaaactttatgcaaaaccatctcgaaatcgagaagacctgccgcgagtcagcagaggcgcttgccacaaaattgaacaaggagaacaaaactctgaagagaatctcaatgctctacatggcgaaacttggaccagatgtgataacagaagagatcaacattgatgacgaggattctaccacagacacagatggggctgcagaaacgtgcgtgtcagtgcaatgccaaaagcaaatcaaggagcttcgggatcagattgtgtcagttcaagaggaaaaaaaaatcctggcgatagagctggagaacctgaaatccaagctcgtggaagtgattgaggaagtgaacaaggtcaagcaagaaaaaactgtgcttaatagcgaagtgctggagcaacgcaaagtactagagaaatgtaatagggttagcatgctagccgtagaggagtacgaggaaatgcaggttaatctggaactggagaaggacttgaggaagaaggccgagagttttgcacaggaaatgtttatcgaacagaacaaactgaagcgacagagccatttactgttgcaatcttcgattcccgaccagcagctgctgaaggcacttgacgagaacgctaagttaacacaacagttagaagaagagcgtattcagcatcagcaaaaagttaaagaattagaggaacagttagagaacgagaccctacacaaggagattcataatctgaagcagcagttagagcttcttgaagaggataagaaggagctagaattaaagtatcagaacagcgaagagaaggcccgaaacctgaagcattccgtcgatgagcttcagaagagggtgaaccagtctgaaaattccgtacctcccccacccccacccccaccaccactcccaccacctcctcctaatcccatccggagcttaatgtctatgatcagaaagaggtcacatccctccgggtctggagcaaaaaaggagaaagccacacaacctgagacaacagaagaagtgaccgacctgaagcggcaggctgtcgaggaaatgatggacagaataaagaaaggcgtccacctccgaccagtgaatcagacagccagacccaaaacaaagccagaatcttcaaaaggctgcgagtcagcggtcgacgagctgaaggggatcctggggacactgaacaaaagcacatcttcaagaagtttgaagagcttagatccagagaactctgagacagagcttgagagaatcctaagacggaggaaggtcaccgccgaggcggattcatcttcccctactggtatccttgcaacatccgagtccaagagtatgccagttcttggctcagtatccagtgtgaccaagacagccctgaacaaaaaaaccctcgaagcagagttcaatagtcctagtcccccaacccctgagcctggtgagggccctcgtaagctcgagggttgcacgtcctccaaggtgactttccagcccccttccagcatcgggtgcagaaaaaaatacatcgatggagagaaacaagccgaaccggtcgtggtactggaccctgtgtccacccatgaacctcagactaaagaccaggtagcagaaaaagaccctacccagcacaaagaggacgaaggcgaaatacagccagagaataaagaggatagcattgaaaatgtcagagagactgactccagtaattgctag

SEQ ID NO: 28455 - DNA, 1701 bp, synthetic construct
  source 1..1701: mol_type = other DNA; note = Synthetic coding sequence
atggaccttcaccgcgcagcgttcaagatggagaacagctcctacctgcccaatccactggcctccccagccctgatggtgctggcaagtaccgccgaagcgagccgcgatgctagtatcccatgccaacaaccaagacctttcggcgtccccgtgtccgtagacaaggacgtccatataccttttacaaacgggtcgtataccttcgcaagcatgtatcaccgccaaggaggtgtgcccggaactttcgccaacagggatttcccccctagcctactgcacctgcacccccaattcgctccgcctaatctagactgtacacctatttctatgctgaaccactctggggtaggggcatttcgtcccttcgcctcgaccgaggatcgggagtcttatcaatctgcttttactcccgcaaagagactgaaaaactgccacgacacagagtcccctcacctgaggttttccgatgcagatggcaaagaatacgattttggaacccagttgccttctagctccccaggatccttgaaggtagacgatactggaaagaagatcttcgccgtctcgggattaatatccgatcgtgaagcttcctcctcaccagaggatagaaacgaccgctgcaaaaagaaggcggctgccctttttgattcccaggcacccatctgtcctatatgtcaagtgctcctccgtcccagtgagcttcaagagcacatggagcaggaactggagcaactggcccagctgccctcttccaagaactccctgctgaaggacgcaatggcccctggcactccaaagtccctcctcctcagcgctagtattaagagggagggcgaatcacccactgccagtccacattcgtctgctactgatgaccttcatcacagcgatcggtaccaaaccttcctgcgcgtacgcgctaacagacagacaaggcttaatgctagaatcggcaaaatgaaaagaaggaaacaggatgagggtcaaagagaaggatcctgcatggccgaggatgatgcagtcgatatcgagcacgagaacaacaatagatttgaagagtatgaatggtgcgggcagaaacgaattagagctactacattgctcgaggggggattccgtggcagcggctttataatgtgcagcgggaaggaaaatcccgactccgatgcagacctggatgttgatggcgatgacacactggaatatggaaagcctcaatacacggaagcggacgttattccatgcaccggagaagagcccggagaagcaaaagagagagaggcacttaggggggcagttctgaatgggggtcctccctcaacacgaatcacgccagagttctcaaaatgggctagcgatgagatgccttctacaagcaatggagagtccagtaagcaggaggccatgcagaaaacctgtaaaaactccgacatcgagaaaatcactgaggactccgccgtgaccacctttgaagcactcaaggccagggtgagggaactggagcgccagctttcgcgcggagaccggtataagtgtctaatttgcatggatagctattcgatgccattaactagtatccagtgctggcatgtgcactgcgaagaatgttggctgaggacgttgggtgccaaaaagctctgcccgcaatgcaacaccatcacagcaccgggagacctgagacgcatctatctctag

SEQ ID NO: 28456 - DNA, 1071 bp, synthetic construct
  source 1..1071: mol_type = other DNA; note = Synthetic coding sequence
atgctgtcggccatcactaatgtcgtgcagaacaccggcaaatcagtgctgacaggcggtctcgatgctctggagttcatcggcaagaaaaccatgaatgtgctggccgaaagcgaccccggattcaagaggacaaaaacccttatggaaagaactgtttccttatctcagatgctgcgggaggccaaagaaaaggagaaacagcggctggctcaacagctaaccatggaacggaccgctcactatgggatgctgttcgacgagtatcagggcctctcacatctggaggctctggagatcctgagcaacgagtccgaatccaaggtccagagtttcctcgcaagtctggatggcgagaaactggaactactgaaaaacgatctgatttctatcaaagacatttttgctgcaaaggaactggagaatgaagagaaccaggaggagcagggcctcgaggaaaaaggagaggaattcgcacggatgctgacagaattactgtttgaactccatgtggccgctacccccgacaaattaaacaaagcaatgaagcgtgcccacgattgggtggaagaggaccaaaccgtcgtgtccgtggacgtggcaaaagtatctgaggaggaaacaaagaaggaggagaaggaggaaaagagtcaggatccccaagaggacaaaaaggaggagaaaaagacaaaaacaatagaggaagtgtatatgtcctctattgagtccttagccgaggtgaccgctagatgtatagagcagttgcataaagtcgctgaacttatactgcatggccaggaagaagaaaaacccgcacaggatcaggccaaagttctgatcaagctcacaacagcaatgtgtaatgaagtcgccagtctttccaagaagttcactaactccctgaccaccgtcgggagcaataagaaggccgaagttcttaaccccatgattagctcagttctgctggaggggtgtaacagcaccacctatatccaagacgccttccagttgcttttacctgttcttcaggtctcccacatccagacttcttgcttgaaggcccagccttag

SEQ ID NO: 28457 - DNA, 519 bp, synthetic construct
  source 1..519: mol_type = other DNA; note = Synthetic coding sequence
atgagctataactgttgtagcggtaatttcagtagccgcagctgcgggggttacctccactatcccgcatcctcttgtggcttttcctatccttccaaccaggtgtactccacggacctctgttcccctagcacatgccagttaggtagcagcttgtatcggggatgtcaacagacatgttgggagccaaccagctgtcagacatcctacgtagagtcaagcccatgtcagacatcctgttatcgccctaggacttcgcttttatgctccccgtgtcaaacgacctactctggctcactgggtttcggttcttcctcctgtcgcagtctgggttatggttccagaagctgctattcagtcggatgtggatcctcaggcttcaggagcctgggatatggaggatgcggcttcccaagcctcggctacggagtaggcttttgccgtccgacctacctggcaagtcggtcttgtcagtctagttgctaccgccctacatgcgggtccgggttctactactag

SEQ ID NO: 28458 - DNA, 2253 bp, synthetic construct
  source 1..2253: mol_type = other DNA; note = Synthetic coding sequence
atggaagatctgttcgaaaccttccaagatgagatggggttctccaacatggaggacgacggacctgaagaagaagagagggttgctgagccacaagcgaactttaacacacctcaagcacttcgattcgaggagctgctggccaacctactaaatgagcaacaccagatagccaaggagctattcgaacagctcaagatgaaaaaaccatctgctaagcagcagaaggaagtagaaaaggttaagccgcagtgtaaggaggttcaccagaccctgatcctcgaccctgcccagcgaaagcgccttcagcagcagatgcaacaacatgtccagctgctgacccaaattcacctgctggccacttgcaaccccaatttaaacccagaagcctccagcactaggatctgcttgaaagagctgggcacttttgcccaaagctctattgccctgcatcaccagtacaaccccaagttccagactctgttccagccatgcaaccttatgggtgctatgcagcttatagaagacttttccactcatgtgagcatagactgttctccgcataagactgtcaagaaaactgctaacgagtttccgtgcctgcccaaacaggttgcttggatcttagccacttctaaggtgtttatgtaccccgagctgctccctgtctgttcactcaaggccaagaacccgcaggataagattcttttcaccaaggctgaggacaacctgttggccctggggcttaagcacttcgagggtacggaatttctcaatcccttaattagtaagtatcttttgacctgtaagactgccaggcaactgaccgtgcggataaaaaatcttaacatgaatcgcgcaccagataacatcattaagttctataaaaagacaaagcagctccccgtattaggcaagtgctgcgaagaaatacaaccacaccagtggaaacctcctatagagcgggaggagcaccggctgccattttggctgaaggccagtctcccctcaatccaggaagaactcaggcacatggctgacggcgctcgggaagtcggcaacatgacagggaccaccgaaattaactcagaccagggtttagaaaaggacaatagcgagttaggcagcgaaaccaggtatcccctcctgttgcccaagggcgtcgttctcaaattaaaaccggtcgccgacagattcccaaaaaaagcctggagacagaaacgctcgtctgtactcaaaccactgctgattcaacctagccctagcctgcagccatccttcaacccaggaaagacgcccgctcaaagtactcactcagaggcgcctccgagcaagatggtgctgcggattccccaccccattcagccagcgaccgttttgcagactgtacctggagtgccccctctcggtgtcagtgggggagaaagtttcgaatcccccgctgccctgcccgcaatgccccctgaggctcgtaccagctttcctctctctgagtcacagaccctgctcagttcagcaccagtgccaaaagtgatgatgccctccccagcttctagcatgttccgcaagccctacgtgcggaggaggccgagtaagaggcgcggtgcgagagcgttccggtgtatcaagcctgctcctgtgatacacccagcctccgtcatatttaccgtccccgcaacaacagttaagattgtgtccctcgggggaggttgcaacatgattcagcccgtaaatgccgcagttgcccaaagcccccagaccatcccaatcgccaccctgctggtcaaccccactagtttcccatgccctctgaaccagcctcttgttgcctcctctgtgtcccctctgatcgttagtggtaattccgtgaatcttccaataccctccactcccgaagacaaagcccatatgaatgtcgacattgcatgtgcggtagcggacggagaaaacgccttccaaggactggaaccgaagctcgagccacaggagttgtccccgctctctgcaacggtgtttcctaaagtggagcattctcctggcccaccacctgtggataagcagtgccaggagggactttctgagaattcggcatatcgctggacagtcgtaaaaacagaagagggcaggcaggccctggagcctctgccccagggcatccaggaaagcctaaataattcctctcctggggatctcgaggaggttgtcaaaatggaaccggaagacgctaccgaagaaatcagcggcttcctctag

SEQ ID NO: 28459 - DNA, 888 bp, synthetic construct
  source 1..888: mol_type = other DNA; note = Synthetic coding sequence
atggagttaattcaggatacaagtcgccctcccttggaatacgttaaaggagtacctctaatcaaatactttgcagaggccctgggccctctccaaagttttcaagcccgtcccgacgatcttttgatcaatacctatcctaaatcaggtacaacttgggtctctcaaattctcgacatgatttatcaggggggagacttggagaagtgcaaccgtgcgcctatttacgtgcgtgtgccgtttttggaggtgaatgatccaggggaacctagtggtctggaaacccttaaagacacccctccgcctcggcttataaaatcccacttgccccttgccttactcccacaaacacttctcgatcaaaaagttaaagtggtttatgttgccagaaaccctaaggatgtcgctgtgtcttactaccactttcataggatggagaaggcccatccggagccagggacatgggactcttttctcgagaagttcatggccggagaggtgtcctatggatcttggtatcagcatgttcaagagtggtgggaactgtcgcggacccatcctgtcctgtacctcttttacgaagacatgaaagagaaccccaagcgcgaaatacagaaaatcctggaatttgtcggccgtagcctcccagaggagaccatggatttcatggtacagcacaccagcttcaaggagatgaagaagaacccgatgactaattataccacagtgccccaggagctcatggaccattcaatttcgccctttatgagaaaggggatggccggtgactggaagactacgttcactgttgcacaaaatgaaaggttcgacgcggattatgctgaaaaaatggcaggttgctcacttagcttccggtccgaactgtag

SEQ ID NO: 28460 - DNA, 1476 bp, synthetic construct
  source 1..1476: mol_type = other DNA; note = Synthetic coding sequence
atggatactaagggatgtactaccaccaattctccctctacaccttgtcaaaactgctcacgcatcaccaacgtcagtactatttcgagcaacaacgggtgccacccaggcggactgaccgtgaataattgtcagccggcaggtcacgttctccgtatcccctgggatcaaggatgtcagcctacccctaggttttgccgaaaacccatctacctcatgaacaacttcaacgcgagattttctcttgacgactgctcgtggtatggggaaggcatcaattcaaatgagaaagagaccatgcagatcctgaatgagagactcgccaactatctgcagaaagtgaggatgctcgagcgagagaatgcagagctcgaatccaagattcaagaggagtctaacaaggagctgcccgttctgtgtcctgattacttatcttactatactacaatcgaggagctgcagcagaaaattctgtgcactaaggccgaaaatagcaggctcgtcagtcagatagataatacgaaattgaccgccgatgacttacgggctaaatatgaagctgaggtgagcttgagacagttggtcgaatccgacgccaacggcttaaagcagattctgaatgttctgaccctggggaaagcagatctcgaagcacaagtgcaaagtctgaaggaagaactgctatgtcttaagaacaatcataaggaagagatcaattcccttcaatgtcagttaggcgaaaggcttgacatcgaggtgacggccgctccctccgcagatctgaaccaagtactgcaggagatgaggtgccagtacgaaccaatcatggagacaaacaggaaagatgtagagcaatggtttaatacacaaatcgaggaactcaaccagcaggtggtaacctcaagtcagcagcagcaatgctgtcagaaggagatcatcgagttgcggagaagcgtgaatacactcgaggtcgaattgcaggcacagcacagaatgcgggactctcaggagtgcattctgaccgagacggaggctagatataccgccctgttaacacagatccagtctctgatcgacaacctcgaagctcagctcgctgagattcgatgtgccctcgaacgccagaatcaggagtatgaaatcttgctggatgtaaaaagccggctagaatgtgagatcaccacgtacagatctctgctggagagtagcgacgggaaacggccttgctatccccgagccaccaagtgtgagcctagcccctggacctcgtgtaaaagcggcgcaatagagtccactgctcccgcttgcacttcttcctctccatgttccctgaaggagcactgtagcgcgtgtgggccattgagcaggatcctggtcaaaatctgtacaataaccaaagaaatcaaggacggcaaggtcatcagcagctatgaacatgtccagccatgctttatcatccgccctgcaaaggtgtag

SEQ ID NO: 28461 - DNA, 1287 bp, synthetic construct
  source 1..1287: mol_type = other DNA; note = Synthetic coding sequence
atgaagcgcggaggacgagacagtgataggaactcctctgaggaggggacggccgagaaaagcaagaagctaagaaccaccaacgaacatagccaaacctgcgactgggggaacttattgcaagacataatcctgcaggtctttaaatacttgccactcctggacagggcccacgctagccaagtatgtaggaactggaaccaggtgtttcatatgccagatctgtggaggtgctttgaatttgagctgaaccagccagctacctcatacctgaaagccactcatcccgagctcatcaagcaaatcatcaaaagacattccaaccacctacaatatgtgtcttttaaggtggactcaagcaaagagagtgccgaggctgcctgcgacatactctctcagctcgtgaactgtagccttaagacgttgggtctcatatcgactgccaggccaagcttcatggatctgcccaagtcacactttatcagcgcactgacagtggtgtttgtgaattctaaatcattatcatccctgaaaattgacgatacccctgtagatgatccatctctaaaagtgctcgtagcaaataactcggacacactgaaactgcttaaaatgtcaagttgcccacatgtaagcccagcgggtattttgtgtgtggctgaccagtgtcacggcctacgggagctggcactgaactatcatctgctctccgacgagttactgctggccctcagttcagagaagcatgtgcgcttggagcacctccgcattgacgtggtttccgaaaatccaggccagacacacttccacactatccaaaaatcctcctgggatgctttcatccgacactcccccaaagtaaatctcgtcatgtacttcttcctgtatgaggaagagtttgatcccttttttaggtatgaaatcccagccactcacctatactttgggcgttccgtttcaaaggacgtgctaggcagggttggaatgacatgtcccagactggtcgaactcgtcgtctgcgcgaatggcttgcgtccattagacgaagaacttattcggatcgccgagaggtgtaagaatctctctgccatagggttaggagagtgcgaggtgagctgctccgcgtttgttgaatttgtgaaaatgtgcggaggtaggctctcgcagttatccattatggaagaagtcctgatcccagaccaaaagtatagtttggagcagatccattgggaggtctctaagcacctaggcagagtgtggttccctgatatgatgccaacatggtag

SEQ ID NO: 28462 - DNA, 3603 bp, synthetic construct
  source 1..3603: mol_type = other DNA; note = Synthetic coding sequence
atgaatacggattctgggggatgcgctcggaagagggccgcaatgtcagtcactctcacctcagtcaagagggtgcagtcctctcctaatctcttagctgctggtagggattctcaatcaccggacagtgcttggcgtagttataacgatggtaatcaagaaaccctgaacggggacgcaacctacagcagcctagcggcaaaaggattcaggtcagtgagaccgaatctgcaggataagagaagcccaacccagtcgcagatcacagtaaacggcaattccggaggggctgtgagcccgatgtcatattaccagaggcctttttccccgtctgcctacagcctgcccgcaagccttaactcaagtatcgtgatgcaacacggtacctccctggacagcacagacacataccctcagcacgcccagtcccttgacgggacaacctcctcttctatacccttgtaccgctcaagtgaggaggaaaagagggtgaccgtcattaaagcaccacactatcctggcatcgggcctgtcgatgagtccggcattcctaccgcaatccggacaacagtggacagacccaaggactggtacaaaactatgtttaagcaaattcacatggtgcataagcccgacgatgacaccgatatgtacaacacgccctacacttacaatgctgggttgtacaaccctccctactcagctcagtcacacccagccgctaagacgcagacctatcgaccattgtccaagtctcatagcgataattcacccaatgcttttaaagatgcctcatcccccgtgccaccacctcacgtgcccccacccgttccacccctgcggcctcgagataggtcttccactgagaagcatgactgggatccccctgaccgcaaggtcgacaccagaaaatttagatcagaacccaggtcgatctttgagtatgagccgggaaagtccagcattctgcagcacgagaggcctgcatccctgtatcagagctccattgacaggtctctcgagcgcccaatgtctagcgcaagcatggccagtgacttccgcaagaggcgcaagtctgagccggcagtcgggcctccacgagggctgggcgaccagagtgcgtcaaggacatctcccggtagagtggacttgccgggtagtagtacgaccttgacgaaatctttcaccagcagttcgccgtcatcccccagtagggctaaaggcggtgatgattccaagatttgtccatctctctgtagttattctggactcaatggaaatcctagttctgagcttgactactgttctacctaccgtcagcacttggacgtgcctcgggactcaccacgtgctattagcttcaaaaatggctggcagatggccagacagaacgccgaaatctggtcctctactgaagagacagtctctccaaagattaagagccgtagctgcgatgatctgttaaatgatgattgcgatagtttccctgatccaaaggttaagtctgaatctatgggcagcctgctgtgtgaagaggatagtaaggagtcttgcccaatggcctgggggtccccatacgtgcccgaagtgagatctaacggaagatcaaggatccggcatcgatctgcccgtaatgctccaggcttcctaaaaatgtacaagaaaatgcataggatcaatagaaaagatctaatgaattccgaggtgatctgctctgtaaagtcgcggatactgcagtacgagtcggagcagcaacacaaggacctccttcgcgcttggtctcaatgcagtacagaggaagtaccacgggatatggttcccacgcgtatctccgagttcgagaagctgattcagaagtctaagagcatgccgaacttaggggacgacatgctctctccagtgaccctcgaaccaccgcagaatggcttgtgtcccaagcgtcgtttcagtatagagtacttgttagaggaggagaaccagagcggacccccagccagaggcaggcgcggttgtcagtccaacgcgctcgtccccatccacatcgaagtgactagtgacgagcaacctcgcgctcacgtggagttttccgatagcgatcaggatggcgtcgtgagcgaccactccgactatattcacctggaagggtcatccttctgttccgaatccgacttcgatcatttctctttcactagttctgagagtttctatggttcatctcaccatcaccaccaccaccatcaccaccaccatcggcatctcatcagctcttgcaaaggacgctgcccggcatcctacaccagatttaccactatgcttaagcatgaacgcgcacgccatgaaaacactgaagagccccgtcgccaggagatggatcctggccttagtaagctggccttcctcgtgtctccagtgccttttcgacgcaaaaagaatagtgcccctaaaaaacaaaccgagaaggccaaatgcaaggccagcgtgttcgaggcactcgatagcgcactgaaagacatctgcgatcaaatcaaggcggagaaaaagagaggttccctgccagacaacagcatactgcatcgcctgatcagtgagttactcccagacgtccccgagaggaattcctccctcagggccttgagacgatcacctctgcaccaaccgctgcacccactccctcctgatggcgcaatccactgccccccatatcagaacgactgtggtcgcatgcccagatcagcctccttccaggatgtggataccgctaattcctcctgtcaccaccaggacaggggcggtgctctgcaggaccgagaaagtcccagatcatacagtagcactctgactgacatgggccgatcagcgcctcgggaaaggaggggcacacccgagaaggaaaaactgccagctaaggcggtgtacgacttcaaagcgcaaacaagtaaggaactatccttcaagaagggggatacggtgtatatcttgagaaaaatcgatcagaattggtacgaaggagagcaccacgggcgagtaggcatcttccccatctcttatgtggagaagttaaccccacccgaaaaagcgcaacccgcaaggcccccacccccagcgcagcctggagagatcggcgaggccatcgccaaatataatttcaacgccgatacaaatgtcgagctcagcctgcggaagggggatagggtgattttgcttaagcgtgtagaccagaactggtatgagggaaaaatcccaggtactaataggcagggcatatttcccgtctcatacgtggaggtggtcaagaaaaacacaaagggagcagaggactaccccgaccccccaataccacactcttactctagtgatagaatccacagtctctccagcaacaagcctcagcggcctgtgttcacgcacgaaaacatccagggtgggggagaaccctttcaggccttatataattacacacccaggaacgaggacgagctcgaactgagagagagcgatgttattgacgtgatggaaaagtgtgatgacggctggtttgtgggcacatcaagacgcaccaagtttttcggaacgttcccgggaaattatgttaagagactctag

SEQ ID NO: 28463 - DNA, 1470 bp, synthetic construct
  source 1..1470: mol_type = other DNA; note = Synthetic coding sequence
atggaagattctgccagcgcctctctctcgtcggctgcagccacgggaacatcgacctctacacctgccgcacctactgccagaaagcagttggataaggaacaggtgaggaaagctgtggacgcccttttgactcactgcaagtctagaaagaacaattatggtctgttattgaatgagaacgagagcctcttcctgatggtggtgctctggaaaatcccaagcaaggagctaagggtgagacttaccctgccacactccattcggtcagattccgaagacatttgtttattcactaaggacgagccgaactctacccctgaaaagactgaacagttctaccggaagttgctcaataagcacggaattaagactgtgtcccagatcatctcattgcagaccttaaagaaggagtataaaagctacgaggcaaaactgaggttgctgagctctttcgacttcttcctgaccgatgccaggataaggcgtttattgccaagcctgatcggccgacatttctaccaacgcaagaaggtccctgtgagtgttaatctcctttctaagaacctttccagggagattaatgattgtattggtggcactgtgctgaacatttcaaagagcgggtcctgctccgcaatcagaattggccacgttggaatgcagatcgaacacattatagagaacatcgtagcagtcaccaaaggtctcagcgaaaaactccccgagtgggaaagcgtgaagctgttattcgtgaagactgagaagtccgctgccttgcccatcttttcttccttcgtgagcaactgggatgaagcaacaaagagatctctgctgaataaaaagaagaaagaggcccgtcggaaacgcagagagagaaactttgaaaaacagaaggagcggaagaagaaaagacagcaagctaggaagacggctagcgtcttgtcaaaggatgatgtcgctccagagtcgggcgatactaccgtaaaaaaacccgagagcaagaaagaacaaacgcccgagcacggcaaaaagaagagaggcagaggtaaggcccaggtcaaagccacaaacgaaagcgaggatgagatcccacagctagtacccataggtaagaaaacgccagccaacgagaaagtggagatccagaagcacgcaacaggcaaaaagtcaccagccaagagccccaacccttccaccccgagggggaaaaaaagaaaagcactgcccgctagcgaaactccgaaggccgctgaatccgagacccctggaaaaagcccggaaaagaaacctaaaatcaaagaagaagcagtcaaggagaaatccccttccctgggaaagaaggatgccagacagaccccgaagaagccggaggccaaattttttacaactcccagtaaatctgtacggaaagcgagccatacccctaagaaatggccaaagaagcccaaggtgcctcagtctacctag

SEQ ID NO: 28464 - DNA, 3171 bp, synthetic construct
  source 1..3171: mol_type = other DNA; note = Synthetic coding sequence
atggctggggcactcagacgcggacgcgcactgggctccagaccttcaggaccaacagtttccagcagacgatctcctcaatgtcccgtggcacaagagggattaggcgcaagatccaggccgcgagtagcgccaagatccctcgcgagatgcgggccttcaagccgactcatgggctggaaaccttcagaggctagagggcaatcccagtccttccaagcctccggattgcaacccagaagtttgaaggccgcacggagagctacaggccgtcccgaccgttcacgcgcagcacccccaaatatggatccggaccctcaggcaggggtccaggtgggcatgcgcgtcgttaggggcgtggactggaagtggggccagcaggatggaggcgagggcggagtagggacagtggtagaattgggacgccatggtagcccctcgacacctgatcggaccgtggtagtgcaatgggatcagggaactaggacaaattatcgcgctgggtatcagggagcacacgacttgctactgtacgacaatgctcagattggtgtcagacaccctaatatcatttgtgactgttgcaagaaacacggtttgagggggatgcggtggaagtgtcgggtgtgtctcgactatgatctgtgtactcagtgttacatgcacaacaagcacgagctagcacacgccttcgaccgctacgagactgcacactcacgcccagtcacactcagcccaagacaggggctgcctaggataccattgaggggcattttccagggggctaaggtggtgcgaggcccagattgggaatggggtagtcaggatggaggggagggtaagcccggtcgggtcgtcgacatccgcggatgggatgtcgaaactggcaggagtgtggcctccgtcacctgggcagacgggaccacaaacgtttatcgtgtcggtcataaagggaaagtggaccttaaatgcgttggcgaggcggctggaggcttctactacaaagaccatctcccgcgtttaggcaagcccgctgaactccaacgtagagtgtctgcggattctcagccttttcaacatggcgataaggtgaaatgcctgcttgatacggacgttctgcgtgagatgcaggaaggccacggaggttggaatccccgaatggccgaattcataggccagaccggcacagtgcaccgcatcacagaccgcggagacgtgcgggttcagttcaaccatgagacgcgctggaccttccaccctggtgccctcacaaagcatcacagcttttgggtcggagatgtcgtgcgggtcatcggagacctggatacggtgaagcgtctccaggccggacatggcgaatggacagacgatatggcgccagctctcgggagggtggggaaagtggtaaaagttttcggcgatggcaacctccgtgttgctgtggcagggcaacggtggactttttcaccttcttgcctggtggcttaccgaccagaggaggacgctaatctggacgtcgctgaacgcgctcgtgagaataaatcttcattgtctgtagcactggacaagcttcgcgctcagaagtcggatccggagcatcctggccgtctggtggttgaggtagccttaggcaatgccgctcgtgcactggacctgctgcgtcgtcggccagaacaagtcgacactaagaatcagggtaggactgcactacaggtggctgcatatctgggacaagtagagctcatcagacttcttttgcaggctcgcgcaggcgtggatttaccagacgacgagggtaataccgcattacactacgccgcactcggtaatcaacctgaagcaacaagggtcctcctcagcgcagggtgcagggcagacgccatcaattccacacagagcacagctctgcatgtcgctgtgcagcgtggcttcttagaggtggtaagagccttgtgcgaacgcggatgtgacgtcaacctccccgacgcccatagcgacactccactgcattcagcgatttccgccggtacaggcgcttctggcattgtggaggtgcttaccgaagtacccaatattgatgttactgcaaccaacagtcaggggttcaccctactgcatcatgcttcactcaagggccatgccctggccgtgagaaagattcttgctcgagccaggcagctggtggacgcaaagaaggaagacggatttactgccctgcacctggccgcactgaataaccacagggaggtcgcgcagatcctgataagggaggggagatgcgacgttaatgtgaggaatcgcaagttgcaaagtcccctgcatctggcggtccagcaggcccatgtgggactcgtgcccttacttgttgacgccggatgctccgtgaacgcggaggatgaggaaggtgataccgctttgcacgtcgctctgcaaaggcaccagctgcttccccttgtagctgacggcgctggcggagacccaggaccgctgcagctactcagtagacttcaagcatctggtcttcctgggtccgctgaacttacagttggagccgctgtagcctgttttctggccctcgaaggggctgacgtgtcctatactaatcataggggtagaagccctttagacctcgccgcagagggccgtgtattaaaagcccttcaggggtgcgcccagaggtttcgggaaagacaggctgggggaggcgctgccccaggacccaggcagacactgggtacgcctaataccgtgacgaacctccacgtgggagcagcaccgggtccagaggcggcagagtgcctcgtgtgtagtgagttggctctgctcgtacttttctccccctgtcagcatcggacagtgtgtgaggagtgtgcacgcagaatgaaaaagtgtataaggtgccaggtggtggtgtctaagaagttgcggccagacgggagtgaggtcgccagcgcagcccctgctcccggaccccctcgtcagttggtggaagaactacagagcagatatcgtcagatggaagagcgcatcacatgccctatctgtatcgattcccatataaggctggtattccagtgtggacacggagcatgtgccccttgtggcagtgccctctctgcgtgtccgatttgcagacaacctatccgagacagaattcagatttttgtttag

SEQ ID NO: 28465 - DNA, 858 bp, synthetic construct
  source 1..858: mol_type = other DNA; note = Synthetic coding sequence
atgtccgaagcaggtgaagaacagccaatggaaaccaccggagccactgagaacgggcacgaagccgtcccggaaggtgaaagcccagcaggagccggaacaggagctgccgctggagcaggcggagcaactgccgcacctcctagcgggaatcagaatggtgcagaaggagatcagatcaacgcatcaaagaacgaagaggatgccggaaaaatgtttgtaggaggtctgagctgggacacaagcaaaaaggacctcaaggactattttacaaagtttggcgaggtggttgactgcaccatcaaaatggatccaaacactgggagatcccggggatttggattcattctttttaaggatgctgcgagcgttgagaaagtgttggatcaaaaggagcatcgcctcgatggacgcgtgattgaccccaagaaagccatggctatgaaaaaggacccagtgaagaagatctttgtcggaggcctgaatccagaagcaaccgaggaaaaaatccgtgaatacttcggcgaattcggcgaaattgaggctatagagctgcctatggatcccaagctgaataagaggagaggatttgtgttcattacctttaaggaagaggagccagtcaagaaggtgttggagaagaagtttcataccgtgtcgggaagcaagtgcgagattaaggtcgctcagccaaaagaagtgtatcagcagcaacagtatggttcgggcggacgaggcaatcgaaatcgcggaaatcggggtagcggcggtggaggagggggagggggtcaaggctcaaccaattacggtaagtcccagcggaggggaggacaccaaaataactataagccatactag

SEQ ID NO: 28466 - DNA, 1212 bp, synthetic construct
  source 1..1212: mol_type = other DNA; note = Synthetic coding sequence
atgtcgggttccgacggcggactggaagaggagccagagctttctattacattgaccctgcgtatgttaatgcatggcaaagaagtgggaagcatcatcggaaagaagggggaaaccgtgaaacgaattcgtgaacagtcttccgcgagaattaccatttccgaaggctcctgccccgagcgcatcactaccataacgggttctaccgccgcagtgtttcacgcagtatccatgatcgctttcaaactggatgaagacctatgcgccgctccggctaacggtggcaacgtcagcagacctcctgtgaccctgcgattagtgattccagccagtcagtgcggaagtctgattggcaaggccggaactaagataaaggaaattagagagactacaggagctcaagtacaagttgctggagacctgctacctaatagcactgagcgcgcagtcaccgtgagcggagtacccgatgcaatcattctgtgtgtgcgacagatctgcgctgttatccttgaaagtccccctaagggagccactattccttatcatcccagtctgagcctcgggactgtcctccttagcgctaatcaaggcttcagcgttcagggacagtatggtgctgtcacgcctgcagaggtgacgaagctccaacagcttagtagccatgctgtcccgtttgcgacccctagcgtggtaccagggctggatcctggaacacagaccagcagtcaagagtttctcgtgcccaatgacttgatcggatgcgtgattggcaggcagggcagcaagatctccgaaatcaggcaaatgagtggagcccatataaagataggaaatcaggcggagggtgcaggcgagagacacgtgaccatcactggttctccagtcagcatcgcattggcacaatatctgatcaccgcctgtctggaaacagccaaatcaacgagtggcggaactcctagtagcgctccggctgatctacccgctccattctccccccctcttacggccctcccaactgctccacccggtctgctgggcactccgtacgcaatcagtctgtcaaacttcattgggttgaaaccaatgccttttctggccctgccacctgcctctcctggtccaccacctggattggccgcttacactgccaagatggctgccgcaaatgggtctaagaaagctgaacgccaaaagttcagcccttactag

SEQ ID NO: 28467 - DNA, 1347 bp, synthetic construct
  source 1..1347: mol_type = other DNA; note = Synthetic coding sequence
atggctacggattcttgggcactggccgtagacgagcaggaagccgctgccgagagcttaagcaacttgcatctgaaagaggagaaaatcaagcctgatacaaacggcgctgtcgtaaagaccaacgccaacgcggaaaagacagatgaggaggaaaaggaagaccgcgctgcccagagcctgttgaataagctcatcaggtccaacttagtcgacaataccaaccaggtggaagtgctgcagcgagacccaaattctcctttgtattccgtgaagtcgttcgaagaacttaggctgccgcagaacctgatagctcagagtcaaagcggcactggcaaaacagcagcattcgtgcttgctatgctgtcacaggtggagcccgctaataaatacccgcagtgtttgtgtttgtcaccaacatacgagcttgctctgcagacaggaaaggtgatcgaacagatgggaaaattttaccctgagcttaaattggcctacgccgtgcggggaaataagctcgagcgcggtcagaagatctccgagcagattgtcattggcacgcccggtaccgtccttgactggtgctcaaagctcaagtttatcgatcccaagaagataaaagtgttcgtcctggatgaggccgacgtgatgattgccacccagggtcatcaggaccagagcattcgcattcagcgcatgttaccccgtaactgccagatgctcctcttctcggctactttcgaagactctgtgtggaaatttgctcagaaggtcgtgcctgaccccaatgtaattaaactcaagcgtgaggaagagactttggacacaattaagcagtattacgttctctgcagctcgagggacgaaaagttccaagcattatgcaatctatatggcgctatcaccattgcacaagctatgattttttgccatactaggaagaccgctagttggcttgccgcagaactcagtaaggagggccatcaggtagctctgctgagcggcgagatgatggtggaacagcgtgctgctgtcatcgagcggtttcgcgagggtaaagagaaagttctcgttaccacgaacgtctgcgctcggggaatagatgtagagcaggtgtcagtggtgatcaatttcgacctgcctgtggataaagacggcaacccagacaacgagacgtacctacacaggatcggtcgaaccggcaggttcggcaagcgcggtcttgccgtgaatatggtcgactctaagcattccatgaacatcttgaatcgaatacaggagcattttaacaaaaagatcgagcgactcgacaccgacgatctggatgaaatcgagaagatcgccaattag

SEQ ID NO: 28468 - DNA, 1248 bp, synthetic construct
  source 1..1248: mol_type = other DNA; note = Synthetic coding sequence
atgatgcttggccctgagggcggtgagggcttcgtcgtgaagttgaggggcctgccatggagctgtagcgttgaggatgtgcagaattttctctccgactgcaccatccacgacggggcagctggggtccattttatttacacaagagaaggcagacagagcggtgaagcttttgttgaactggggtccgaagatgatgtgaaaatggcactgaagaaggacagggagagcatgggacatcgatacattgaggtgttcaaatcccatcggaccgaaatggactgggtgctcaaacattccggcccaaattctgcagacagcgctaacgatggcttcgtgcgtctgcgagggcttccattcggatgcacaaaagaagaaatagtgcagtttttttcaggattagagatcgttcccaacgggataactctccctgtcgacccagaagggaagatcaccggcgaggccttcgtccagtttgcctcccaagaattggctgagaaggctctggggaagcacaaagaacgcattggccaccggtacatagaggttttcaagtcgtctcaggaggaggtgagatcgtattccgaccctcccctgaagttcatgtcagtgcagcgaccaggaccatacgatcgccctggtaccgcaaggagatacatcgggatagtgaaacaggcagggctggagcggatgcgcccaggggcttactccactggctatggcggatacgaggaatactccggcctgagcgatggttacggatttaccacagatctgttcggacgggacctctcatattgcctgtcggggatgtacgatcataggtatggtgactctgaatttactgtccagtccactacaggccactgtgtgcatatgagaggcctaccgtacaaagcgaccgaaaacgacatctacaacttcttcagtccgctcaaccccgtacgggttcatattgaaattggaccggatggacgcgtaactggagaagctgacgttgaattcgccacccatgaggaagcagtggcggcaatgtctaaagatcgggcaaacatgcaacacagatacattgaacttttccttaatagtacgactggagcttcaaacggagcatacagtagccaagtgatgcaagggatgggcgtctctgccgctcaagcaacatactccgggctggaatcacagagcgtgagcggctgctacggtgcaggttacagcggccagaactctatggggggatatgactag

SEQ ID NO: 28469 - DNA, 1026 bp, synthetic construct
  source 1..1026: mol_type = other DNA; note = Synthetic coding sequence
atggcacaggagtcccctaagaattctgccgcagaaattcctgtcaccagcaacggagaggtggacgattctagggaacactcctttaaccgagacctgaagcactctctcccgagcgggctcgggttatctgagacccaaatcacttcccatggctttgacaacactaaggagggggtgatcgaggcaggagccttccaaggaggtcagagaacacaaacaaagagcggacctgttatcttggcagatgagatcaaaaatcccgcaatggaaaaactggagctcgtgagaaaatggtctctgaatacttacaagtgtacacgtcagattatctcagaaaagctcgggcgaggctctcggaccgtcgatctcgagttggaggctcagattgacattctgcgtgacaacaaaaaaaagtacgaaaatattctgaagctggcccaaacccttagcacgcagttgtttcagatggtgcacacccaacgacagttgggcgatgcttttgctgacctcagcttaaagtccctggaactgcacgaggagtttggctacaatgcggacactcaaaagctcttggcaaagaacggcgagaccttactgggtgctattaacttctttatagcttcagtcaatacgctggtcaataagacaatcgaggacactttgatgacagttaaacagtacgagtctgcacgcatcgagtacgatgcataccggacggacctggaagagttgaacttaggacctagggacgctaacacattgcccaaaatagagcaaagccagcatctctttcaggcccataaagagaagtatgataagatgcgaaatgacgtgtccgtcaagctaaaatttcttgaggaaaacaaggtgaaagtacttcataatcagctcgtgttatttcacaacgccattgcagcgtactttgctggaaatcagaagcaattggaacagactctgaagcagttccacattaaactgaaaacacccggtgttgacgctccaagttggctcgaggaacagtag

SEQ ID NO: 28470 - DNA, 1572 bp, synthetic construct
  source 1..1572: mol_type = other DNA; note = Synthetic coding sequence
atggcaaatgttggcctgcagttccaagcctccgccggagactcagaccctcagtctcgccctttgctcctgcttggccagttgcatcacctgcaccgagtgccttggtcgcatgtgagaggcaagctgcagcccagagtaaccgaagaactgtggcaagccgctttgagcacactaaacccaaaccccaccgacagttgtcctctgtatctaaactacgcgaccgtggccgcattaccctgccgggtctcccgccataacagtcctagtgctgcacatttcatcacacgattggtgcgaacctgtctgccccctggggctcaccggtgcatagtgatggtgtgtgagcagccggaagtgttcgcttctgcgtgtgctctggcacgcgcttttcctctgtttacccataggtcaggggcaagtcgccgactggagaagaagactgtcacagttgaattcttcttggtcgggcaggacaatggtccagtcgaggtttctaccctgcaatgcctcgcaaatgccacagatggcgtgaggctggccgctcgcattgtggacaccccttgtaacgagatgaacactgatacctttctggaagagatcaataaagtaggtaaagaactcggcatcattccgaccattattcgagatgaggaattaaaaacccgcggtttcgggggtatatacggtgtgggaaaagctgccttacatccccctgcgctggccgttctctctcatacccccgatggcgctacacagacaattgcctgggtgggtaaaggcatcgtttatgacacaggcggactgagtatcaaggggaagacaacgatgcctggaatgaaaagggattgtggtggagcagctgctgttttgggcgctttccgggcagcgattaagcagggcttcaaggataacctccacgcagttttttgcctagccgagaactcagtgggacccaatgccactagacccgacgacatacatttgctgtatagcgggaagacagtcgaaataaacaacacagatgccgagggcaggctcgtgttggctgacggcgtatcatatgcttgtaaagacctgggggctgatatcatcctggatatggcaaccctgacaggcgcacagggaatcgccaccggtaaatatcacgccgctgtacttaccaatagtgccgagtgggaggccgcatgtgtgaaggccggacgaaaatgtggcgacttagtccacccactagtgtattgcccagaactgcacttcagcgagtttacctccgcagtagccgatatgaaaaatagcgtggcagatcgggacaactcgccgtcgagctgcgctggactctttatcgcctctcatataggattcgactggccaggcgtgtgggttcatcttgatatcgccgctccagtgcacgccggagaaagggccaccggatttggtgttgccctgcttttggcactcttcgggcgtgcttcagaagatccactccttaatttggtaagccctctggggtgcgaggtcgacgtggaggaaggggacctgggacgcgactccaagagaaggcggcttgtgtag

SEQ ID NO: 28471 - DNA, 1371 bp, synthetic construct
  source 1..1371: mol_type = other DNA; note = Synthetic coding sequence
atggctgatgggggaagtgagagagcagacggcagaatcgtgaagatggaggtcgattactccgccactgtcgaccagcgactgccagagtgtgccaaactggccaaggaggggagattgcaggaggttattgaaacccttctaagcctggaaaaacagaccaggactgctagtgatatggttagtacttctcggatcctagtcgcagtggtaaagatgtgttacgaggcgaaggaatgggatcttctgaacgagaacatcatgctgctaagcaagcgacgatcccagttgaagcaggctgtcgccaaaatggtgcagcagtgttgtacgtatgtggaggagattacagatttgccaatcaagctgaggctgatcgataccctccgcatggtgactgagggaaagatctatgtagagatcgaacgcgcacgccttacaaagacactggccaccatcaaggaacagaatggggatgtcaaggaagctgcatctattttacaggaactgcaggtggaaacctatggcagcatggaaaagaaggagagggtggagtttatcctggaacagatgcggttatgcctggccgtgaaggactacatccgaacacagattatttctaaaaagataaacacaaagttctttcaggaagaaaacaccgagaaactcaaacttaagtattacaacctaatgatccagctcgatcaacacgagggtagttacctgtctatctgcaagcactacagagctatttacgacacaccctgcattcaggcagagagtgagaaatggcagcaggctctgaagtctgtggtcctgtacgttattttagcaccctttgataatgaacagtccgacttggttcaccgtatctctggagataagaagctggaagagattccaaagtacaaggatcttctcaagctattcacaacaatggaactgatgcgttggagtaccctcgtggaagattatggaatggaacttagaaagggctctctggagagccccgctacggatgtctttggctctacagaggaaggggagaaaagatggaaggacctgaagaaccgggtggttgagcataatattcgcattatggccaaatattacactcgcatcacaatgaagagaatggcacagctgctggatttgtctgtcgacgaatctgaggcctttctctctaatctagttgtgaataagaccattttcgccaaagttgatcggcttgccggaattatcaacttccaacggccaaaggacccaaataatctgttaaacgattggagccaaaagctgaactccctgatgagtctcgtcaacaagacaactcatctgatcgccaaggaggaaatgatccataatctccagtag

SEQ ID NO: 28472 - DNA, 1011 bp, synthetic construct
  source 1..1011: mol_type = other DNA; note = Synthetic coding sequence
atgaagattgacatccactcgcatattctgcctaaagagtggcccgatcttaagaaaaggtttggctacggcggatgggtccagctgcagcatcattccaagggcgaagctaagctgcttaaggatgggaaggtgtttagagtggtcagagagaattgctgggacccagaggtccgcattagggagatggatcagaagggcgtgaccgtgcaggcactgagcaccgtccccgtgatgttttcatactgggcaaagcccgaggacacccttaatctttgccaactgcttaacaacgacctggcctctactgtggtgagttaccctagacggtttgtcggcctggggacactgcccatgcaggctcctgaactcgccgtgaaggagatggagaggtgtgtcaaggagttaggattcccgggagtgcaaatcggtacacacgtgaacgagtgggacttgaacgcccaggaactatttcctgtctatgcggcagccgaacgcctgaaatgttcgctgtttgtccatccatgggacatgcagatggacgggagaatggcgaaatattggctcccttggcttgtgggcatgccagctgaaaccaccattgcgatctgttccatgattatggggggtgtatttgaaaaatttcctaaattaaaggtctgctttgcccatggcggtggcgcttttcctttcacagttggaaggatttcccacggcttctccatgagaccggatctctgcgctcaggacaacccaatgaaccccaaaaaatacctaggctccttttacacagacgctcttgtgcacgacccactgtcactcaaactcctgacagacgtgataggcaaagacaaggtgattctgggtacagattacccgttcccccttggtgaactcgaaccagggaagctcattgagtcaatggaagagttcgacgaggagactaagaacaagctcaaggcaggtaatgcacttgcttttctcggtttggagagaaagcaatttgaatag

SEQ ID NO: 28473 - DNA, 1617 bp, synthetic construct
  source 1..1617: mol_type = other DNA; note = Synthetic coding sequence
atggagctctcatatcagacgttaaaatttacccatcaggccagggaggcgtgcgaaatgcggacggaagctcggaggaagaacttactcatcttaatctcccactatttgacccaagaggggtatatcgatacagcgaatgcacttgaacaggagaccaaactaggtttgcgtcggtttgaggtttgcgacaacatcgacctcgagaccatactaatggagtatgagtcatactactttgtcaagttccaaaagtaccccaaaattgtgaaaaaaagtagcgatactgccgaaaataatttaccccagagatcccggggaaaaactcggaggatgatgaatgattcatgtcagaatctgcccaaaattaaccaacagcggccacggagcaagacgaccgcaggtaaaactggagacaccaaatcccttaataaagagcacccaaatcaggaagtagtggataatacacgcctcgaatcagccaacttcgggttgcatatttcccggatccgcaaagacagtggggaggagaatgcccaccccagacggggtcaaattattgattttcagggcctcctaaccgatgcaatcaagggcgcaacatcggaattagccttaaacactttcgaccacaatcccgacccttctgagcggcttcttaagcccctttccgcctttatcggtatgaattcagagatgcgagagctcgccgctgtcgtctcccgagatatctacctgcataatccaaatattaaatggaatgacatcattggactcgatgccgctaagcagttggtcaaggaggccgtcgtgtatcccatacggtacccgcagctttttacaggaatactgtctccctggaaagggctgctcctttacggccctcctggcaccgggaagacactgctggcaaaagctgtggccaccgagtgtaagaccaccttttttaatatctcggcctctacaattgtgagcaaatggaggggagattcagagaagttagtgcgtgtgctgttcgaactcgcccgataccatgctccttccacaattttcctagatgaactggaatccgtcatgagccaaagagggacggcctcaggaggtgagcacgaaggcagcctgaggatgaagactgaactcctggtccagatggatggtctggctcgatcagaggaccttgtctttgtcctagctgccagtaatcttccctgggagcttgattgcgctatgctgagacgcctcgaaaagcgcatactggttgatctgccgtcaagagaggctaggcaggccatgatttaccattggcttccccctgtctcgaaaagtcgggcactggagctgcataccgagttagagtactctgtgctgtcacaggagacggaaggttacagtgggtcagatatcaagctcgtgtgccgggaggccgctatgcgtcctgtccgcaaaatcttcgacgccctcgaaaatcaccagagtgagagctcagacctgccacggattcagctggacatcgttacgaccgccgattttctagatgtgctgacacacactaagccgtccgccaagaacctggcccagcggtattcagactggcaacgagaattcgaaagtgtgtag

SEQ ID NO: 28474 - DNA, 507 bp, synthetic construct
  source 1..507: mol_type = other DNA; note = Synthetic coding sequence
atggccgaggggagtcgtattccacaagctcgtgcattgctccagcaatgcctccacgccagacttcagatacgccctgcagacggcgacgtggctgcccagtgggttgaggtgcaaagaggcttagtcatctacgtgtgttttttcaagggcgctgataaggaactcctcccaaaaatggtaaatacgctgttgaatgtgaagttatcagagaccgagaatggcaaacacgtgtccatccttgacctccctggcaatattctgattatcccacaagccactttgggcggacgcctgaaggggagaaatatgcaataccacagtaactccggtaaggaggaaggtttcgagctgtattctcagttcgtaacattgtgtgagaaggaagtggcggcaaacagtaagtgcgcggaggctcgcgtagttgtcgagcacggcacttacggaaataggcaggtgctgaagcttgacaccaacggaccattcacccatctcatagagttctag

SEQ ID NO: 28475 - DNA, 1764 bp, synthetic construct
  source 1..1764: mol_type = other DNA; note = Synthetic coding sequence
atggcatccgaggatatagcaaagctcgccgagacgctcgccaaaacacaagttgcagggggacagctttcttttaaggggaagtctctgaagttaaacacagctgaagatgccaaagacgtgatcaaggagatcgaagattttgattccctggaggctctgagactcgaggggaatactgtgggagtcgaggcggctagggtgatcgcaaaggcgctggagaagaagtccgagctgaaaaggtgtcactggtccgacatgtttactgggcgtctgaggaccgaaatccctcccgcattgatctctttgggcgagggcctcatcactgctggagcacagctagtcgaactggatttaagtgataacgcctttggacctgacggcgtgcaggggttcgaggctctgctgaagagctcagcctgttttacattgcaggaactgaagttgaataactgtggtatgggcataggcggaggaaagattctcgcagctgctttgactgaatgtcacaggaagtcaagcgctcaggggaagcctctggccctgaaagtgttcgtagccggtaggaaccgtctggagaacgatggtgcaacagcactcgcagaggctttccgggtaatcggcacgcttgaagaagtgcacatgccacaaaatggcataaaccatcctgggattaccgcgttagcccaggccttcgctgtgaacccattgctaagggtgataaacttaaacgataatacttttactgagaagggcgctgttgccatggctgagacccttaaaacgctgcggcaggtggaagttatcaactttggggactgcctggtgcgatcaaaaggcgctgtcgccatagcagatgcaattcggggaggtcttccaaagttgaaagagcttaatttgagcttctgcgaaattaagagggacgctgccctggcggtggcggaggccatggctgataaagcagagttagagaaacttgacctgaatggaaacaccctcggcgaggaagggtgcgagcagctgcaggaggttcttgagggtttcaacatggccaaagtgctggcatctttgtccgacgacgaggatgaggaagaggaagaggaaggggaggaagaggaagaagaggccgaggaggaggaggaggaggacgaagaggaagaggaagaggaggaggaagaggaggaggaagaaccgcaacagcggggacaaggagaaaaaagcgcaacacctagtaggaagattttagacccaaacacaggggagccagctccagttctctcttcacctccaccagctgatgtgagcacatttttagcctttccaagtcccgagaagctccttcgcttgggtcccaagtcatctgtgctgattgcacagcagacagatacttccgacccagaaaaggtggtgagcgcctttctgaaagtgagctcagtgttcaaagatgaagcgacagtgagaatggccgtccaggacgccgttgacgcgcttatgcagaaagctttcaactctagttctttcaatagtaacacttttctaaccaggctgctggtacacatgggcctgttgaaaagtgaggacaaggtgaaagccattgcaaacctctacggacctctgatggccttaaaccacatggtccagcaggactacttccccaaagccttggcaccactcctgttggccttcgtgaccaagcccaactcagcacttgagtcgtgctcttttgctcggcattcgctactacagaccctgtacaaagtgtag

SEQ ID NO: 28476 - DNA, 2529 bp, synthetic construct
  source 1..2529: mol_type = other DNA; note = Synthetic coding sequence
atggatatttccaaaggactgcctgggatgcagggaggcctacatatctggattagtgagaatcggaaaatggttcctgtgcctgaaggggcttatgggaatttctttgaagagcattgctacgtaatattacatgtgcctcagagccctaaagctacacagggtgctagtagcgatttgcactactgggttggaaaacaggccggagcagaagcacagggtgccgctgaagcgtttcagcagcgacttcaggatgaattaggcggacagaccgtgttgcacagggaggcccagggtcacgaatctgactgtttttgttcttacttcaggcccggaatcatatacagaaaagggggattagcgagtgacctgaaacacgtagagacaaacttatttaacatccagagactgctccacataaagggacggaagcacgtttccgctacggaagttgagctctcctggaactcctttaacaagggagacattttcttactcgatctgggtaaaatgatgatccagtggaatggccctaagacatccatctccgagaaagccagaggccttgctctgacttactcacttagagaccgcgaaaggggaggaggtcgcgctcagatcggcgtcgttgacgatgaagccaaggcacctgatctgatgcagatcatggaggcggttctgggtcggagggttggcagcctcagggctgctaccccatcaaaggacatcaaccagctgcagaaagccaacgtccgcctctaccatgtgtacgaaaagggcaaggacctgctgcaggaggaagatttttatatcctggatcaggggggattcaaaatctacgtctggcaggggcgaatgtctagcctccaggaaaggaaagccgcattcagtcgggcagtgggatttattcaggccaaggggtaccctacttatactaacgtggaggttgtgaatgatggggcagagtctgccgcattcaaacagctatttcgtacttggagtgaaaaaagacggagaaaccagaagctgggaggcagagataaatccattcacgtgaagctcgacgtgggtaagcttcacactcaaccaaaacttgctgcacagctgcgcatggtagatgatggatccggaaaggtggaggtgtggtgcatacaggatcttcataggcaaccagtggatccaaagcgacatgggcagctctgcgccggaaattgctatttagttctttatacctatcagcgtctcggtcgtgtgcagtacatactgtatttatggcaaggacaccaagccacagcagatgagattgaggcgctcaatagcaatgccgaggagctggacgttatgtacgggggagtgctggttcaggagcacgtcacaatgggttcagaaccaccccactttctcgccatttttcagggccaactcgtcatcttccaggagcgggctgggcatcacggcaagggccagagcgccagtactactcggctgtttcaggtccagggtaccgactcacataataccaggaccatggaagtgcccgctagagctagtagtctgaattcctctgatatttttctgctagtcacagcatccgtatgttatctgtggttcgggaagggatgcaatggcgatcaaagggaaatggctagggtcgtggttaccgtaataagccgcaagaatgaagagactgtcctggagggacaggaacctccccacttctgggaggccctggggggacgggctccctatccctctaacaagagactccctgaggaggtcccgagctttcagccaaggctgtttgagtgcagttcccatatgggttgcttagtcctcgccgaggtagggttcttctctcaggaggaccttgacaaatatgatattatgctccttgacacgtggcaagagatctttctgtggctcggagaagccgcttccgaatggaaggaagcggttgcctggggacaggaatacctgaaaacgcatcctgctggtcggtctcccgctactcccatagtgctggtgaaacaaggtcacgaacccccaacctttataggctggttcttcacctgggatccctataagtggacttctcatccttcccataaggaagtagtagacggcagcccagctgccgcttccactatatctgaaatcaccgccgaagtgaacaatctgagattgagccgctggcccggtaacggtcgcgcaggcgcagttgccctccaggctcttaaaggatcccaggactcctctgagaatgatctcgtaaggtcaccaaaatccgcgggaagcaggacgtcctccagtgtttccagcacatcagccaccattaacggcggtctgcgtagagagcagctcatgcatcaggcagtagaggaccttcctgagggagtggaccccgcacgcagggagttttatctctcagactccgactttcaggacatttttggaaagagtaaggaggaattctactctatggcaacttggcggcaaaggcaggaaaagaagcagcttgggttcttttag

SEQ ID NO: 28477 - DNA, 1620 bp, synthetic construct
  source 1..1620: mol_type = other DNA; note = Synthetic coding sequence
atggacgccatggcctcacccggtaaggacaattacagaatgaagtcatataaaaataaggccctcaacccacaggagatgagaagacggagagaggaggagggcattcagctgcgaaagcaaaagcgtgaggaacagctcttcaagaggaggaatgtttacctacccaggaacgacgagagcatgttagaatccccaatccaagaccctgatatcagttcaaccgtgccgataccagaggaggaggttgtcaccacggacatggtccagatgatctttagcaacaatgccgatcaacaactcaccgcgacccagaagttcaggaagctgctatctaaagagccaaacccaccaatagatcaggttatccaaaaacccggagttgttcagcgtttcgtgaagttcctcgagagaaacgagaactgtacactgcagtttgaagctgcctgggccctgacgaatattgcaagtggaacctttctgcacactaaagtggtgattgagaccggagctgtaccaattttcataaagctgctgaatagcgaacacgaggatgtacaagaacaggcagtgtgggctctcggtaatattgcgggagacaacgcagagtgtcgggattttgttctgaactgcgaaattctgcctccgttactagaactgctaacaaactctaaccgcctcaccacaaccagaaatgccgtgtgggcgctatccaatctctgcaggggcaagaacccgccacccaacttctccaaagtcagcccttgcctgaacgtattatcgcggctgcttttttcttctgacccagatgtgctggcagatgtgtgctgggccctgagttacctgtccgatggtccaaatgataagatacaagccgttatcgacagtggcgtttgtcggaggcttgtcgagttgctcatgcacaacgattataaggtcgtctcgccagcactgcgggcagtgggtaatattgtgaccggcgatgacatccagacacaggtcatactgaactgtagcgcccttccttgccttcttcacttgctgtctagtccgaaggaatctatccgcaaggaggcctgctggaccgttagtaacattaccgccggaaatagagcccagatccaggctgtcatcgatgcaaatatttttcctgtactgatcgagatcctgcagaaagccgagtttagaactaggaaggaggcagcttgggctataactaatgcaactagcggaggaacgccagagcagatacgctacctggttgcactcggatgcattaagccgttgtgcgacctattaacagtcatggactctaaaatcgtgcaggtcgccttgaatggcctggaaaacattctgagactgggcgaacaagaaagtaagcaaaacggtattggcatcaatccgtactgtgctctgattgaagaggcttacggccttgacaaaatagaattcctgcagtcccatgagaatcaagagatttatcagaaggcattcgatcttatagaacactacttcggcgtggaggaagatgatccttccattgtcccgcaagtggacgaaaatcagcagcagtttatcttccagcagcaagaggcgcctatggacgggttccaactgtag

SEQ ID NO: 28478 - DNA, 3735 bp, synthetic construct
  source 1..3735: mol_type = other DNA; note = Synthetic coding sequence
atgctaatcaaggagtatcatatcctgctgcccatgtcacttgacgagtatcaagtcgcacagctgtacatgattcaaaagaagtctagggaagaatcgagcggggaaggttcgggagttgagattctggctaatcggccatatacggatgggccaggtggatcagggcagtatacgcataaagtgtatcacgtgggcagtcacatcccagggtggttccgcgcactcctaccgaaagccgctctccaggtcgaagaggaatcctggaatgcatacccatacactaggacgcgctacacttgcccattcgttgagaaattcagtatcgagatagagacctactatttgcctgacggaggtcagcaaccgaacgtgtttaacctgtcgggagcagagaggcgccaaaggattcttgacactattgatattgtccgcgatgctgtcgccccaggtgaatacaaggcagaggaagatcccagattgtaccatagcgtgaaaactgggaggggaccattgagtgatgactgggcgcgtaccgccgcacagacaggacctctcatgtgcgcctataagctgtgcaaagttgagttcagatattggggaatgcaggcgaagatcgagcagtttatacacgacgtgggattgcgacgggttatgctcagggcccaccggcaggcttggtgttggcaggacgagtggaccgaactcagtatggccgacatcagggccctggaggaggaaacagcgcgtatgttggcgcagcgcatggccaaatgtaacactggcagcgagggttccgaggctcagccgccaggtaagcctagcactgaggcacggagcgccgcttctaatacaggaactcccgacggcccagaggccccaccgggtccagacgctagccccgacgccagctttggtaagcagtggagctcttcgtctcgaagcagctacagctcgcagcacgggggagccgtgtccccccaatccctgagtgaatggagaatgcagaatattgctcgagacagtgaaaacagcagcgaggaggaatttttcgatgctcacgaagggtttagtgactctgaggaggtgtttcccaaggagatgactaagtggaacagcaacgactttattgacgcatttgcgagccctgttgaggcagaagggaccccagaacccggagcggaagctgcgaaaggaattgaggacggggcacaggccccacgcgacagcgaaggcctggatggtgcgggagagctgggggcagaggcctgcgcagtccatgctctatttctgattcttcattcgggcaacatcttggactctggacctggggatgcgaactcgaagcaagcagacgtccagacactgagcagcgccttcgaagcggtcaccagaattcactttccagaggccttagggcacgtagcactgcggctcgtcccctgtcccccaatttgcgctgccgcatacgccctggtctcaaatctctctccttacagtcatgacggagatagcctctcccgctcacaggatcacatccccttagcagctctgccactgttggccacatcaagctctcggtaccagggcgctgtcgccactgttatcgctcgcactaatcaagcctactcagccttcctgagatcccccgaaggtgcaggcttctgtggacaggtagccctgatcggtgacggtgtgggagggatcctggggtttgatgctctctgccatagcgccaacgcaggaactgggagtcgcggaagttccagaagggggagcatgaacaatgaactcctgtcacctgaattcggtccagtccgcgatcctctcgccgacggtgtggaaggtctgggccgaggcagcccagaaccttccgccctccccccacaacgcataccctctgatatggctagccccgagcctgagggaagtcagaattcattacaggccgctcccgcaacaacttcatcctgggaaccaaggagagcaagcactgcattctgtccccctgcggcttctagcgaggcaccagatggaccctcctcgactgctagactcgactttaaggtatcaggcttctttctgttcggatctcctctaggcttggtcctcgcccttagaaagaccgtaatgcctgctcttgaggcagcgcaaatgcgcccagcttgcgagcaaatctataatttgttccatgcggcagacccctgtgcttcccggctagaaccactgttagccccaaagttccaggccatagcaccactcactgttcccagataccagaagttcccactgggcgacggctcttccctactcttggccgacaccttgcagacccactcttcactgttcttagaggagctggagatgctagttcccagcacccctactagcacgagcggggctttttggaagggatctgaactggctacagaccctccggcacagccagccgctcctagcactactagtgaagtcgttaaaatactggagagatggtggggaactaaacggatcgattacagcctttactgtcccgaagctcttactgcctttcccactgtgacattgccgcatctgttccacgcttcttactgggagtccgctgatgtcgtggcgttcattctgagacaggttatcgagaaagagcgcccacagctcgccgaatgcgaggaaccatcaatttattcacccgcttttccacgagaaaaatggcagcgcaaacggacccaggtcaaaattcgcaacgtcacgagcaatcatagagcttctgatactgtggtctgcgagggtaggccacaggtgctctctggcagattcatgtatggcccattggacgtggtcactctgaccggggaaaaagttgacgtgtacattatgactcagccattaagtggcaaatggatacatttcggcactgaggtgaccaattcctcagggcgacttacattccctgtgccccctgaacgcgcactaggaataggtgtgtatcctgtccggatggtcgtgcgcggagatcacacatacgcggagtgttgtctcactgtcgtggctcggggaaccgaagccgttgtattctctattgacggcagctttacagcctctgtctccataatggggagtgatccaaaagtgcgggctggtgccgttgacgtcgtgcgccattggcaggattctgggtatctaattgtgtacgttactggtcgccctgatatgcagaagcatcgtgtggtggcatggttgtcacagcacaatttcccgcacggggtcgtcagcttctgtgatgggctcacgcacgaccctttgcgtcagaaggctatgttcctacagtctttggtacaggaggtggaactgaatattgtggcagggtacggatcacctaaagacgtcgccgtgtatgccgctttagggctgagtccctctcaaacctatatcgtggggagagcagttaggaagctgcaggcccagtgccagtttctttcagatggatatgtcgctcacttaggtcagctggaggcaggttcccattcacacgcgtcctccgggcctccgcgagcagcactgggtaagagcagttatggggttgcggctcctgttgactttctgcggaaacagtctcagctcttgagatccaggggaccttcacaagccgaaagggagggaccgggaacaccgccaaccaccctggctcgcggaaaggctcggtctatttcactgaagcttgactcagaggagtag

SEQ ID NO: 28479 - DNA, 882 bp, synthetic construct
  source 1..882: mol_type = other DNA; note = Synthetic coding sequence
atgacagaggatagtcaaaggaacttcagatccgtatactatgagaaagttggcttccggggtgtagaagagaaaaaaagtttggaaatcctcctaaaagacgacagattggatacggagaaactctgcacattctcccagaggtttcctttgccctccatgtaccgcgcactggtttggaaggtgctgttgggtattttacctccgcatcatgagagccatgccaaggtgatgatgtataggaaggagcaatacctcgacgtgctgcatgcacttaaggtggtgaggttcgtcagcgacgcaacccctcaagctgaagtgtatttacgaatgtatcagctggagagtgggaaactgccaaggtccccgagttttcctctggaaccagacgatgaggtcttcctggctatcgccaaggccatggaagaaatggtagaggattccgtggactgttattggattacacgcaggttcgttaaccagctgaataccaaatatagggacagcctgccacagttacccaaagcatttgagcagtatctgaacctggaggatggcagacttctaacacatctgcggatgtgttcagcggcaccgaagcttccttatgacctgtggttcaaaagatgcttcgccggatgtctgcccgagagctcacttcagcgagtttgggataaagtagtcagcggctcatgtaagatccttgtcttcgtggcagtggagattttattaacttttaagattaaagtgatggctctgaactcagcagaaaagataacaaaattcctggagaatatacctcaagactctagcgacgcgattgtaagtaaggcaatcgatctgtggcataagcactgtgggactcctgtgcactcctcgtag

SEQ ID NO: 28480 - DNA, 249 bp, synthetic construct
  source 1..249: mol_type = other DNA; note = Synthetic coding sequence
atgtccgaaggcgaaagccagaccgtgcttagtagtggcagtgatcccaaggtcgagtcttcgtctagtgctcccggactaaccagcgtgagtcccccagtgacatcgaccactagtgcagcttctcctgaggaagaagaagaatcagaagacgaatccgagatcctggaagagagcccttgtggacgttggcagaagcggagagaggaagtgaatcagaggaatgtgcctggcatagattcagcgtag

SEQ ID NO: 28481 - DNA, 5057 bp, synthetic construct
  source 1..5057: mol_type = other DNA; note = Synthetic coding sequence
atgtcattacccttttaccagagatgccatcagcattacgacttatcttacagaaacaaggatgtacgatcgaccgtctctcactatcagcgtgagaaaaagcgctccgctgtgtatacacagggcagcacggcttactcctcacgcagctccgcagctcaccgtcgggagtccgaagccttcagaagggcatccgccagttcaagtcaacagcaagcgtcccagcatgccctgagtagtgaggtgtcccgcaaggcggcatccgcttacgattatggttccagccatgggttgactgattccagcctcctgctggacgactattcatccaagctgtcaccaaaaccaaagagggccaagcactcgcttctcagtggcgaggaaaaggaaaacctgccatctgattacatggtaccaatcttcagcgggagacaaaagcatgtgagcggcatcaccgatactgaagaagagcgaattaaagaagctgccgcatacattgcccaaaggaatctgctagccagtgaggaaggaatcacaacgagtaaacaatccacagcgagtaagcagaccacagcttcaaagcagtccaccgcatccaagcagagtactgcctccaaacagtccactgcgtcacggcagtcaactgcgagtcggcagtccgtggtatctaagcaggcaacctcagcacttcagcaggaagaaacctcagaaaagaaatctagaaaggtggtgatccgagaaaaggctgaaaggctttctctccgcaagacactggaagagactgagacctatcatgccaaactgaacgaggaccatctcttgcatgcccctgaatttataataaagccacgaagccacaccgtttgggaaaaagaaaacgtaaagctccactgctcaatcgctggatggccagaaccacgagtcacatggtacaaaaaccaagtgcccatcaatgttcacgccaatccgggtaagtacatcattgaaagcagatatgggatgcacaccttggaaatcaacggatgcgatttcgaagacactgcgcagtatcgcgcttctgcgatgaatgtgaagggagagttaagtgcatacgcatcagttgtggtaaagagatataaaggagaatttgacgaaacacgatttcacgcaggggcttcaactatgcctttatcatttggggtaaccccttacggctacgctagcagatttgagatccatttcgacgataaattcgacgtgtcttttgggcgtgaaggtgagacgatgtcactgggctgtcgggtggtgatcacaccagagataaagcactttcagcccgaaatacagtggtataggaacggagtgccactgagccctagcaaatgggtccagactttgtggagtggagagcgcgcaactctgacgtttagccaccttaacaaggaggatgagggtctatacacaatacgggtccgcatgggggaatattatgagcagtattccgcatatgtgttcgttcgcgatgcggacgcagaaattgagggggctccagccgctcctctcgacgtcaagtgccttgaagctaacaaggattatattatcatttcatggaagcagccagcggtcgatggaggctctccaatcttaggttattttattgacaagtgcgaggtcggaaccgacagttggagccagtgtaacgacactccagttaaatttgctcgcttcccagtaaccggcctcattgaggggcgatcatacattttccgcgtgagggccgttaacaaaatggggattgggttcccgtctcgggtttctgagccagtcgccgctctggatccggctgaaaaggccagacttaagtctaggccgagcgcaccgtggactggacagattatagttacagaggaagagcctagcgagggcattgttcctggccctccaaccgacctgtctgtgaccgaagctactcgctcctacgtagtgttgagctggaagccaccaggccagaggggtcacgagggcatcatgtacttcgtggagaaatgcgaggctggtaccgagaactggcaaagggtgaacaccgaactccctgtgaagagcccacgatttgcactcttcgaccttgccgaggggaaaagttattgcttccgggtccgatgtagcaattccgccggtgtgggggagcctagcgaggcgacagaagtgaccgtcgtgggagacaaactggacattccaaaagcccctgggaaaatcattccttccagaaacacggatacgtccgtagtggtgagttgggaggagtccaaagatgccaaggaactcgtggggtactacattgaggcatcagtcgcagggagcggtaaatgggagccctgtaataacaaccccgtaaaggggtctcgatttacatgtcacgggctcgttactggtcagtcctacatattccgcgtgagagccgtcaacgcggcagggctgtcagaatacagtcaggatagcgaggctatcgaggtgaaagccgctatcggtggtggggtgtctcccgacgtctgccctgcgctctccgacgaacctggcggtctcaccgcttccagaggccgagtgcacgaagctagtcccccaactttccaaaaagatgcactacttggatcaaagccgaacaagccttcattgcctagcagttcccagaacctgggacagacagaggtgtccaaggttagcgaaacggtccaggaagagctgacccctccacctcagaaagccgcaccccagggcaagtcaaaatctgaccctctgaagaaaaaaacggatagagcccctccaagtcccccatgcgatatcacatgtcttgaatcttttcgcgacagtatggtgctgggctggaaacagcccgacaaaataggcggagccgaaattacaggttattacgtaaactacagggaggttatagatggagtacccggaaaatggcgggaggccaacgtgaaagctgtctctgaggaagcctacaagatctcaaatctcaaagaaaatatggtgtaccagttccaggtggcagccatgaacatggcaggtctgggggctccatctgctgtgtccgaatgctttaagtgtgaggagtggactattgccgtgcccggtccaccacactccctgaagtgcagcgaggtgagaaaggattcgctcgttctgcagtggaaaccccctgtccacagcgggaggacccctgtcacaggttacttcgtcgatctgaaagaggcaaaggccaaagaggatcagtggcgcggactgaatgaagccgctatcaagaatgtatatcttaaggtgagggggcttaaagaaggcgtgtcttatgtcttccgagtgcgtgccatcaatcaggccggagtgggcaaaccttcggacctggccggacctgtggtcgccgaaactaggcccggtaccaaggaggtagtggtgaacgtggacgatgacggggtaatcagcctcaattttgaatgtgataagatgacaccaaaaagcgaattttcctggtccaaggattatgtcagtactgaggactccccaagacttgaggtagaatccaaagggaataagactaagatgaccttcaaagatctgggcatggatgacctgggaatttatagttgtgatgtcaccgacaccgatggtatcgcaagctcttacctcatagacgaggaggaattaaaacgattgctcgcactcagtcacgaacacaaattccccacagttccagtgaagtccgaacttgcagtagaaattttggaaaaaggtcaagtgcgattctggatgcaagccgaaaagctctccggaaatgcaaaggtgaattacatattcaatgaaaaggagattttcgaagggcctaagtataagatgcacatcgacagaaacactggcatcatagagatgtttatggaaaaactacaggatgaggacgagggaacctatacattccagttgcaggacggtaaggctaccaaccacagtactgtcgtgctggtgggagatgtcttcaagaaactgcaaaaggaagccgaattccaacggcaggagtggattaggaagcaggggccacacttcgtggagtatctatcctgggaagtaaccggcgagtgtaatgtgttgctgaagtgcaaggtcgccaacattaagaaagagacgcatatagtgtggtacaaagatgagagagaaatttcggtcgacgagaagcacgacttcaaagatggcatatgtacactgctcatcaccgagttttctaaaaaggatgcaggcatttacgaggtaatccttaaggatgacagggggaaggacaagtccagacttaagctcgtggatgaggcattcaaggaattgatgatggaagtgtgcaagaagatcgccctcagcgccaccgatctgaaaatccagagcactgctgaggggatacagctttactcttttgtgacttattacgtggaagacttgaaagtgaactggtctcataacggctccgcgatccgctattctgatcgtgtcaaaacaggcgttaccggtgaacagatatggctgcaaatcaatgagccaacacctaatgacaaggggaagtacgtgatggagctgtttgacgggaagacagggcatcagaaaactgtggatctgagcgggcaggcttacgatgaagcttacgcagagttccagcggttgaagcaggctgctatagccgaaaagaatagggccagagtcctcggtgggctgcctgacgtcgttactattcaggaaggtaaggccctgaatcttacgtgcaacgtatggggcgaccctccaccagaagtttcgtggctcaagaatgagaaagctctggcttctgatgaccattgcaatttgaagttcgaggccggacgcaccgcttacttcaccatcaacggcgtgagcactgcagactcgggcaaatacggcctggtggttaagaacaagtatggatccgagactagcgactttactgtatccgtgttcatacctgaagaagaagccagaatggctgcgctcgagtcgctcaaaggcggtaagaaagctaagta

SEQ ID NO: 28482 - DNA, 5876 bp, synthetic construct
  source 1..5876: mol_type = other DNA; note = Synthetic coding sequence
atggctgatcgcacggcaccacggtgccagctgcgcctggaatgggtgtacgggtacagggggcaccagtgcagaaataacctgtactataccgctggtaaagaagtcgtgtattttgttgctggggtgggtgtggtctataatacccgcgaacacagtcagaagttcttcctgggacataacgatgatataatcagtctcgcactgcatcccgacaagacgctcgtggctaccggccaggtcggcaaagagccgtatatttgcatttgggacagctacaatgtacagacggtcagcttactcaaggacgtgcacacgcacggcgtcgcttgtttggcctttgactccgacggacagcgccttgcatcagtgggtctagatgctaagaataccgtatgcatctgggattggaggaagggtaaactgctagcgtcagctactggacattctgacagaattttcgatattagctgggacccataccaacccaatagggtggtttcctgcggagtaaagcacatcaaattttggacactctgcggaaatgcccttacagccaagagaggcatctttggtaagacaggagacctccaaacaatcttatgtcttgcgtgcgcgaaggaggacattacttattcaggggcactgaacggcgatatctacgtatggaagggccttaacttagttcggaccattcagggcgctcacagcgcaggaatctttagtatgtacgcctgtgaagaaggattcgccaccggcggacgggatggttgcatccggctctgggacaccgactttaagcccatcaccaagatcgacctgcgcgagaccgagcagggttataaaggcctctctattcgcagcgtctgctggaaagctgacagactgcttgccggtacacaagacagtgaaatttttgaggtgatcgtgagggaacgcgacaagcccatgctgattctacagggacactgcgagggcgaactgtgggcattggccctccaccccaagaagccgctcgcagtcaccggatctgacgacagatctgtgcgactgtggtctttagccgatcacgctctaatcgctcgatgcaatatggaagaagctgtgcgatctgtagccttctcacctgacggttcccagttagccctgggcatgaaagacgggtcctttattgtgctgagagtgagggacatgaccgaggtcgttcatattaaagaccgaaaggaggtcatccacgaaatgaagttctctccagatggctcctatctggccgtggggtctaatgacggtccggtggatgtgtacgctgttgcacagagatataagaagataggcgaatgcagcaagtccctcagtttcatcactcatatcgattggagcctggactctaagtatctgcagacgaacgacggagccggtgaacggttgttttacagaatgccatccggcaagccgctgacaagcaaggaagaaatcaaagggattccatgggcatcttggacatgcgtgaagggcccagaagtgtctggaatctggcccaagtacactgaggtaacagatatcaactctgtcgacgccaattacaactcatctgtgctcgtttcaggtgatgattttgggctcgtgaagctctttaaatttccctgcctgaaaagaggcgcaaaattccgcaaatatgtgggtcacagtgcgcatgtaaccaatgtgcgatggtctcatgatttccagtgggttctgtccacaggaggagctgaccactctgtttttcagtggcgtttcataccagagggggtaagcaatggtatgttggaaacagccccacaagaaggaggggcagattcctatagcgaagagtccgactccgatctgagtgatgtacctgagcttgatagcgatatcgagcaggaggcccagattaactacgacagacaagtttataaagaggatctgcctcaactgaagcagcagagcaaggagaaaaaccacgccgtcccttttcttaaacgagaaaaggcacctgaggatagcctcaagctccagtttatccacggatatagaggatacgactgtcggaacaacctgttttacacccaggccggagaggtcgtgtatcacatagctgctgttgctgtggtttataatcgtcagcagcattcacagcgtttgtatctcggacacgacgatgatatcttgtcactaactatccacccagtaaaagactatgtggcaactggtcaagtgggtcgcgacgctgcaatccacgtgtgggacactcagacacttaagtgcctaagcctactgaagggacagcaccaaaggggagtctgcgccctggatttttctgctgatggcaaatgcttggtgagcgtgggattggacgatttccacagtatcgtgttctgggattggaagaagggggagaagattgccaccacgagaggacataaggataaaattttcgtggtgaagtgtaatcctcaccatgttgataaactggtgacagttggcattaaacacattaagttctggcagcaggccggaggtggctttacctcgaagcgcggtaccttcggaagcgttggcaaattggaaactatgatgtgcgttagttacggccgaatggaggatctggtcttctccggagccgcaaccggcgatattttcatatggaaggacatcctcctgctgaagaccgttaaagcccacgacggtcctgtgttcgcgatgtatgctcttgacaagggctttgtgaccggtggtaaggatggcattgttgagctgtgggacgacatgtttgaaagatgcctgaagacttatgctatcaaacggtctgccctgagcacctccagtaagggcctgctgctggaggataacccaagcatcagagctatcaccttgggccacggccatattcttgtgggcacaaaaaacggtgagattctcgaaatagataagtcggggccaatgacactcctcgtgcagggccacatggaaggggaggtttgggggcttgccgctcacccgcttctgccaatctgcgctacggttagcgacgacaaaacactccgcatatgggaactgtccgcccagcatcggatgctggccgtcaggaagctaaaaaagggcggtcggtgttgtgccttttcacccgacggtaaggcactggctgttgggcttaatgacggatctttcctggtcgtgaatgctgatactgtcgaagacatggtgagcttccaccacaggaaagagatgatctcagatattaaattcagcaaggatacgggcaagtacctcgctgtggcctcccatgacaattttgtggacatttacaacgtcctgactagcaagcgtgtggggatctgcaagggcgcttcaagctacatcacccatatagactgggatagtcggggaaagctactgcaagtgaatagcggagctagggagcaattgtttttcgaggctcctcggggtaagcgccacattatcagaccctctgaaattgagaagatcgagtgggacacctggacttgtgtactggggccaacctgtgagggtatttggccagcacattcagatattacggatgtgaacgccgcttcgctcacaaaggattgtagcctcctggccaccggagacgattttggcttcgttaagctgttttcctatcccgtgaaagggcagcatgcacgtttcaagaagtacgtgggtcactccgcccatgtgacaaatgtgaggtggctgcataacgattccgtgctcctgaccgtgggcggagcagatacggctctgatgatctggacaagggaattcgtcggcacacaggagagtaagcttgtggacagtgaagagagtgataccgacgtcgaggaggacggcggatacgactcagacgtcgctagagagaaagccatcgactataccaccaagatctacgccgtgtctatccgggagatggagggcactaaaccccatcaacaactcaaggaggtgtccgtcgaggaacggcctccagtatcccgcgcagcccctcagccggagaagttgcagaagaacaatatcacaaagaagaagaagctcgtggaagagctggcccttgaccacgtattcgggtataggggttttgattgtcgaaataacctacactacttaaacgacggcgcagacatcatttttcacactgcagcagccggtatcgtgcaaaatctgtctactggcagtcaaagtttctatctggagcatacagatgacattttgtgtctgacagtgaatcagcaccccaagtacagaaacgttgtcgccacttctcaaatcggtactacaccttctatccatatatgggacgctatgaccaagcacacgctgtccatgcttcgttgtttccattccaagggtgtaaactacatcaacttcagtgccactggcaagctgctggtaagtgtgggggtggatccggaacataccattaccgtgtggagatggcaagagggcgcaaaggttgctagcaggggcggacacctagagagaatctttgttgtggaatttaggcccgactccgacactcagtttgtctctgtcggtgtgaaacatatgaagttttggaccctggctggcagcgctttgctctataagaagggagtaatagggtctctgggcgctgcaaaaatgcaaacgatgctttctgtggccttcggggctaacaacctgacatttaccggagccatcaacggggatgtgtatgtgtggaaagaccatttcttaatccggcttgtggcaaaagcccatacaggcccagtcttcaccatgtacactaccctcagagacggccttattgtgactggagggaaggaacgccctactaaggagggaggagcagtgaagctctgggatcaggaaatgaaacggtgccgtgccttccagctagagaccggtcaactggtggagtgcgtacggtctgtgtgtcgtgggaaaggaaagatcctggtggggaccaaagatggtgaaattatcgaggtgggcgagaagaatgcagcctctaatatcttaatcgatgggcatatggagggagagatctggggcctcgctacccacccctccaaggatctattcatctcagcatcaaatgacgggactgctagaatctgggacctcgccgataagaaattgttgaataaggtctccctcggccacgctgctcgttgtgccgcttactcccctgacggggagatggtcgcaatcggcatgaagaacggagagttcgtcatcctcctcgtgaattcactgaaggtatgggggaaaaagagagataggaagtcagcaatacaggatattagaatttcgccagataacaggtttctggccgtgggaagctctgagcatactgtcgacttctatgatctaacacaggggaccaatctgaataggatcggatactgcaaggacattccctcttttgtcattcaaatggactttagtgctgatgggaaatatattcaagtgagcaccggtgcctataagcgccaagtacacgaagtaccactaggcaagcaagtgaccgaggctgttgtcatcgagaaaataacttgggcatcatggacatcggttctgggggatgaagtgataggcatatggcccagaaatgctgacaaagcagatgtgaactgtgcctgtgtaacccatgctgggttaaacatcgtcactggcgatgatttcggactggtgaagctgtttgattttccgtgtaccgagaagttcgccaagcacaagagatatttcggccactccgctcacgtgacaaacatccgattcagttacgacgacaaatatgtagtgagcacaggcggagacgactgttctgtctttgtttggcgatgtttata

SEQ ID NO: 28483 - DNA, 630 bp, synthetic construct
  source 1..630: mol_type = other DNA; note = Synthetic coding sequence
atgaatcccagtatgaaacagaagcaggaggagatcaaggagaatatcaaaaactcttcagtgccaaggcgcaccctgaagatgatccagccgtctgcctctgggtctctggtgggcagagagaatgagctgtcagcgggactttcaaagcggaaacatcggaacgaccacctgacctctacaacatcttcacccggtgttatagtgcccgagtccagcgagaataaaaatctggggggagtgacccaggaatcttttgacctaatgataaaagagaaccccagctcacaatattggaaagaagtggccgagaagaggcgcaaggccctctacgaagccttgaaagagaatgaaaaactccacaaagaaatcgaacagaaggataatgaaattgcaaggctgaagaaggagaataaggaactggcggaggtagcagagcatgtccagtacatggccgagcttatcgaacgactcaatggcgaaccgctcgataattttgaaagtctggacaatcaggagtttgactcagaagaggagaccgtggaggattcattggttgaagacagtgagattgggacctgcgccgagggaaccgtgtcttcaagtactgacgcaaagccctgcatttag

SEQ ID NO: 28484 - DNA, 1635 bp, synthetic construct
  source 1..1635: mol_type = other DNA; note = Synthetic coding sequence
atgaacacttcaatcccttaccagcaaaatccctacaatccccgtggatctagtaacgtgattcagtgttaccgctgtggtgacacatgcaaaggtgaagtcgtacgtgttcataataaccacttccatatcaggtgctttacctgtcaggtttgcgggtgtgggttggcacaaagcggctttttttttaaaaatcaggaatacatatgtacacaggactaccagcagctgtatggcacacgctgcgatagctgcagagattttattacaggagaagtcatcagtgccctggggaggacttaccacccgaaatgtttcgtgtgtagtctctgcaggaagccgttcccaatcggggacaaagttacattcagtgggaaagagtgcgtatgtcagacctgctctcagtcgatggcgagctctaaaccaattaaaatcagaggcccatcgcactgcgcaggctgcaaagaggagataaagcatggccaaagtctcctggccctcgataagcaatggcatgtgtcctgctttaagtgccaaacgtgcagcgtcattcttactggcgaatacatctctaaagacggcgtgccatactgtgagtccgactaccacgctcagtttgggattaaatgcgaaacctgcgatagatatatttctggaagagtgttggaagcagggggtaaacattatcaccccacttgcgccagatgtgtgaggtgtcaccaaatgttcaccgaaggggaagaaatgtacctgaccgggtccgaggtctggcatcctatttgtaaacaggctgctcgagccgagaaaaagcttaagcaccggaggactagcgagacttcaatcagcccgcctggttcttccatcggttctcctaatcgcgtaatctgcgatatatatgagaatttagatctgcgacagcgcagagcctccagtcccggatatattgactctccaacatactcccgacagggtatgtcaccaactttttctcgaagtcctcaccattattatcgatccggtgatctttcgaccgcgaccaagagcaagactagcgaggatatatcccagacgtctaaatacagccccatctacagtccagacccatactacgccagtgagtctgagtactggacataccatggttcccctaaggtgcccagagctaggcgctttagcagcggtggagaagaagacgactttgatcggtctatgcacaaactccaaagtgggatcggaaggctgattctaaaggaagaaatgaaggcacgaagtagctcatatgccgacccttggacccccccacgttcaagtacatcctctcgcgaagcccttcacacggcaggatacgagatgagcctaaatgggtctccgagatcccactatctggccgacagtgatcctttgatctccaaaagcgcttctctgccagcatatcgcagaaacggccttcatcgcaccccgagtgcggatctttttcactatgattccatgaacgctgtaaattggggaatgagagaatacaagatctatccttatgaattgctccttgttacaaccagaggcagaaaccggctgcctaaggatgtcgacagaacaaggctggagggaaatttctggaaatctggatgtctgtag

SEQ ID NO: 28485 - DNA, 840 bp, synthetic construct
  source 1..840: mol_type = other DNA; note = Synthetic coding sequence
atgacgccttccgagggcgcacgcgcagggactggcagagaattggaaatgctggattccttgctggccctggggggacttgtgctgttgagggattccgtcgagtgggagggtcgcagcctgctgaaggctctggtgaaaaagagtgcactttgcggggaacaggtgcacatcctgggatgcgaagtgagcgaggaggaatttagggagggattcgactcggatatcaacaaccgactggtgtaccacgacttcttccgcgatccacttaactggtcgaaaactgaagaggcattcccaggaggcccactcggagcacttcgtgccatgtgtaaaaggactgacccagttcctgttacgatcgctctcgattccctgtcttggctgcttctgcgcctgccttgcacaacactgtgccaggttctccacgccgtgtcgcaccaagactcatgccccggagattcttcctctgttggcaaggtttcggtgctcggactcctccatgaggagcttcacggccctggacccgtcggcgctcttagctccctggcacagacagaagtgacactgggcggtacaatgggccaggctagtgcacatattctttgccgcagacctcgccagcgccctacagatcagacccagtggttctccatcctccccgatttttccctcgatcttcaagaagggccaagcgtggaatcccagccgtatagtgatccacatataccacccgttagtaaaaacgctaaagcgaggacaagaaagtgcagcttagtttcaggccatggaagggagaacaagtcttgtcggggatgggggtggggtcagggcttttag

SEQ ID NO: 28486 - DNA, 405 bp, synthetic construct
  source 1..405: mol_type = other DNA; note = Synthetic coding sequence
atgtccgagaatgcagccccaggtctttgcggggagctcttgctgcaaagagggaccacaaaggtggctaccggtctggttctaaacagggaccaacgcctagcatgggcggaaaacagcatcgacttcattagccgggagctgtgtgcacactcaattcgcaagctgcaagcgcacgttctactgattaaggctgtacatggatacttcgactcccggcaaaattatagtgagaaagagtctctaagcttcatgatcgataccatgaagtccacgctcaaggagcaatttcagtttgtcgaagttccaggcaatcactgcgtgcacatgtccgagcctcaacacgtcgcatccatcatttcttctttcctgcagtgtacacacatgctgcctgctcaactgtag

SEQ ID NO: 28487 - DNA, 1350 bp, synthetic construct
  source 1..1350: mol_type = other DNA; note = Synthetic coding sequence
atgatgctgggcaccgaaggcggagaaggattcgtggtgaaggtccggggattgccatggagctgttcagccgacgaggtccaacgttttttttctgactgcaagatccaaaacggagcccagggaatccgcttcatctacacgcgggagggtcggccttccggcgaggctttcgttgaactggaaagtgaggacgaggtgaagctggctctcaaaaaggatagagagaccatggggcacaggtatgttgaggtgttcaaatccaacaacgtcgaaatggattgggtcctgaaacacactgggccaaactcgcctgacaccgcgaatgacgggtttgtgcgcctaaggggcctgccctttggatgctcaaaggaggaaattgttcagtttttctcaggcctggagatcgttcctaacgggattaccttaccagtggatttccagggcagatccacaggcgaggccttcgtccaattcgcctctcaagaaatagcggagaaagccctgaagaaacacaaggagcggatcggtcacaggtatatagagatctttaagagctcaagagccgaagtgcgcacacattatgatccacccaggaaattgatggcaatgcagcgacctggtccctatgatcggccaggggcaggcagaggctacaattcaataggcagaggggctggctttgaaagaatgcgccgtggagcctacggtggcggttatggtggctatgatgactacaacgggtataacgacggatacgggttcggtagcgacaggttcggcagagatttgaattattgtttctccggaatgagtgatcaccgctacggagacggcggatctactttccagagcacgacagggcattgtgtccatatgcgaggcctgccatacagagctaccgagaacgacatttataactttttcagccctctgaaccctgttagggtccatatcgagattggacctgatggaagagtcactggggaagctgatgtggaattcgctacccacgaagatgcagtggcggcaatgagtaaggacaaagcaaacatgcaacataggtacgttgagctgtttctgaattcaaccgctggcgcatcgggtggggcatacgagcaccggtatgtagagttatttctgaactcaaccgccggagcatctgggggtgcttacgggtctcagatgatgggagggatggggctgtcaaatcagtcttcctacggaggcccagcaagccaacaactgagtgggggatacggcggaggctacggtggccaatcttctatgtcagggtacgaccaggttctccaggaaaatagttcggatttccaaagcaatatcgcctag

SEQ ID NO: 28488 - DNA, 4077 bp, synthetic construct
  source 1..4077: mol_type = other DNA; note = Synthetic coding sequence
atgggcaaccagctggcaggtatcgctcctagccaaatcctcagcgttgagtcatatttcagtgatattcacgatttcgaatatgacaagtccctgggcagcacacggtttttcaaggtagccagagctaaacatcgagagggactggtcgtggtgaaggtttttgccatccaagatccaaccctgcctctgacatcttataagcaagagcttgaggaattaaagattagactaaattccgcccaaaattgcctgccatttcaaaaagcttctgaaaaggccagcgaaaaggcagcaatgctgttcagacagtacgtgcgggacaacctgtacgaccgcataagcacgcggccattcctgaacaatatagagaagcgatggatagctttccaaattctgaccgctgtcgaccaagctcataaatctggagtgcgccacggcgacattaaaaccgagaatgtgatggtgactagttggaattgggtcctgctgactgactttgcctcattcaagcccacttacctgccggaggataaccctgctgattttaactatttctttgacacctcgcgcagaagaacctgttacatagcccctgagcgctttgtggatggaggaatgtttgccacagagctcgagtacatgcgggatccttcaacaccgctagtcgatctgaatagcaaccagcgcactcgcggtgaactgaaacgggctatggatatcttctctgctggctgcgtgatcgccgaactgttcacggaaggggtgccactgttcgatttatcacaattacttgcttatagaaatgggcacttcttccccgagcaggtgttaaacaaaatcgaggaccacagcattagagagttggttacgcaaatgatccaccgggaacccgacaagagactcgaggccgaggattatcttaaacaacagagaggaaatgcctttccagagatattctacacctttctgcagccttacatggcccaattcgctaaggagaccttcttatctgccgacgaacgaatattggtgattcgcaaggacctggggaacatcattcacaacctatgtgggcacgacctgcctgaaaaagccgaaggtgaaccaaaagagaacggtttggttatattagtgtccgtgattacttcctgcctgcagacattgaagtactgcgattcaaagctcgccgcactggagctcattttacacctggccccacgcctaagtgtggagattctgttagacaggataacaccttacctgcttcatttcagtaatgactcagttccacgcgtgcgggctgaggcactgagaaccctgaccaaggtgttggccttagtgaaagaagttcctcgcaacgacattaacatatatcctgagtatatcttgcctgggattgcacatctggctcaggatgatgcaacaattgtccgcctggcctatgcagagaatatcgctctgctggccgagacggcgctcaggttcctggagcttgtccagctcaagaacctgaatatggaaaatgacccaaacaacgaggagatagatgaagtaacacatcccaatggaaattatgacaccgagcttcaggcccttcacgagatggtccagcagaaggtagtgacactcttatcggaccctgaaaacattgttaaacagacactgatggaaaacggaatcacacgtttatgcgtttttttcggtagacagaaagccaatgacgtccttctgtctcacatgatcaccttcctaaatgataaaaatgattggcatctcaggggagcatttttcgactcaatagtcggcgtcgctgcatacgttggatggcagagcagctctatactgaagccgttgttgcagcaaggtttatccgacgccgaagagttcgtgatcgtaaaggccttatacgccttgacatgtatgtgccagttgggtttgctgcagaagccacatgtgtatgagttcgctagtgatatcgcgccattcttgtgtcacccaaacctatggatcagatacggcgcagtgggcttcattacagtggttgccagacagattagtacagcggacgtctattgcaagctaatgccctatctcgatccctacattactcagcctataatccagattgagcgcaagcttgtgctactgtctgttctgaaggaaccagtgtcccgcagtatctttgactacgccttgcgatcaaaagacattacgtccctgttccggcatctgcacatgagacagaagaagcgtaacggcagtctccccgactgcccccctcccgaggatccagccatcgcgcagctgctgaagaaattgctctctcaaggaatgaccgaagaggaggaggacaaattactcgccttgaaagatttcatgatgaagtctaacaaagctaaggcgaatatcgtcgatcagtcccacctccatgactcttctcagaaaggggttattgacctcgccgcactgggcatcaccgggcgtcaagtggatctggtgaaaaccaagcaggagcccgacgataagcgggctcgtaaacacgtgaagcaggactctaacgtaaatgaggaatggaagtccatgttcgggagcttagaccctccaaatatgccccaggcccttcctaaaggatccgaccaggaggttatacaaaccgggaagcctcccagaagcgaaagttccgcaggcatttgcgtgcctctaagcactagctcacaagtgccagaggtgactaccgtgcaaaacaagaaacctgtaatcccagtgctgtcgagcaccattctgccctccacctatcagatcaggatcaccacctgtaaaacagagctacagcagctgatacagcagaaacgggagcagtgtaacgccgagcgcatcgcaaaacaaatgatggaaaatgcggaatgggagtctaagccaccaccccctggttggcggcctaaggggcttctcgtcgcccacctccatgaacataaatcggcagttaatcggatccgagtgagtgacgagcattctctgtttgcaacctgctcaaatgatggcactgtcaagatctggaactctcagaaaatggaggggaaaaccacgactacccgcagcattttgacctacagtagaataggcggaagggtaaaaacccttacattctgtcagggctcacattacttggcgattgctagtgataacggtgccgtgcagttgcttgggattgaagcctctaagcttcccaaatctcccaaaattcacccattacaatctagaattctggatcagaaagaggacgggtgtgtggtcgatatgcaccattttaactctggtgcccagagtgttctcgcctacgctacggttaacggctccttagtaggatgggacttacgatctagctccaatgcatggacactgaagcacgatctcaagtctgggctcattacctcattcgccgtggatatacaccagtgctggctgtgcatcggtacctcatccggcaccatggcctgttgggacatgcgatttcagttgccaatttcgtcccactgccatccatcccgcgctaggatacgtaggctgtccatgcatcccctgtaccagagctgggtgatcgctgcagtgcaagggaataacgaagtctctatgtgggatatggaaaccggagaccgaagattcaccctatgggcctccagcgcacctcccttatctgaattgcaaccaagtcctcattcagtgcacggaatctattgctcacctgccgacggtaatcctatactgctcactgctggctctgatatgaagatccggttctgggatctggcatacccggaacgctcctacgtcgtcgccggaagcacgtcttccccgtcagttagttactatcgaaaaatcatagagggtacggaggtcgtgcaggagatccagaacaaacagaaagtgggacccagcgacgatacgcctaggcggggacctgaaagcctgcctgtgggccatcacgatattatcaccgatgtggctacattccagaccacacaggggttcatcgtgacggcctctcgagacggtatagtaaaggtctggaagtag

SEQ ID NO: 28489 - DNA, 993 bp, synthetic construct
  source 1..993: mol_type = other DNA; note = Synthetic coding sequence
atgcccgttgtgacaaccgatgccgaatcagagacggggatccctaaaagtttgtcaaacgagcccccatccgaaaccatggaagagatagagcacacctgcccacagccacggctcactctcacagcccctgctccttttgcagacgagactaactgtcaatgtcaggcgcctcacgagaaattgacaattgcacaggccaggctgggcacgccggctgataggccagtcagagtgtacgccgatggtatcttcgacctgtttcatagtggacatgctcgggctctgatgcaggccaaaacactgtttcctaactcctatctattggtcggggtctgttcagatgatctgacacacaaatttaaagggttcacagtgatgaatgaggcagaacggtacgaggccttgcgccattgcagatacgtcgacgaggttataagggacgccccttggacactgactccagaatttctggagaagcacaaaatagattttgtggcacacgacgacatcccatactcttcggccggatctgatgacgtgtataaacatataaaggaggcaggaatgttcgtgcctacccagcggacagaggggatctcaacctcagatattattactaggattgtgagagactacgacgtgtacgctcgcagaaatctccaacgcggatacacggcgaaggaattgaacgtgtcttttattaacgaaaaacgttataggttccagaaccaagttgataagatgaaagaaaaggttaagaacgtagaggagaggtccaaggaattcgttaacagggtggaggagaaatcccacgacctgatccagaaatgggaggaaaaatcgcgtgagtttatcgggaacttcttggagttgtttggtcccgacggcgcatggaaacaaatgttccaggaacgaagctcacggatgttacaggctctgtcaccaaaacagtctcctcttaaatcatgggctaggtgcagggatttctag

SEQ ID NO: 28490 - DNA, 2025 bp, synthetic construct
  source 1..2025: mol_type = other DNA; note = Synthetic coding sequence
atgcagacatcgagttcaaggtctgttcatctgagcgaatggcaaaaaaactacttcgccattacctctgggatttgtacgggccctaaggctgatgcttaccgtgctcaaatcctccggatacagtatgcatgggcaaattccgagatctcacaggtgtgtgctaccaagctcttcaagaagtatgccgagaaatattcggccatcattgattcagataacgttgagagcggactcaacaactatgccgagaatattctgactctcgctggcagccaacagaccgactctgataagtggcagtccggactatccattaacaatgtgtttaagatgtcatccgtgcagaagatgatgcaggccggaaagaagtttaaggacagcttacttgaaccagcactggccagtgtggtgatccacaaggaagcaaccgttttcgatttacctaaattctcggtgtgtggctctagccaagagtccgattcactgcctaattccgcccacgacagggaccgcacgcaggattttcccgagtccaatagactaaagctgctgcagaatgcacagcctcccatggtcaccaataccgcccgaacctgccccaccttcagcgcaccagtgggcgagagtgcgacggcaaaatttcacgtgacacccctctttggcaatgtaaagaaggagaaccattcgtctgctaaggaaaatatcggactgaacgtgttcctaagcaatcaaagctgctttcccgctgcttgcgagaatccccagagaaaaagtttttacgggtctgggaccattgatgccttaagtaatccgatcctgaacaaggcctgttctaagactgaggacaatgggcctaaagaagacagtagcctgccaacgttcaagacagcaaaagagcaactgtgggtggatcagcagaaaaagtatcaccagccacagcgagctagcggaagctcctatggaggggttaagaagtctttgggcgcttcccgaagcaggggaattctggggaaattcgttccacccattccaaagcaagatggcggagagcagaacggcggaatgcaatgtaaaccctacggcgctgggccaacagagcccgctcaccctgtggatgagagattgaaaaaccttgagccaaaaatgatcgaactcatcatgaacgaaatcatggaccacggccctccagtgaattgggaagatatagccggagttgaatttgcaaaagccactatcaaggagatcgttgtttggccgatgcttcgcccagatatctttactggcttgagaggacctcccaaggggatcctcctgtttggcccacctgggacaggaaagacactgatcggcaaatgtattgctagtcagtcaggagctacatttttttcaatttccgcatcttccctgacttctaagtgggtcggggagggagaaaaaatggtgagggctctatttgcagtggcacgatgtcagcagccagctgtgatctttatcgatgaaatcgactcactactctcccagcggggtgatggggaacacgagtcgtccagaaggattaagaccgaattcctcgtgcagctcgatggtgcaacgacatcctccgaagacaggatactcgtggtcggcgcaacaaacaggcctcaagagatcgacgaagcggcacggagacgcctggtgaagaggctctatatcccgctgcccgaagcctctgctcgcaagcaaattgttattaacctcatgagtaaggagcaatgctgtctgtctgaagaggaaatcgagcagatcgtgcagcaaagcgacgccttcagtggagccgacatgacccaactgtgccgggaggcaagcctgggccctattcgaagcctccaaactgccgacattgcaaccatcacacccgaccaggtccgacctatcgcctacatcgacttcgagaatgcttttagaaccgtcagacccagtgtcagccctaaagacttggagctctatgagaactggaacaagaccttcgggtgtggcaagtag

SEQ ID NO: 28491 - DNA, 1143 bp, synthetic construct
  source 1..1143: mol_type = other DNA; note = Synthetic coding sequence
atgctccgccgtaaaccctccaatgcttctgaaaaagaaccaacccagaaaaagaagctgtctctgcagcgctctagctcctttaaggattttgctaagtcaaaaccatctagccccgttgtgtcagagaaggaattcaatcttgacgacaacattccggaggacgacagtggagtgcccactccagaggatgcaggtaagtctggtaaaaagctagggaagaaatggagggcggtcatcagcaggactatgaaccggaagatggggaagatgatggtgaaagcccttagcgaggaaatggccgatacactcgaagaaggtagtgcttctccaacatctcctgactacagcctggatagcccagggccagaaaaaatggctctcgcttttagcgagcaagaagaacatgaactgcccgtgctgtcccgacaagcgtcaaccggaagcgaactgtgtagccccagccccggtagtggaagcttcggggaagagcccccagccccacagtacaccggacctttctgcggtcgggcaagagtgcacacagattttacaccgtcaccctacgaccacgattctctgaaactccagaagggcgatgttatccagattattgaaaaacccccagtgggtacctggctcgggctgctgaacggtaaggtggggagttttaagttcatctatgtggatgtgctgccagaagaggccgtcggccatgctaggccctcccgccgacagtccaaagggaaaaggccaaaaccaaagacccttcacgaacttttggagcggatcggcctggaggaacatacctctaccctgctgctgaatgggtaccagacactggaagacttcaaagagctccgggaaactcacctcaacgagctgaacatcatggacccgcaacacagagccaagctactgacggcggctgagctgttactggactatgataccggttctgaggaggccgaggagggcgcagaatcttcccaagaacccgtggctcacaccgtgtcagagcctaaagtggacataccaagagacagtgggtgctttgaaggatccgagagcgggagagacgatgccgagctggctggcactgaggaacaactgcagggactttccctggccggagctccctag

SEQ ID NO: 28492 - DNA, 1692 bp, synthetic construct
  source 1..1692: mol_type = other DNA; note = Synthetic coding sequence
atgaacccattatttggccctaacctctttctcctgcagcaggagcagcaggggctggccggacctctgggcgactccctgggaggtgaccacttcgcaggagggggagatctgccacctgcccctctgtctccagccggaccagccgcttactcacctcccggacctgggcctgctccaccagcagccatggcgctgaggaatgacctggggtctaacattaacgtgctgaaaaccctgaatctcagatttaggtgtttcctggcgaaggtccacgagctcgagaggaggaaccgcctgctggagaaacagctgcagcaggccttagaggaaggcaagcaagggcgacggggacttggacgcagggatcaggcagtacagacaggattcgtcagccccataagacccctgggtctgcagctgggagctcggccagcagcggtgtgctcaccttccgctagggtgctgggatctcccgctcggagtccagctgggccactggcgccttccgccgcatcactgtctagctcctccacctcaactagcaccacatactcctcctcagccaggttcatgcccggaacgatttggagctttagccacgcccgacgcctgggtccagggttggagcccacactggtgcaaggcccagggctttcatgggtgcatcctgacggagtcggtgtgcagatcgacaccatcacaccagagatccgggctctctataatgtcttggcaaaggtgaaacgagagcgggacgaatacaaaagaagatgggaagaggagtatacagtgaggattcaactgcaagatagagttaatgaactgcaagaagaagctcaggaggctgatgcgtgccaagaagagcttgccctcaaggtagagcagcttaaggcggagctagtggtgtttaaaggcctcatgtctaataatctgtcagagctagacactaagatccaggaaaaagctatgaaggttgacatggatatatgtcgaaggatagacattaccgctaaactgtgtgatgtggcccagcagcgtaactgcgaggacatgattcagatgtttcagaagaaattagtgccttccatggggggacgtaaaagggaaagaaaagccgcagttgaagaggataccagtctctcagagtccgaaggccctaggcaacctgacggagacgaggaagaatccaccgcgttgtccatcaatgaggagatgcaacgcatgttaaaccagctccgggagtacgactttgaggatgattgcgatagtcttacctgggaagagaccgaggagaccttgttgctatgggaggatttttctggatatgctatggctgctgccgaagcccaaggtgagcaacaggaggactccctggagaaggtgattaaggacacagagtccctttttaaaacacgcgaaaaggaatatcaggaaaccattgaccagattgagctggaattggccacggccaagaatgatatgaacagacacctacatgagtatatggagatgtgttcaatgaagcgcggtcttgacgttcaaatggaaacctgccgccgacttattacacagtcaggggaccggaaatctcccgctttcactgccgtcccactgtcagatcccccaccacctccatctgaggccgaggattcggatcgtgatgtcagcagcgattccagcatgcgctag

SEQ ID NO: 28493 - DNA, 1893 bp, synthetic construct
  source 1..1893: mol_type = other DNA; note = Synthetic coding sequence
atgctatttctcgcaattccccagagcatagacgaggagacagaggtatggagtgatcacattatctttcccaggattccgagagggcctgtgcagcagcctctcgaagaccggatctttacgccagctgtgtctgcagtgtactccactgtaactcaagttgccaggcagcccggaacacccacaccatcaccctactcagcacacgaaataaataaaggtcaccctaacctcgcagccacaccccctggccacgcgtcgagccccggtctatcgcaaaccccttatccaagcggccagaacgcagggcctactaccctggtgtacccacagactccacaaacaatgaattctcaaccacaaacccggagtcctttcgccgctgggcctcggccaccccaccaccaattcttccagcggccacagatacaacctccccgagctacgatacccaacagttcccctagcatccggcctggggctcagacaccgacggctgtttatcaggccaaccagcacatcatgatggtgaatcatctaccgatgccctacccggttccacagggtccccagtattgcattccccaataccggcacagtggcccaccttacgttgggccacctcagcagtatccggtccagcctcccggacctggcccattttatcccggacccggtcctggagacttccctaacgcttacggaactccgttttacccttctcaacccgtgtaccagtccgcacctatcatcgtgccgactcaacagcagcctcccccagccaaacgcgaaaaaaaaacaattaggatcagggatcctaatcagggcggaaaagatataactgaggagattatgtccggcggaggaagtcggaacccaacaccgccaatcgggaggccaacaagcacacctacccccccacaacaactaccatctcaggtgccagagcatagccctgtggtctatggcaccgtcgaaagcgctcatttagctgctagcacgccagtgaccgcagctagtgatcagaagcaagaagaaaaaccaaaaccagatccagtgctgaaaagtccaagccctgtcctcagactcgtgctgagtggcgagaagaaagagcaggaaggtcaaacttccgaaactacagcgatagtgtctatagccgaactaccactgcccccttcaccgaccaccgtaagttcagtggcccgaagcaccattgcggcaccaacctcatccgctctctcctcccagccaatatttaccacagctattgatgaccgttgtgagctgagtagccccagagaggacacaatcccaattccaagtttaacaagctgcactgaaactagcgatcctttaccgacgaacgagaatgatgacgatatatgcaaaaagccttgctcagtagctcctaacgacatccctctggtgtcgtcgaccaatttgatcaatgagattaacggtgtgtcggaaaaattaagcgcgactgaaagcatcgtggagatagtaaagcaggaggtactccctctcaccctggaactggaaatcctagaaaacccccctgaggagatgaagctggaatgtattccagcaccaattacacccagcacagtgccgagtttccccccaactcctcccactcctccagctagtcccccacataccccagtgatcgttcccgcagccgctactacagtgtcgagcccctcagccgcaattaccgtgcaaagggtgttggaagaggatgaatccattcgaacctgtctgagcgaggacgccaaggagatccagaataagatcgaagtggaagccgacggccagaccgaggagatcctggattcgcagaacctgaacagccggagatcacccgttcctgaaacttctaatgaatgctag

SEQ ID NO: 28494 - DNA, 414 bp, synthetic construct
  source 1..414: mol_type = other DNA; note = Synthetic coding sequence
atgatcttaccaaccaaagccatggctacgcaggaactgacagtgaaacggaagctgtccggtaacaccctccaggtgcaggcaagctctcctgtggccctgggtgtgcggatcccaacagtggccttacatatgatggagctgtttgacactacagtggaacaactttactcgatctttaccgtaaaggaactaacgaacaaaaagatcatcatgaagtggaggtgcggaaactggccagaagagcactacgccatggtggctctgaattttgttcccactctggggcaaacagaattacagctcaaggaattcctctctatttgtaaggaggaaaacatgaaattctgctggcagaaacagcattttgaagagataaaaggttctctgcaactcactcccctgaatggctag

SEQ ID NO: 28495 - DNA, 1248 bp, synthetic construct
  source 1..1248: mol_type = other DNA; note = Synthetic coding sequence
atgatgctggggcctgaaggtggagagggattcgtcgtgaagctgcgcggacttccatggagttgcagcgttgaagacgtacagaacttcctgtctgactgcaccatccatgacggcgcagctggagtgcactttatttacacccgagagggtaggcaatctggtgaagcattcgtagaacttggtagcgaggatgacgtcaagatggcccttaagaaagatagggagagcatgggccaccgttacattgaagtgtttaagagccaccggacagaaatggattgggttctaaagcattctggcccaaacagcgcagattcagcaaacgacggttttgtccgactgcggggactaccgtttggctgtacaaaggaagagatcgttcaattcttcagcggattggagattgtgcccaacggcatcaccttgccagttgaccctgaggggaagataaccggggaggcatttgtccagtttgccagtcaggaactcgctgagaaggccctcggcaagcacaaggagcgcatcggacatagatatatcgaggtgtttaaatccagccaggaagaagtacggtcgtactccgatcctccgctcaagttcatgtctgtccaaagacccggaccctatgaccgccctggtactgcacggaggtacataggcatcgttaagcaggccggactggaacggatgcggcctggggcttattccaccggatacggcggttacgaagaatatagcggcctgagcgatggctacggttttacaaccgaccttttcggcagggacctatcctactgtttgtcaggcatgtatgaccatcgatatggcgattcggaatttacagtacagtctactacggggcattgcgtgcatatgaggggattaccatacaaggcaacggaaaatgatatttacaacttcttttcccccctgaaccccgtgcgagttcatattgagattggtccggacggacgggtaacgggtgaggctgatgtggaattcgctacacatgaggaggcagtggccgctatgagcaaggaccgagctaatatgcagcaccggtacatcgaactgttcctgaatagcactacaggggcaagcaatggagcctatagtagtcaggtgatgcagggcatgggggtgtccgcagcccaggctacctattctggtctcgaaagccagtctgtgagtggttgctacggggcagggtactcagggcagaactctatgggaggttacgattag

SEQ ID NO: 28496 - DNA, 1464 bp, synthetic construct
  source 1..1464: mol_type = other DNA; note = Synthetic coding sequence
atgtcttcaccccttgccagcttatcaaagacccgcaaagtgccgctcccgtccgaacccatgaaccccggtagacgcggaattcggatttacggcgatgtcccagcttcccacgactctgagctcatggccttcatgactcgaaagctatgggacctcgagcaacaggtgaaggctcaaacagacgagattctctccaaagatcagaaaatcgcagcgctggaagacctggtgcagaccttgcgtcctcatcccgctgaagcgaccctgcagagacaggaggaactggagacgatgtgcgtgcaactgcagagacaggtccgggagatggagcgatttctctcagactatgggctgcagtgggtgggagaacctatggatcaggaggattccgaatcaaagaccgttagtgaacacggagagcgcgactggatgaccgccaagaagttttggaagccaggagattctctagcaccacctgaggtggactttgacaggctccttgcctcactgcaagatctcagcgagcttgtagtcgagggagatacccaggttacccccgtgccaggcggagctcgacttcgcacattggagccgatccccctgaaactctatagaaatggcatcatgatgtttgacgggccttttcaaccgttctacgatcctagtacacagcggtgcctccgtgacattctggacgggttcttcccctcagaacttcagcgtctttacccaaacggagttccattcaaagtgtccgacctgagaaaccaggtttatctggaggacggactggatccttttcctggtgaagggcgtgttgtgggtagacaattgatgcacaaagcccttgatcgggtcgaggagcatcctggatcccgcatgactgcagagaagttccttaatcggttgcccaagttcgtaattcgacagggtgaagtaattgacataaggggccctatcagagacacattgcaaaactgctgtcctctgccagccaggattcaagagattgttgttgaaactcccaccctcgcagccgaacgggagagatcgcaggagtcacccaacacaccagccccaccactttctatgctgaggatcaagagcgagaacggagagcaggcattcctgctgatgatgcagcccgacaatacaattggggatgtgagagccttgctcgctcaggcacgtgttatggacgcctcagcctttgagatcttttcaacatttcccccaactctgtatcaggatgatactctgacccttcaggccgcaggtttggtaccaaaagccgctcttctgctccgcgcaaggcgcgctccaaaaagtagcctgaagttctctcctggcccttgccccggacctggtccgggaccctccccagggccaggacccggaccaagtcctgggccaggcccaggccctagcccatgcccgggaccgagcccatctccacagtag

SEQ ID NO: 28497 - DNA, 1467 bp, synthetic construct
  source 1..1467: mol_type = other DNA; note = Synthetic coding sequence
atgtctgccttctgtctgggcctggtcgggcgtgcttccgccccagcagagcctgatagcgcttgctgcatggaactgcccgctgccgctggcgacgccgttcggtccccggcagctgctgccgctctgatattccctgggggatcaggcgagctggaactggctctggaggaggagctggcccttctggctgcaggagagaggccatcagaccctggggaacacccccaagccgagctcctgagtgtcattaggcagaaagagaaagatcttgtattggctgcacgtctgggcaaggctctgttagaaagaaaccaggacatgagtagacagtacgagcagatgcataaggaattgacagataaactagaacaccttgagcaggagaaacatgagctgcgacgtagattcgaaaatcgtgagggagagtgggaaggtcgcgtgagcgaactcgagagcgacgtcaaacaattgcaagatgagcttgagagacagcagatacacctcagagaggctgacagggaaaagtctagagcagttcaggagctgtctgaacagaaccagcgcctattggatcaactgtcgcgggcatctgaggttgaacgtcagctgagtatgcaggtgcatgccctgcgtgaagattttagagagaaaaattcctcaaccaaccagcacattatccggctggaaagcctgcaggccgagataaaaatgctgtccgaccgaaagcgggaactagagcataggctctccgccacactcgaggaaaatgacctcttgcagggtacagtggaagaactccaggacagagtccttatcttggagcggcagggccatgacaaagatctgcagctccaccagtctcaactggagcttcaggaagttagactgtcatgtagacagttgcaagtaaaagttgaagagctcactgaagaacggtcactgcagtcctctgccgcaacctctacatccctcttgtctgaaatcgaacagagtatggaggcagaggagctcgaacaagagcgggagcaactacgccttcagctgtgggaggcatactgccaagtgaggtatttgtgctctcacctacggggaaatgatagcgccgattccgcagttagtactgacagcagcatggatgagtcttcggaaaccagcagtgccaaagatgtgccagccggttctcttcggacggcattaaacgagctgaagcgtctgatccagagcatcgtagacgggatggaaccaaccggcagcagacgacttgatgacgacagcctggaggagcaaataaggcagacaagtgaagactctagagctctgcgagagctaatggagggggaacgaggtcgactgcctgaggcaagccgttgctgtctgccagcatgcagtcaaccaattcagtcgccttctctgccccatgttggaaaggctcagcaggggtgcgcggcaagaatgtacctttag

SEQ ID NO: 28498 - DNA, 1428 bp, synthetic construct
  source 1..1428: mol_type = other DNA; note = Synthetic coding sequence
atgacacgcggtactggcggtaccgctcagcggggaagatcaggaccagactcccaggggttgctggattcttcactgatggcgtccgggacagcctctcggagtgaggacgaggagtctctggctgggcagaaacgggcttccagccaagcactgggcaccataccaaaacggaggtccagtagccgatttatcaaacggaagaagttcgacgatgaactagttgaaagctccctcgctaagagctctactcgcgcaaaaggcgcttctggggtagagccgggacgctgtagtgggtccgagccctcttcctccgaaaagaaaaaggttagtaaagcaccaagcacaccggtaccaccctctcctgccccagcaccaggcctgaccaaaagagtgaaaaaaagcaagcaacctttacaggtgaccaaggacttagggcgatggaagccggctgatgacctcctcctcataaacgcagtgctgcagactaatgatctcacaagtgtgcatctcggcgtgaagttctcgtgcaggttcacattgcgcgaagtgcaggagagatggtatgcccttttatatgaccctgttatatcgaagctcgcctgtcaagccatgagacagctccatcctgaagctatcgcggctatacaatctaaggcacttttctcaaaggccgaagagcagctgctcagcaaagtaggaagcacaagccagcccacacttgagacttttcaagatttgcttcaccgtcatcctgatgcgttctacctcgccagaaccgccaaagctctgcaggcccactggcagcttatgaagcagtactatttgttggaagatcaaactgtgcaaccactgcccaagggggaccaggttcttaatttctccgacgccgaggatctaattgacgatagcaaactaaaagatatgcgcgacgaggtgctggaacacgagcttatggtggcagatcggagacagaaacgcgagattagacagctggagcaagagcttcacaagtggcaggtcttggtggactccatcactgggatgtcttctcccgacttcgataatcagacactcgctgtattgagaggacgcatggtgcgatacctgatgaggagtcgcgaaattacactgggacgggcaaccaaagataaccaaatcgatgtagacctcagtctcgaaggcccagcatggaaaattagcagaaaacagggggtcatcaagcttaaaaataatggagacttctttatcgcgaacgaaggtcgcaggcccatctacatcgacggcaggccggtgctgtgtggatcaaagtggcggctgtcaaacaactctgtggtggagatcgctagcctccggtttgtgtttctgatcaaccaggacctgatagccctgatccgcgcagaggccgctaagatcactcctcaatag

SEQ ID NO: 28499 - DNA, 1311 bp, synthetic construct
  source 1..1311: mol_type = other DNA; note = Synthetic coding sequence
atggctgacgggggatcagaaagagcagatggaaggatcgtcaagatggaggtggactacagtgctacagtggaccaacgactgcccgagtgtgcgaagttggcaaaggcctctgacatggtgtcaacatctcggatactcgtcgccgtcgttaaaatgtgctacgaagcgaaagaatgggatctgctcaatgagaatatcatgctgctctcgaagcggcgatctcagctcaagcaggcggtggctaaaatggttcagcagtgctgcacatatgtggaagagattacggatctaccgatcaagcttaggctcatcgacactctgaggatggtgactgagggcaagatctatgtcgagattgaaagggctcgccttactaagactttagctaccattaaagagcagaacggagacgtaaaggaggctgcatctattttgcaagaactccaggtggagacatacggatccatggagaagaaagaaagagtcgagtttatcctggagcagatgaggctttgcctcgcagtgaaggactacattcgaacccaaatcatctcaaaaaaaattaacaccaaattcttccaggaggagaacaccgagaaactcaagctgaagtactacaatctgatgatccagcttgatcaacacgaaggatcatacctgtcgatttgtaaacactaccgagcaatctacgacacgccatgtatccaggccgaaagtgagaaatggcaacaggctttaaaatcagttgtgctgtacgtcatcctagcacctttcgataatgagcagtctgatttggtccaccggatctctggagacaagaagctcgaggaaatccctaaatacaaagacttgctgaagcttttcacaacaatggagctgatgcggtggtccacgttggtcgaggattatggcatggaattgcgtaagggctccctagagagtccagccaccgacgtgttcgggagtacagaggaaggtgaaaaaagatggaaagacttaaagaaccgagtggtggagcataatatcaggatcatggccaagtactacacacggattactatgaaacggatggcccagctgctggacttgagcgttgatgaaagcgaggcgtttctctctaacctggttgtgaacaaaaccatttttgctaaggtcgatagactggcgggtattattaattttcaacggccaaaggatcccaataatctccttaatgactggagtcagaaactgaactctctgatgtctcttgttaataaaaccacgcatctgattgcaaaggaggagatgatccacaatcttcaatag

SEQ ID NO: 28500 - DNA, 1974 bp, synthetic construct
  source 1..1974: mol_type = other DNA; note = Synthetic coding sequence
atggacgatcctgactgcgattccacatgggaggaggatgaagaagacgcagaagacgccgaggatgaggattgcgaagatggggaggcagcgggagccagagatgctgatgctggagatgaagatgaagagtccgaggagcctagggcagccagaccatcttcattccagtctcggatgaccggaagtagaaattggagggccacacgggacatgtgcagatatagacacaactatccggacctagtggagcgcgactgcaatggcgacactccaaatctgtctttctacagaaacgagattagattcttgccaaacggctgttttatcgaagacattctacagaattggacagataactatgacttgctcgaagacaatcatagctatatccagtggctgttcccactccgagagcccggagtcaattggcacgcaaagcctcttacactcagagaggtcgaggtgtttaaaagttcacaggaaatccaggagaggctagtacgcgcatacgaactgatgctcgggttctacggtattcggttggaggacaggggcactgggaccgtgggccgtgcccagaactaccagaaacggtttcagaacctaaactggcggtcacataacaacctgaggatcaccagaattctcaaatccctcggggagctgggattggagcacttccaagctcccctggtgcggttcttcctagaggaaactctcgtgcggagagaacttcccggtgtccgccagtctgctttggactacttcatgtttgccgtccggtgtcggcaccagaggcgccagctcgtccacttcgcctgggagcatttccgccctaggtgtaagtttgtgtgggggccacaggacaagttgcgcaggtttaagccatcctctcttccccaccccctagaaggatctagaaaggtggaggaagagggctctcccggtgaccccgaccacgaagcatcgacccaggggaggacgtgcggcccagagcatagcaagggcggtggcagagtcgacgagggccctcagccccgttctgtggagccccaggatgcagggccactggagcgtagtcagggagatgaagcagggggacatggcgaagaccgtcccgagccattgagtcccaaggagtccaagaaaagaaaactggagctgtcacgcagagaacagcctccaaccgagcccggtccacagtcggcgagtgaggtcgagaagattgctctgaatctagaagggtgcgcactgtcccagggctcgctcagaacagggacccaggaggtgggaggccaggatcccggagaggctgtacaaccctgcaggcagcctctgggcgctcgcgtggcagacaaagtgcggaagcggcgtaaggtggacgaaggtgccggagatagtgctgccgttgcgtctgggggtgcgcagactctagctttggcgggaagcccagctcctagcggacatcccaaagccggacactcagagaacggggttgaggaggacaccgagggtcggaccggccctaaggaaggcaccccgggtagtcccagcgagactcccggtcccagccctgcaggccctgccggtgacgagcctgccgagagtccctctgagacccccggaccgaggcccgcaggcccagccggagatgagcctgccgagtctcccagtgaaactcccggaccatctcccgcaggcccaacccgggacgagcctgccgagagtccaagcgaaactccaggaccaaggccggctggtcctgcaggcgatgagcccgctgagagccccagtgaaacaccaggacctagacctgcgggacccgctggcgatgaacccgctgagagccccagcgagactcccggaccctcacccgctgggccaacacgggacgaaccagcgaaggccggtgaagccgctgaactgcaagatgccgaagtagaatcctccgctaagtccggcaagccttag

SEQ ID NO: 28501 - DNA, 615 bp, synthetic construct
  source 1..615: mol_type = other DNA; note = Synthetic coding sequence
atggatcctaaggatagaaaaaagatccagttctcagtccccgcacctcctagccagctggacccacgccaagtcgagatgatccgacgcagacgccctacaccagcgatgctgttccgcctctctgagcatagctcccctgaggaggaagcaagcccccaccagcgggcttcaggcgaagggcaccatctgaaatccaagcgccctaacccttgcgcttatacccccccttctctgaaggccgtacagcggatcgccgaatcacatctgcagtcgatcagcaatttaaatgagaaccaggcctctgaagaggaagacgaactcggcgagctgagggagttgggttaccctcgagaagaggacgaagaggaggaggaagatgatgaggaggaagaggaggaagaagacagtcaggcagaggtgctgaaggtgattcgccagtctgcaggccaaaaaaccacttgtggccaaggattggaaggaccctgggaacgcccaccacccctagacgagtctgaacgggacggtgggtcggaagaccaggtcgaagaccccgctctctccgagcctggggaggagcctcagcgcccatctcccagtgagccaggcacatag

SEQ ID NO: 28502 - DNA, 3042 bp, synthetic construct
  source 1..3042: mol_type = other DNA; note = Synthetic coding sequence
atgggttggaaaccaagtgaggccaggggccaatctcagtcctttcaggctagcggtctacaacccagatcattgaaagcagcaaggcgggctacagggaggcccgatcgttcaagggccgctcgtcctactatggatccctctgcacataggtcaagagcggctcccccaaacatggatcccgaccctcaggctggcgtccaggtagggatgcgcgttgttcgcggtgtggattggaaatgggggcaacaagacgggggagagggcggagttggaactgtcgtcgagctgggcaggcacgggtcgcccagcacgccagacagaaccgtggtggttcagtgggaccaggggacaaggacaaactacagagctggttaccagggcgcacacgatctgctgctttacgataacgcacaaattggcgtgcggcacccgaatatcatctgtgactgttgtaagaaacatggactgcggggtatgagatggaagtgccgggtgtgcctggactatgatttatgtacccagtgctacatgcataacaagcacgagctggcacacgcgttcgaccgctacgagaccgcccacagcagaccggtgaccctttctccacggcagggtctcccacgaatccccctgcgcggtatctttcaaggcgcaaaggtcgtgcgcggacccgattgggagtggggaagccaagatgggggagagggaaagcccggacgcgtggtggatataagaggctgggatgtggaaactgggcgtagtgttgcaagtgtgacgtgggcagatggtactactaatgtttaccgggtggggcataaagggaaggtggacttgaaatgtgtaggagaggccgctggcggattttactacaaagaccacctacccaggctgggcaaaccagctgaactgcagcggagggtaagcgccgactcacagccttttcaacacggggataaagtcaaatgcctgcttgacacggatgtgttgcgtgagatgcaggagggccatgggggttggaatccacggatggccgagttcatcggtcagacaggcaccgtgcaccgcataaccgaccgtggggacgtgagggtgcagttcaatcacgagacaaggtggacctttcatccaggcgctctcacaaagcaccactccttttgggtgggagacgtcgttagagtaattggagacttggatacagtgaagagactgcaagctggccacggcgagtggacagatgacatggctcctgccctgggtcgcgtgggaaaagtcgtcaaagttttcggagacggcaacttgcgggttgcagtggccggacagcggtggactttttccccgtcttgcctggtagcttataggcccgaagaggacgccaatttagacgtggcagaacgagcgagagaaaacaaatctagtctgtcggtggctctcgacaagctgcgggctcagaagagtgatcccgaacacccaggaagactggtggttgaagtggccctcggcaatgctgcacgcgctttagacctactaaggcggagacctgaacaggttgacactaagaatcagggccgtacagcactccaagtcgctgcctatctgggccaggtggagctgatccgcctattactacaggccagagcaggggtagacctccccgatgacgaggggaataccgcgctccactacgccgctttgggaaaccagccggaagcaactcgtgtcctgctgagtgccggatgcagggctgacgccatcaactccacccagtccaccgcccttcacgtggcagtgcaaaggggattcttagaggttgtccgcgctctctgcgagcgcggttgcgacgtgaacctcccagacgctcactcagacacccctctacacagtgctatcagtgcaggcacaggagccagcgggatcgtggaagtccttactgaagtgcctaacattgatgttacggctaccaactcacagggattcacactgctgcaccacgccagtctgaaaggtcacgccctggccgtacggaaaatccttgccagagctcggcagcttgtcgatgcaaaaaaggaagatgggtttacagccttgcatctggccgctctgaacaaccatcgcgaggttgcacagatactgatcagggaaggacggtgtgacgttaatgtgaggaatcgaaaactacagagcccactccatctggcagtccagcaggctcacgttggactcgtgcctctgctggtggatgcaggttgttctgtcaacgcggaagacgaagaaggagataccgccctacacgtggccctgcagcgacaccagctgctccccctggttgctgacggcgctggcggagacccaggccctttacaactcctgtcaagactgcaggccagtggactaccaggatccgccgaattgacagttggagcagcggtggcatgcttcttagctctcgaaggagctgacgtgtcctataccaatcaccgcggtcggtcccccctggacttagcagctgagggtagagtgttaaaggcactacaggggtgcgcacaaaggtttcgagagcggcaggcaggaggaggggctgccccaggccctagacagactctggggacccccaacaccgtaacaaacctccacgtgggggctgcacccggacccgaagccgcagagtgcctagtgtgctcagagcttgccctgctagtgttattttcaccgtgtcaacacaggactgtgtgtgaggaatgtgccaggcgcatgaagaaatgcattagatgtcaagtcgttgtctccaagaaactgcgcccagacggttctgaggtggcgtctgcggcacctgcaccgggtcctccgcgtcagctcgttgaggaattgcagtcccgctaccgccagatggaggaaagaattacttgtccaatctgtattgacagccacatacgcctcgtgttccagtgcggacacggagcgtgtgcaccgtgcggaagcgcactctcagcttgccctatctgtagacagcctatcagggaccgaattcaaatcttcgtgtag

SEQ ID NO: 28503 - DNA, 2055 bp, synthetic construct
  source 1..2055: mol_type = other DNA; note = Synthetic coding sequence
atgataccgcctcaggaggctagtgccaggcggagagaaatcgaggacaagctgaaacaagaggaggagactctttctttcattagagatagcttagagaaatctgaccagttgaccaagaacatggtttcgattcttagtagcttcgaatcgcggctcatgaaactggaaaactctatcataccagtgcataaacagactgagaatcttcaaaggcttcaagaaaatgttgagaaaaccctctcctgcctggatcacgtgatttcatattaccacgtggcctccgataccgaaaaaattatccgcgagggccctaccggtagactcgaagagtatctcgggtctatggcgaagattcagaaagccgtggagtacttccaggataattcccctgacagcccagagctgaacaaggtgaaactgttgtttgagcggggtaaagaagctctggagagtgaatttagatctcttatgactcgccactctaaggttgtatcccccgtactcatcttagatctaattagtggggatgatgacctcgaggcccaggaagatgtgaccttggagcacctgcctgagtcagtgctgcaggatgtcatccggatcagcagatggttggtggagtacggccgtaaccaggatttcatgaatgtgtactaccagattcgcagtagtcaactggataggtctatcaaagggcttaaagagcactttcacaagtcttcctcgtcatcaggcgtgccgtactcccctgcaatccctaataaaaggaaagacacaccaacaaagaagcccgtgaaacgacctggtaccattagaaaggcccagaatctactgaagcagtacagccagcacggactggacggtaagaagggcggttctaacctgattccacttgaaggccgagacgatatgcttgatgtggaaacagacgcctacatccactgcgtgtccgctttcgttaagcttgcccagagcgagtatcaactgctcgccgacatcataccagagcaccaccaaaagaaaacatttgactccctgatacaagacgctttggatggtctgatgctcgagggagagaacattgtctctgctgccaggaaagcaatagtgcggcacgatttctctacagtccttacagtttttcccatcttgcggcatctcaaacagacgaagccagagttcgaccaggtacttcagggcacagccgcatctaccaagaataagctacccggtcttattacctccatggaaaccatcggcgctaaagccttggaagattttgctgataacatcaagaatgacccagacaaggagtacaatatgcccaaggatggcactgtgcacgagctcaccagcaatgccatattatttctgcagcaacttttggactttcaggaaaccgccggtgccatgctggcaagccaggagaccagcagctctgctacttcttacagttcggagttttcaaagcgccttctttctacatacatctgtaaagtgctgggtaatcttcagctgaatttgctgtcaaagtccaaggtttatgaggacccagctctttcggctatctttctgcacaacaattacaattatatactcaaatctcttgagaagtcggaactaatccagttagtggccgttacccagaagaccgcagagcggagttacagagagcacatagaacaacagattcagacataccaaaggtcctggttaaaggtcacggactatattgccgagaaaaatctccctgtctttcagcctggtgttaagctacgcgacaaagaacgccagattattaaggaaagattcaaggggttcaatgacggcctcgaagagctgtgtaagatacagaaggcttgggccattcctgataccgaacaaagggaccgaataaggcaggctcaaaagaccatagtgaaggaaacgtacggagcttttctgcaaaaattcggctctgtgccgttcacaaaaaatccagagaagtatataaaatacggagtcgaacaggtaggcgacatgattgatcggctcttcgacacgagcgcatag

SEQ ID NO: 28504 - DNA, 3576 bp, synthetic construct
  source 1..3576: mol_type = other DNA; note = Synthetic coding sequence
atgccagtgcaggctgctcagtggacagagttcttatcttgcccgatatgttataatgagtttgatgagaatgtgcacaaaccaattagcttgggttgctcccatacagtttgcaaaacctgtctgaacaagctgcatagaaaagcctgtccatttgatcagactgccataaacacagatatcgacgtactgcctgttaatttcgccttgctacagctggttggcgcacaagtgcccgatcaccagtctataaagctcagtaacctgggggaaaataaacattacgaagtggcaaaaaagtgtgtggaagacttagccctttacctgaagccgctgtccgggggtaagggagtcgcctccctcaaccaatcagcattatcccggcctatgcagagaaagctcgtcaccctcgttaattgtcaactggttgaagaggaaggcagagtgagggccatgagagctgcgagatccctgggtgagcgaacggttactgagttgatcctccagcatcagaacccacagcagctgtctgcaaatctctgggctgctgtgcgcgctcgcggttgccagtttctcgggccagccatgcaggaagaggctctgaaactggtgttgctcgcactggaggacggcagtgccctaagcaggaaagtgctagtgctgtttgtggtacaacggctggagcctcgcttcccacaagcatctaaaacctctatagggcacgtggtgcagctgctgtatcgcgcatcatgtttcaaagtcaccaagcgcgacgaagatagctctctgatgcagctgaaagaagaattcaggagctacgaggctcttagaagagaacatgatgcccaaatcgtgcatatagctatggaagcgggactccgtatcagccccgagcagtggtctagcctattatatggagacctggctcataaatcacacatgcagtctattatcgataagctgcagtctccagaatccttcgctaagagtgtgcaggagctgacaatcgttctccaaagaacaggcgaccccgcaaaccttaacagacttcgtccccatctggagctgctggctaatattgaccccaacccggatgctgtgtcgcccacttgggaacagttagagaacgctatggttgccgttaaaactgtggtacacggactggtggattttattcaaaactattccaggaaagggcacgaaactccacaaccccagcccaactccaaatacaaaacatccatgtgcagggaccttcggcagcaggggggatgtcccagggggactaactgcaccttcgctcattcccaggaggagctggagaaataccgcttgagaaacaaaaagatcaatgctacagtgagaaccttccccctcctaaataaggttggggtgaataataccgtgaccaccacagccggaaatgtgatctccgtgataggcagtaccgagactacaggtaaaatcgtcccgtcgactaatgggatttccaacgctgaaaactccgttagccagctcatatctcgtagtacggatagcactctcagagccctggaaactgttaagaaggtcggcaaagtaggggctaacggccaaaacgccgcagggccttccgcagattcagtgacagaaaacaagatcggttcccccccaaagactccggtgtccaatgtggctgccactagcgctggacctagtaacgttggcaccgagttaaattccgtccctcaaaagtcttcccctttcctgacccgcgtgcccgtgtatcctccacactcggagaatattcagtattttcaggatccccgaacacagattcctttcgaagtgccgcagtacccacagaccggatactatcctcctcctcctaccgtgccggcaggcgtggccccttgtgtccccaggtttgtgaggtccaataacgtgcctgaaagttctcttccacccgcatctatgccatatgcagatcactattcgacgttctcaccaagagatcgcatgaactcgtccccttaccagccacctcctccccagccgtatggcccagtgccgcctgtgccatcagggatgtacgctcctgtttacgatagccgtcggatatggcggcctccaatgtaccagcgcgatgatataatcagaagcaattcactgccacccatggacgtcatgcactccagtgtgtaccaaacctctctgcgggagcggtacaatagtctggatgggtattactctgtcgcctgccagcctccgtcggaacccagaactactgttcctttgcccagggaaccttgtggccacctgaaaactagctgcgaggaacagatcaggaggaaaccggatcagtgggcacaataccacacacagaaggccccactcgtaagtagtacgcttcctgtggccactcagtctcccactccacccagtcccttgttttccgttgacttcagggcggatttctcagagagcgtatccggtactaaatttgaagaggaccacttgtcacactattccccctggtcctgcgggactatcggaagctgcattaatgccatagactccgaaccaaaggatgtaatcgcaaattctaacgccgtattaatggatcttgactccggggatgtaaagcggcgagtacacctgttcgagacccagcggcgaacaaaggaggaagatccaatcatccccttttcagacgggccaatcatttcgaagtggggagccatctcacggtcgtcacggactggctaccatactaccgatcctgtgcaggcaacagcatcccagggctctgcaacgaagccaatctcagtatctgattatgtaccttacgtgaacgcggtggactctcggtggtcatcctatggaaacgaggccaccagctccgcccattatgttgaaagggatcggttcattgtgacggacctatccgggcatagaaagcactcttccacgggggacctgctgagtctggagctacagcaggctaaaagtaattcccttctgctacagagggaggccaacgccctcgctatgcaacagaaatggaatagcctagatgaagggaggcatcttaccctaaacctactgtccaaagagatcgaattgaggaacggtgagctgcagtcagactacacggaagacgctaccgataccaaacctgacagggacatcgagcttgaattgagcgctctcgataccgatgaacctgacggtcagtccgagcccatcgaagaaattcttgacatccagctggggattagctcccaaaacgatcagcttctgaacggaatggctgttgagaatggccatcctgttcagcagcatcagaaggaaccgcctaagcagaagaaacagtcgttaggcgaagatcatgtgatcctggaggaacaaaaaaccatcttgcccgtaacaagctgcttctctcagcccctgccagtgtcaattagcaatgccagctgtctgcccattactaccagcgtgagcgccggaaacctgattcttaagactcatgtgatgtctgaggataaaaatgattttctgaagcccgtcgccaatgggaaaatggtgaattcctag

SEQ ID NO: 28505 - DNA, 2100 bp, synthetic construct
  source 1..2100: mol_type = other DNA; note = Synthetic coding sequence
atgtgtggcatctttgcgtacctgaactatcatgtgccacggacaagaagagaaatcctggagacactaatcaaagggctccaaaggctggagtatcgcggatatgattctgctggcgtgggtttcgatggcggtaatgacaaagattgggaagcaaatgcctgcaaaatacagttgatcaaaaagaaagggaaagtcaaggctctggatgaggaagtgcacaagcaacaggatatggacctggatatcgagtttgatgtgcacctaggcatcgctcacacgcgctgggccactcatggtgaacctagccccgttaacagccaccctcaacgttccgataaaaacaatgaatttatcgtcatccataatggaatcattaccaactacaaagaccttaaaaaatttctcgaatccaagggctatgattttgaatcagaaaccgacaccgaaacaatcgctaaattggtgaagtacatgtacgataacagagaaagccaagacactagtttcaccacactggtcgagcgtgtgatccagcaactggaaggcgcatttgcacttgtcttcaagtcagtgcattttcctggccaggctgtgggtactaggcggggaagtcctttacttatcggtgtacgtagtgagcataagctgagcacagaccatatacccatactgtatcggactgctagaacccagatcggttccaagtttactaggtggggctcccagggagagagagggaaggacaagaaaggttcctgcaacctctcaagggtggacagtaccacctgcttatttccagtggaggagaaggcagtcgagtactactttgccagcgacgctagtgctgtcattgaacataccaatcgtgtgatatttttggaggacgatgacgtggccgctgtcgtcgacggcaggctgagcattcaccgaatcaaaaggaccgccggagaccatcccggacgcgctgtccagactctccagatggagttgcagcagattatgaaggggaacttttcatcgttcatgcagaaggagatcttcgagcaacccgagagtgtcgtcaataccatgaggggccgtgtgaacttcgacgattacactgtgaatcttggcggactgaaagaccatatcaaagaaatccagcgctgcagaaggctaatactgatcgcttgcggaacaagttaccacgcaggcgtcgccactcggcaagtattggaggagctgactgagctccctgttatggtggagctggccagtgactttctggaccgaaatactcctgtgtttcgcgacgacgtctgcttctttctttcgcagagcggcgaaacagccgataccctgatgggtttacgctactgcaaggagagaggcgctctgaccgtggggatcacaaatacagtcgggagtagcatttcgcgcgaaactgactgtggggtccatataaacgccggacccgaaataggggtggccagtacgaaggcctacacttcccagtttgtgagcttggtgatgttcgctctgatgatgtgcgacgacagaatctcaatgcaagaacgcaggaaggagattatgctcggactaaaacgcctccccgacctcatcaaggaagttctgtctatggacgacgaaattcagaaactggctactgaactgtaccaccagaagagcgttctcataatgggtcgcggttaccattatgcaacttgtctggaaggcgcattgaaaattaaggaaatcacctatatgcatagcgaagggatactggcaggagaactaaagcacgggccactggcacttgtcgataaattgatgcctgttattatgataatcatgcgcgatcatacgtacgcgaagtgccaaaatgccctgcagcaggtcgtcgctcggcagggacgcccagtcgtgatatgcgacaaggaggacactgaaactatcaaaaacaccaagaggaccatcaaggtgcctcactctgtggactgccttcaaggaattcttagcgtgattccactgcagctcttggccttccacctggctgtgcttcgaggatatgatgtggacttcccaaggaacttggctaaatctgtaacagtggaatag

SEQ ID NO: 28506 - DNA, 2067 bp, synthetic construct
  source 1..2067: mol_type = other DNA; note = Synthetic coding sequence
atgtctgtcaacagcgagaagtccagcagcagtgagcggcctgagcctcagcagaaggctccattagtcccaccccctccgccaccccctccgcctcctcccccacctttgccggatccgacacctcccgaacccgaggaggagatcttggggtctgacgacgaagagcaggaggaccccgctgattattgtaaaggaggctaccaccccgtaaagataggtgacctcttcaacggtcgttaccatgtcatcagaaaactgggctggggccatttcagcacggtgtggctgtgctgggatatgcagggcaaacgatttgtggctatgaaagtggttaagagtgctcagcactatacagaaacagctctggacgaaataaaactgctgaagtgtgttcgggagagcgatccatccgacccaaacaaggatatggtggtgcagctgatcgacgactttaaaatatctgggatgaacgggattcatgtctgcatggtatttgaggtgctggggcaccatcttctcaaatggattataaaatctaactatcagggcctccccgttcgatgcgtcaagtcaattattcgccaagtacttcagggcctggactatcttcacagtaagtgcaaaatcatccacacagacattaaacctgaaaatattttgatgtgtgtggatgacgcctacgtgagacgaatggctgccgaggccacggaatggcagaaagcaggagcacccccacctagcggctccgccgtttcaacagcaccccagcaaaaacccattgggaaaatctccaaaaacaagaagaaaaagctgaaaaaaaaacaaaaacggcaggccgaactactcgaaaaacgcctgcaggagattgaagagctggagcgagaagctgaaaggaagattattgaagaaaacatcacatctgcagccccatctaatgaccaggatggagagtattgccccgaggtgaagttaaaaaccacaggactggaagaagcagcggaagcagagacggccaaggataatggcgaggctgaggaccaagaggaaaaagaagacgcagaaaaagagaacattgagaaagacgaggacgacgtcgatcaagagcttgctaacatcgatcccacctggatcgaaagccctaaaacaaatggccacattgaaaacgggcctttcagcctggagcaacaactcgacgacgaggatgatgatgaggaggattgtcctaatcctgaggaatacaacctggatgagcctaacgctgaatccgactatacctatagtagctcctacgagcagttcaacggtgagcttcctaatggcagacataagatccccgaatcacagttcccggaattctccacctcattgttcagtggttcactggagccagtagcatgcggctccgtgttgtctgaggggtcgccccttactgagcaagaggagagcagcccaagccatgacaggagtcgtaccgtaagcgcgtcaagcactggcgatctgcccaaggcaaaaactcgagccgcagatctgctggtgaaccccctggacccccgaaacgccgacaagatcagggtcaagattgctgacctcgggaatgcatgctgggtccataagcacttcaccgaagacattcagaccagacagtatcgtagcatcgaggtgctgattggagcagggtatagcaccccagcagatatttggagcaccgcatgcatggcattcgagcttgcaactggagattacttgttcgagcctcactctggcgaggactacagtcgcgatgaagaccacattgctcatattatcgagctgctgggatcaatcccgaggcatttcgccctgtccggtaaatacagtcgagagttttttaatcgcagaggggagcttagacacataaccaagctgaaaccgtggtctctgttcgacgtattggttgagaaatatggctggccccacgaggacgcagcacagttcaccgacttcctcatccctatgctcgaaatggttccagagaagagagcatcagctggtgaatgcctgcggcatccatggctgaactcctag

SEQ ID NO: 28507 - DNA, 1308 bp, synthetic construct
  source 1..1308: mol_type = other DNA; note = Synthetic coding sequence
atgagcggatatcagagacggccaggcgcaacaccattgagtagggcacgctccttagccattcctgacgcacccgcattttacgaacgcaggagctgtcttccacaacttaattgtgaacgcccacatggcagagatctggactcaccttttttcggaatccggcctgctttcatgtgctacgttccctcacctgtactagcaagcgtgggagacacagatttcggctacggcaaaggcaagtgtagcaaacagagccctagcggagcacatggaacccacttcggcgatgatcgcttcgaggacctggaagaggcaaaccccttcagctttcgcgaatttctgaaaacgaaaaatttgggcctgtctaaagaggatccagcctcaagaatctatgcaaaggaggccagcagacactcactgggactagaccataatagcccgccaagtcagacaggcggttatggactggaataccagcagccttttttcgaggacccaactggcgcaggtgacctcctggacgaggaggaagacgaggataccggctggtccggggcttatctcccgtctgcaattgaacagacacatccagaaagggtccccgctgggactagtccttgtagcacatatctgagtttcttttccactccctccgaactggcaggtccagagtcactgccttcctgggctctgagcgacaccgactctagagtgtctccagcctccccagctggatcaccaagtgccgattttgctgtgcacggcgaatccctgggtgaccggcatctccgcactttacagatatcttacgatgcgctgaaagatgagaattccaaacttaggaggaagctgaacgaagtacaatcgttcagcgaagcccaaactgagatggtgaggactctggaaagaaaactggaagccaaaatgataaaagaagagagtgactatcatgatctcgaatcggtggtccagcaggttgaacagaacctggaactcatgaccaagcgagctgttaaggccgaaaatcacgtggtgaaactcaagcaggaaatcagtctgctacaggcgcaggttagtaactttcagagagaaaacgaggctttaaggtgtggccagggtgcctctctgaccgttgtgaagcagaatgccgatgtcgctctgcagaatctccgggtcgttatgaacagcgcccaagcaagtattaagcagctggtttcgggcgctgagaccttaaatctggtggccgagattcttaaaagtattgacaggattagtgaagttaaagacgaggaagaggacagttag

SEQ ID NO: 28508 - DNA, 591 bp, synthetic construct
  source 1..591: mol_type = other DNA; note = Synthetic coding sequence
atgaaagtgaaaatcaagtgctggaatggcgtcgcaacctggctatgggtggccaatgacgaaaactgcggcatttgcagaatggcgtttaacggctgctgccccgattgcccacttcacggcgaaagcataagcaggtgtttgggctggtgtccccaacctgtgccagttcttggaggaagggctcatccacaggttccaatcaatacagcctctcccaccccaggtcagcacacagggtctttaatgtcccgggaggaatctagtcgcagccctgaccccacccctcccgctttagaccaggaaacctctagcctattacgctgcacatcaccatggtgtctcgatcacagctgcgatctgttcggtattaccgaccaagtgagcgctgatggtccacgagcttgtaggcaaggcgctcgacggaggctcccggctggggtgggccctgtactcccattgctgccccatgccttgcacccccaggtcgctgcacgcaccgccggagccgcagctctgccacacgtgccaccaggaatggaggtgcagggcgtgcgccctgatcttgcactcgcaggaggggcatcttag

SEQ ID NO: 28509 - DNA, 5126 bp, synthetic construct
  source 1..5126: mol_type = other DNA; note = Synthetic coding sequence
atggccgctattggaagggggagatcactcaaaaacctgagggtccggggtagaaatgactcaggagaagagaacgtaccgctcgacctcaccagagaaccatccgacaacctccgagaaatactccagaatgtggccaggctccagggcgtgagcaatatgcggaagcttggccatctaaacaattttaccaagctactctgtgacattgggcactctgaggaaaagcttggatttcactatgaagatatcataatctgtctacgacttgcattgctgaatgaggctaaagaggtccgagccgcaggcctgagggcccttcgctacttgatacaagatagcagcatactccagaaggtgcttaaactgaaagtagattacctcattgctcggtgtattgatatccagcagtccaatgaagtggagaggacacaagctctgcgcttggtgcggaagatgattactgtgaacgcatcgttattcccatcatctgtgaccaacagtttgatcgctgtcggtaacgatggactgcaagagcgcgaccgaatggttcgtgcctgcatagcaataatatgtgaactcgctctccagaatcccgaggtcgttgcactgcgaggtggcctcaatacgattcttaaaaacgttattgattgtcagctgtccagaatcaacgaggctctgatcaccaccattctccacctgctcaaccaccctaagaccaggcagtatgtgagggcagacgtagagctggaacgtatactcgcaccttacaccgacttccattaccgccatagcccagatacggctgaaggccagttgaaggaagacagggaggcaaggttcctggcgagtaagatgggaatcatcgctacctttcgctcctgggccggtatcataaacctctgtaagcccggtaatagcggcatccaatctttgataggcgtcctatgtattcccaacatggagatccgacgtggactgctcgaggtcctctatgatatatttcggttgcctctgcccgtagtgactgaagagttcatagaggctctgttgagtgtcgaccccggtcgttttcaggattcatggcgcctttctgatgggtttgtagctgcggaggccaaaactatcctaccacatagggccaggagccgtccagatctgatggataattacctggccctcatcctgagcgcctttatccgtaacgggctattggaaggcctggtggaggttatcaccaatagtgacgaccatatcagtgtaagagccacgatcctcctgggagaactattgcatatggccaacacaattctcccccacagtcacagccaccatctgcactgtctgccaaccttgatgaacatggcagcatctttcgatattccaaaagagaaacgcctgcgggcatccgcggcactcaattgtctcaaacgtttccacgagatgaagaaacgaggtcctaagccttacagtctgcatctggaccatatcatccaaaaggcaattgctacccatcagaaacgagaccagtatttgcgggtgcagaaagatattttcatactcaaagataccgaggaggcccttctgataaacctgagagattcgcaggtcctgcagcacaaagaaaatttagagtggaattggaacctaatagggactattctaaaatggcccaatgttaatctgagaaactacaaggacgagcagttgcatagattcgtaagaaggttattatatttctacaaaccgagctccaagctttatgctaatctcgatctagatttcgccaaagccaaacaacttactgtggtgggatgtcagttcaccgagttcctcctcgaatcggaggaggatgggcaaggatacctagaagatctggtcaaagacatcgtgcagtggctgaatgcctcgtcagggatgaagccagaaagaagcctgcagaataacggactcctgaccacgctctcccagcactattttctgtttattggcacattgtcttgtcacccacatggggtgaaaatgttggagaagtgttccgtgttccagtgcctcctgaatttgtgctccctaaaaaaccaggaccacctactgaaactgacagtgtcatccctggactactcaagggatggcctggctcgcgttatcctgagcaaaattctgaccgctgcaacagacgcatgccgcttgtatgcgaccaaacacctgcgagtgctcttacgggctaacgtggagtttttcaacaactggggcatcgagttactggttactcagctgcatgataagaataagacaatctcatctgaagctctggatattctggatgaggcttgtgaggataaggctaatctgcacgcactgatccaaatgaagccagccctctcccacctcggagacaagggtttgctccttctgctcagatttctgtccatcccaaaaggattcagctacctgaacgagcggggttatgtcgcaaagcaactggaaaaatggcaccgggagtacaactctaagtacgtcgacctgatcgaggagcaactgaacgaagccctgacgacatatcgaaaacctgttgacggagataactacgtgcgcaggtctaaccagcggttgcagaggccacatgtgtacctcccaatccatctgtacggccagttggtacaccacaagacggggtgccacttattagaggtccagaacatcattacagagctttgccgcaatgttcgaacacctgacctggacaaatgggaggaaattaaaaaacttaaagcatccctgtgggccctcggaaacattggatcctcgaattggggactcaacctgcttcaggaggagaacgtgattcctgatattttaaaactcgccaaacagtgcgaagtgttgtccattcggggaacctgtgtctacgttctgggactcatcgcaaagacaaagcaaggatgtgacatactgaaatgtcacaactgggacgcagtaaggcactcccgcaagcatctctggcccgtggttccggatgatgtcgagcagctctgcaacgagctctcctcgatcccctctactttgagtcttaacagcgagtctacatcctcccgccataactctgaaagtgaatcagtgcccagtagcatgttcatcctggaagatgatcgcttcggaagctcgtccacctctacattctttctggatattaatgaagacacagagcccaccttctatgatcgcagtgggcctataaaagataaaaattctttcccgtttttcgcatcctcaaagctcgttaagaacagaatactcaacagtctcacactgcccaataagaaacaccggtcaagctcagatcccaaggggggaaagctatcttccgagtctaagaccagcaaccgtcgtattcggactctgactgaaccatcagtcgacttcaaccatagcgatgattttactccgattagtacggtacagaaaacgctacagctcgaaacatcgttcatgggaaacaaacacattgaagacacaggctcaacgccttcgattggggaaaacgatcttaaattcaccaagaattttgggaccgaaaatcaccgtgaaaatacatctagagagcggctcgtggtagagtcaagcacttcttcccatatgaaaattcgatcccagagctttaacacagacactacgacttctggaatctcgagcatgtcctctagccctagtcgcgaaacagtcggcgtcgacgccactaccatggataccgactgtggcagtatgtcaactgtggtttccactaagactatcaaaaccagccactacttgaccccacagagcaaccacctgagcttgtccaagtctaactccgtaagtttggtccctcctgggtcctcgcataccctgcctaggcgggcacagagcctcaaggcaccttccattgctactataaagtcactcgcagattgcaattttagctatactagctctcgcgacgcatttggatatgcgaccctcaaacggctacaacagcagcgcatgcatccttcactgtcacattccgaggcccttgcaagtcctgcaaaagacgtgttgttcactgacactatcaccatgaaggccaacagctttgaatcacgactgacgccctcccgttttatgaaggccctgtcatacgcctctctcgacaaagaggatcttctgtccccgattaaccagaatacccttcaacggtctagttctgtgagatctatggtgagctctgcgacatacggcggatctgatgactatatagggctggccttgcccgttgacattaatgacatcttccaggttaaggacattccttatttccagactaaaaacattcctcctcatgatgaccgaggcgcaagggcatttgcccacgatgctggaggactgccctctggcaccgggggactagtcaaaaatagctttcatttactccgccagcagatgtccctcaccgagataatgaatagtattcattctgatgccagcctgtttctggagtctacagaggacaccggcctccaagagcacaccgatgacaactgcctatactgcgtctgtatcgagatcctaggctttcagccctccaaccagctcagcgccatctgctctcacagcgactttcaggacattccatattctgactggtgcgagcaaaccatccataatccactcgaggtcgtgccgagtaagtttagcggaatttcgggctgttcggatggggtgagtcaggaggggagcgcgagcagcacaaagtctacagaacttctgctaggtgtcaagacaatcccagatgatactcccatgtgtcgcattctcttgcggaaagaagtcctgaggttggtcatcaatctttcttctagcgtgtccaccaaatgtcacgagaccggactgctgaccatcaaggaaaaatatcctcagacatttgacgacatctgcctctatagcgaagtgagccacctgctgagtcactgcaccttccggctcccgtgtagacggtttattcaggaactgttccaggatgtgcagtttctccaaatgcacgaggaggcagaggccgtgctcgctactcccccaaagcaacccatcgtggatacctccgcagagtccta

SEQ ID NO: 28510 - DNA, 3867 bp, synthetic construct
  source 1..3867: mol_type = other DNA; note = Synthetic coding sequence
atgcctaggaagggaacacagccgtctaccgcacgcaggcgcgaggagggaccacctccaccgagccctgatggcgctagcagcgacgccgaaccagaacctccatccggcaggaccgaaagtcccgctaccgccgcagaaactgcgagcgaggaattggacaacaggagcctggaagagatactgaactctataccacctccccctccccctgccatgacaaatgaggctggggcacctaggctgatgatcacacacatcgtaaaccagaacttcaagagttatgcaggggagaagatcctcggccctttccataagagatttagctgtattattggaccaaatggctcaggcaaatctaatgtgattgacagtatgctcttcgtgtttggctatagagcacagaaaattcggtccaaaaaattatctgtgcttatccataacagcgacgagcacaaggacattcagagctgtacagtggaagtgcatttccagaaaataatcgacaaggagggggacgactatgaagtgatcccaaatagcaatttttacgtgagtaggaccgcttgtagagacaataccagcgtgtaccatatctcgggaaaaaaaaagacgttcaaggacgtgggaaatttgctcaggagccatggaatcgatctcgaccacaaccgcttccttatactgcaaggcgaagttgagcagattgccatgatgaagccaaagggacagaccgagcacgacgagggaatgctggagtatcttgaagatatcatcgggtgcggtcgtctgaatgaacctatcaaggttctctgcagacgcgtcgagattctgaatgagcatcggggagaaaagctgaatagggtgaaaatggttgaaaaagagaaggatgccctggaaggcgaaaaaaacatcgcaatcgaattcttaactctcgagaacgagatattccgaaagaaaaaccacgtgtgccagtactacatttatgaacttcagaagaggatagctgaaatggagacacaaaaggagaagatccacgaagatacaaaggaaattaacgagaagagtaatattctgagcaatgagatgaaggcaaagaataaagacgtcaaagacacagagaaaaaacttaacaagattactaagtttatcgaagagaacaaagaaaagttcacacagctggacctggaggatgtccaggtgcgcgagaaactaaagcacgctacctctaaggctaagaaactggagaaacagctgcagaaggataaggaaaaagtggaggagtttaagagtatacctgcgaagagcaacaatattatcaacgaaacgactactcgtaataacgctctcgaaaaggaaaaagagaaggaggaaaagaaacttaaggaggttatggattctctgaagcaagaaacccagggtctccaaaaggagaaggagagtagggagaaagaattgatgggattttctaagtctgtgaacgaggccagaagcaaaatggatgtggcacagtctgagcttgatatttacctaagcagacataacaccgccgtaagtcagctgaccaaagccaaagaggccctgattgcagccagcgaaaccctgaaagaacgcaaagctgctataagggacatcgaaggcaagctgcctcagaccgagcaggaattgaaagaaaaagaaaaagaattgcagaagctcacacaggaagaaaccaatttcaaaagcctggtgcacgacctctttcagaaagtggaagaagcgaagtcaagtctcgcgatgaacaggtcgcgaggaaaagtgctcgatgcaattatccaagagaagaaatccggtagaatccccggaatatacggccgattgggggatctaggggctatagatgaaaagtatgacgtggccatatccagctgctgccatgccctagattacatagtcgtggattccatcgatattgcccaagagtgcgtgaatttcctgaaacggcagaatattggtgttgccacctttatcggacttgataagatggccgtgtgggctaaaaagatgacagagattcagacaccagaaaacacacctcggctgtttgatttagttaaggtcaaggacgaaaagatccgacaggccttttacttcgctctgcgcgacactctggtagcagataatctggaccaggctactcgcgtggcttatcagaaggacagaagatggcgggtggtgactctgcaggggcaaatcatagagcaatcaggcacaatgacaggcggaggatctaaggtgatgaagggacgcatgggtagcagccttgttatcgagataagtgaggaagaggtgaacaaaatggagtcccagcttcagaatgacagtaagaaagcgatgcagattcaggagcaaaaggtacagctggaagagcgtgtggtcaagcttaggcactcggagcgtgaaatgagaaataccctcgaaaagttcacagcttctatccaacgactgattgagcaggaggaatatctcaacgtgcaggtgaaagagttggaagctaatgtattagccacagctccagacaagaagaagcagaaacttctcgaggagaacgttagtgcttttaagaccgagtacgacgccgtggcggagaaagcaggtaaggtggaggcagaggttaaacgactgcacaacaccattgttgagattaataatcataaactaaaggctcagcaggataaactggataaaattaacaagcagctggacgagtgtgcttccgcgatcactaaagcccaagtcgcgattaaaaccgcagataggaatctgcagaaggcccaggacagcgtgctgcgtacggaaaaagagatcaaggacaccgagaaggaggtggatgacctcacagcagagttgaaaagcctggaggacaaagcagccgaagtagtgaagaatactaatgccgctgaagaaagcctgccagagatacagaaggagcataggaacctgctacaggaacttaaggtgattcaggagaacgagcacgcgctacaaaaagacgcccttagcataaaactgaaactcgagcaaattgatgggcatattgccgagcataacagcaaaattaagtattggcataaggaaatttccaagatttcgttacatcccatagaggacaatcctatcgaggaaatctcagtcttgtcaccggaggacctggaagccatcaaaaatccggacagcatcactaatcagatagctctcctggaggccagatgccatgagatgaagccaaatctgggcgctattgcggaatataagaaaaaggaggagctgtatctacagcgcgtagcggagctggataagattacatatgaacgagactcatttcggcaagcatacgaggatctgcgcaaacagaggctaaacgagtttatggccggattttatatcattactaataagctgaaagaaaactatcagatgttaactctaggaggagacgcagagctcgaactcgtggatagccttgaccccttctcagagggaatcatgtttagcgtcagacctcccaaaaaatcatggaaaaagatttttaacttgtccgggggagagaagactttgagctccctagcattggtctttgcactccatcactataagcccacgccactctatttcatggacgaaattgacgcagctctggattttaaaaacgtttccatcgtcgccttttatatctacgaacagactaaaaatgctcagtttatcataattagtctgaggaataacatgtttgaaataagcgataggctgatcgggatttataagacctacaatatcaccaaaagcgtggcggtgaaccctaaggagatagcatcaaaaggcctgtgttag

SEQ ID NO: 28511 - DNA, 2829 bp, synthetic construct
  source 1..2829: mol_type = other DNA; note = Synthetic coding sequence
atgacaggcagcaattcacacatcaccattttaacactcaaagtacttccccactttgaatccctagggaagcaagagaaaatacccaacaagatgagtgcctttaggaaccactgtccacatctggattctgtgggcgaaattacgaaggaggatctgattcaaaaaagtctgggcacctgtcaggattgtaaagtgcaggggccaaatctgtgggcatgtttagagaatcggtgctcatatgtgggctgtggtgagtcacaagttgaccactccactatccactcccaagaaaccaagcactatctaacagtcaatctcacaacactgagagtgtggtgctatgcgtgttctaaggaagtgtttttggaccgaaaactgggcacacaaccctctctgccccacgtaaggcagccccatcagatacaagagaatagcgtacaggatttcaaaattcccagcaatacgacattgaaaacccctctcgtcgcagtattcgacgatctagatatcgaggcagacgaggaggatgaattacgcgctcgcggtctcactggcctgaagaatattggcaatacctgctatatgaatgcggctttacaagcactctctaattgtcctcctctgactcagttttttctggattgcggtgggttggctcgcaccgacaagaaaccggcaatttgtaaatcctatcttaagctcatgactgaactttggcataaatccagacctggttctgtggtccctacaacccttttccaaggaattaagactgtcaatccaacttttagaggctactcacagcaggacgcccaagagttcctccggtgccttatggatctcctacacgaggaactcaaagagcaagttatggaggtcgaagaggacccccagacaatcactacggaagagaccatggaggaagacaaaagtcagagtgatgtcgactttcaatcctgcgaaagctgttccaattctgatcgagcagagaacgaaaacgggtcccggtgcttctctgaagataataatgagaccaccatgctgatccaggatgatgagaataactccgaaatgtccaaagattggcagaaggaaaagatgtgtaataaaatcaacaaggtaaattcggaaggagagttcgacaaagaccgggactctatcagtgagaccgttgacctcaacaatcaggaaacagttaaagtacagatccactcacgtgctagtgaatatattactgatgtccactccaatgatctgtccacaccgcaaatcctcccttctaatgagggcgtcaatccaaggttgtcagcttcaccacctaagtccggtaatctgtggccaggattggcccctccgcataagaaggctcagtccgcatcacccaaacgcaagaaacaacacaagaaatatcgctctgttatatcagatattttcgacggaaccattatctcatccgtgcagtgcctgacctgcgaccgtgtgtccgttaccctagagacatttcaggatttgagtctgcctattcctgggaaagaggatctggcaaaactgcatagctcctcccatccaacgtcaattgtgaaggctggaagttgcggcgaagcctacgccccacagggttggatcgcattttttatggagtacgtgaagcgctttgtcgtttcttgcgttccctcttggttttggggaccagtggtcaccttgcaggactgcctcgctgctttcttcgcacgcgatgagctgaagggagacaacatgtacagctgtgagaagtgcaaaaaactcagaaacggggtcaagttctgcaaagttcagaacttcccggagatactgtgtattcacctaaagcgcttccgccacgagcttatgtttagtacgaaaatcagcactcatgtaagttttccacttgagggtctcgatctacaaccatttctggcaaaagattcacccgctcagattgtcacgtatgatcttctttcagtcatctgtcaccatggcaccgccagctcagggcactacattgcatactgccgcaataatctgaacaatctgtggtacgaatttgacgaccaaagtgtgaccgaagtgtccgagtctaccgtacagaatgccgaggcctacgtgctgttttaccggaagagctccgaggaagcccaaaaggaaaggcggcgtatctctaaccttctgaacatcatggaaccgtccctcctgcagttctacatcagcaggcagtggctgaacaagttcaaaactttcgcagagccaggcccaatcagcaataacgacttcctctgcattcatggcggtgtgccaccgcgaaaggctgggtacattgaagacctcgtcctgatgctgccccagaatatttgggacaatctgtactctcggtatggcggaggaccagccgtgaaccatctgtatatctgtcacacctgccagatcgaggccgagaagatcgaaaagcggcgtaaaacggagctggaaatatttatcagattgaaccgcgctttccagaaggaggattcaccagccacattctattgtatcagtatgcagtggtttagagaatgggagagttttgtgaagggaaaggacggagatccccctggccctatcgataacaccaaaattgcggtgactaaatgtggcaacgtgatgctgagacagggcgctgattctggccagatatctgaagagacttggaattttttacaaagtatttatgggggtggcccagaagtgatcctccgccctcccgtggtgcatgttgatcccgatatcctgcaagcagaagagaaaatagaggttgaaaccaggagtttgtag

SEQ ID NO: 28512 - DNA, 2106 bp, synthetic construct
  source 1..2106: mol_type = other DNA; note = Synthetic coding sequence
atgatgaaacggcagctccaccggatgcgacagctggcccaaaccggcagcctcggccgaacgcctgaaacagcggagtttctgggcgaggacctcctgcaggtggaacagaggctcgaaccagccaaaagggccgctcataacattcacaagcgactccaggcttgcctacaaggccagtccggggctgacatggataaaagagttaaaaagctgccccttatggctctatcgacaactatggccgagagctttaaggaactcgatcctgactccagcatgggtaaggccttggagatgtcctgtgccatccagaaccaactggctcgcattctggctgaattcgaaatgacgctagagcgggatgttctccagccattgagtaggctcagcgaggaggagctccccgctattcttaagcataagaaatcactgcagaaattggtctccgattggaataccctcaaatcccggctgtcccaggcaacaaaaaactccgggagctcacagggcctaggtgggtctcccggatcgcactcccatacgaccatggctaataaggttgagaccctcaaggaggaagaagaggaactgaaacgtaaggtcgagcagtgcagagacgaatacctggccgacctctaccatttcgtaacaaaggaagacagttatgcaaactattttatcaggctgttggagatccaggccgactaccacagacgttctttatcctctcttgataccgccctcgcagaactgagggagaaccatggacaggccgatcattcccctagcatgacagctacccatttccctagggtatacggagtctctctggccactcacttacaggagttgggccgtgagatcgctctacctattgaagcctgcgtcatgatgttgctctcggaggggatgaaggaggagggactgtttcggttagctgcaggagccagcgttctaaagaggctgaagcaaaccatggcctccgacccgcacagtttagaagagttttgttcggatccacacgctgtggctggcgcactgaagagctatctccgcgaactcccagagcctctgatgacctttgacctttatgatgactggatgcgcgctgccagccttaaagaacccggagcgagattgcaggctctgcaagaggtttgttccagattgccgccagaaaacctatctaacttgagataccttatgaaatttctggccagactggccgaggagcaagaagtgaataaaatgacccccagcaacattgcaatcgtcttggggccaaatcttttatggccccctgagaaggagggggaccaggcacaacttgacgcagcatccgtctctagtatccaggttgtaggcgtcgtcgaggctttgatccaaagcgcagacacccttttccccggtgacattaatttcaacgtctctggcctgttctccgctgtgactctccaggacaccgtcagtgatcggctcgcatctgaagagctgccgagcaccgccgtgcccacccctgcaaccactcctgccccagcacctgcccctgcgccagccccagcaccagcgctagcctccgcggcaactaaggagcgtactgagtctgaagtacctcctaggccagccagcccaaaagtgacgagatcaccccctgagactgcggcacccgtagaagacatggctaggagaaccaagagaccggctcccgctcgcccaacaatgccccctccccaggtcagcggaagtcggagctcacctcccgctcctccgttaccccctgggtccgggagcccaggcaccccccaggctcttcctcgcagattagtgggctcgtccctccgtgccccaacagttccaccccctctgccacccaccccgcctcagcccgcaaggcgccagagccgtaggtcacctgcatcccccagcccagcgtcaccagggcctgcaagcccctcccctgtgtctctgagcaatcctgcccaggttgatcttggagcggcaactgctgaaggcggtgctccggaggcaataagcggcgttccaacccctccagccattcctccacagcctagaccgaggagcctggctagtgagacgaactag

SEQ ID NO: 28513 - DNA, 1818 bp, synthetic construct
  source 1..1818: mol_type = other DNA; note = Synthetic coding sequence
atggaggtaagagcatccctacagaagattgtttccaacggggatgagcagcttgagaaggcgatggaagaaattcttagggacagcgaaaaacggccatcgtctctattggtggattgccagagctcgtcggagatcagcgatcatagtttcggggatattcccgcttcgcaaaccaacaagccctccctccagttgatcctcgatccgtccaataccgagatctccacacctagaccatcctcaccgggaggtctgcccgaagaagattctgtgctctttaacaagctaacgtacttaggatgcatgaaggtaagttccccacggaacgaggtagaagccctgagagccatggccaccatgaaaagctcctcgcagtatcctttccccgtgaccctttacgttccaaatgttcccgaggggtcagtaaggatcatagaccagagctcaaacgtagaaatcgccagctttcccatctataaggtactgttctgtgcccgaggccacgacgggaccacagagtccaactgctttgctttcactgaaagctctcacggatccgaggagttccagatccatgtcttctcttgtgagatcaaagaagcagtgagccggattctgtacagcttctgtactgcctttaagcgatcaagtcggcaggtgtccgacgtgaaagattcagtgattcccactcccgatagcgacgtgttcactttttctgtgagcttagaggtgaaagaagacgatggcaagggaaacttcagtccagtcccaaaggatagggacaagttctactttaaacttaaacagggtatcgaaaaaaaggttgtcatcaccgtacagcagctctccaataaggagctcgccattgagagatgtttcgggatgctcttgtcgccaggccgaaatgtcaagaacagtgacatgcaccttcttgatatggaaagcatggggaaaagttacgatggtcgcgcatatgtgatcactggtatgtggaatcctaacgccccagtgttcctggcattgaatgaggaaactcctaaggacaagcaggtctacatgaccgtggccgtggatatggtggtgacggaagttgtggaaccagtgcgctttctgcttgagactgtcgtgcgggtctacccggcaaatgaacgattttggtacttcagtcgcaaaaccttcacagaaaccttcttcatgcggctcaaacagtctgagggaaaaggtcacacaaacgcgggtgatgcaatctatgaggtagtaagtctgcaacgcgaaagcgacaaagaggagcctgtcactcccacatcaggcggtgggccaatgtcaccccaagatgacgaggcagaagaagaaagtgacaacgaactatcgagtggcacaggggacgtcagcaaagactgtccagaaaaaatcttgtacagttggggtgagttgttggggaagtggcacagtaacctaggtgcgcgtcccaaaggcctgagtactctggtaaagtccggtgtgcccgaagctctcagagctgaagtgtggcagcttctggccggttgccacgacaaccaagccatgctggaccgctacaggatacttatcactaaacagcagatgaagttttcactgactcccagacaaacgatccatctggtgaagtacgagggctccatgaaggtgagtatgaccccatgtaatcagctgcaatttgacattagactcgatgtcctgatcacttatactttctgtttctctagtttccccgagcccgagctgtacaagtacgttctcaagcaccaactaattaaacggctgaacgcttgctag

SEQ ID NO: 28514 - DNA, 3120 bp, synthetic construct
  source 1..3120: mol_type = other DNA; note = Synthetic coding sequence
atggctgtgcaactggtacccgacagcgccttggggctgttaatgatgacagaagggcgtcgctgccaggtccacctcttggacgaccgcaagcttgaattgctggtgcaacccaagctcctggccaaggaattgttggatctggttgcttctcatttcaatctgaaggagaaggaatactttgggattgcctttaccgatgaaacgggtcatttgaactggcttcagctggacaggagagtgctggagcatgattttccaaaaaaatcagggcctgtggttctttacttttgcgtaagattttatatagaaagcatctcttatctcaaagacaacgcaaccatagagctgtttttcttaaatgcaaagtcatgcatttacaaagaactcattgatgttgactcagaagtggtcttcgagctggcgtcgtacatcctccaggaggccaagggagactttagttcgaacgaagtcgtgagaagtgatctgaaaaagctgccagcactccccacccaggccctgaaggagcacccctcactggcttattgtgaggatcgcgtgatagagcattacaagaagctgaacggacaaactagaggccaggccattgtcaattacatgagtattgtagagtccctgcctacgtacggcgtccactactatgctgtcaaagataagcaagggattccatggtggctcggactcagctacaagggaattttccagtatgattatcacgacaaagtgaaacccagaaaaatcttccagtggcgacaattggagaatctatatttcagagaaaagaagtttagcgtcgaggtgcacgatccgcgtcgggcttctgttactagacggactttcggacactccggaatcgcggttcacacgtggtacgcatgccctgcacttataaagtccatctgggcaatggccatttcccaacatcagttctacttggataggaaacagtcgaagagtaagatccatgcggcaagatctctatctgaaatcgctatcgatctgaccgagacaggcacactgaagacgagcaaactggctaatatgggcagcaaaggcaaaattataagcggctcttcaggttccctgctatcttccggctcgcaggaatcagattcaagtcagtctgccaaaaaagatatgctcgccgctctgaaatcacgtcaggaggccctggaagagactctccggcaacggctggaagaacttaaaaagctgtgcttacgcgaggctgaactaaccggaaagctgccagttgagtatcctctcgatccgggtgaagaaccccctatcgtgcgacgccgtattgggacagcctttaaattagatgaacagaagatcctccccaaaggcgaggaggctgaactggagcggcttgagcgcgagttcgccatccagtctcagatcacggaagccgcacggaggctcgcctcagaccccaacgtgagcaagaaacttaaaaaacagagaaaaaccagctacctgaacgcattgaaaaagctccaggagatcgaaaacgcaattaatgagaatcgcatcaagtccggcaaaaaaccaacccagcgggcatcactaatcattgatgacggcaacatcgcttctgaggacagttcactgagcgacgctctcgtgctcgaggacgaggacagtcaggtcacaagtactatttcgcccttgcatagtccgcataagggacttcctcccagaccccctagccataacaggcctccacctcctcagtccctagaaggcttaagacaaatgcactatcaccgaaatgactatgacaaatcacccataaagcctaagatgtggagcgagagcagtttggatgagccatacgaaaaagtcaagaagaggtcttcccattcacatagctcctcccataaaaggtttccttcaaccggttcctgcgccgaggcaggaggcggatccaatagtctacagaactccccaattcgcggactgccacattggaactcgcagagtagcatgcccagcacccccgatctgagggtgcgaagtccccattatgtacactcaacaagaagcgttgatataagtccaacacgtctgcactccctcgccctacacttcagacaccgctcgtccagtttagaaagtcaggggaagctgctcgggagtgaaaacgacactgggtctccggacttctacaccccaagaactcgcagtagcaatggttcagatccgatggatgactgcagttcttgtacctcacatagttcaagtgagcactactatccagctcagatgaacgccaattattccactctggccgaagactccccttccaaggctagacaaaggcagcgtcagcggcagcgggctgccggagcgctggggtcagcctccagtggaagtatgcctaaccttgccgctagaggtggcgcaggaggcgctggcggtgcaggagggggagtctacctgcacagccagagtcagccatcttcccagtatcgaatcaaggagtaccccctgtacatcgagggcggtgcgacccccgtagtggtgcgctccttggagagcgaccaggagggccattattcagtgaaagcccagttcaaaacgagtaattcatacacggctgggggtctgttcaaggaaagctggcgcggtggagggggagacgagggggacaccggcagactaacaccttctaggtcccagattctgcgcactcctagcctgggtcgcgagggagctcatgataaaggggctggcagggccgcagtgtccgacgaattacggcagtggtatcaacgcagcactgcgagccacaaagagcactccaggctgtcccacacgagttctacctcaagcgacagtgggtcacaatatagcacaagcagtcagtccaccttcgtcgctcacagcagggtcactcgcatgccccagatgtgcaaagcaacttctgctgccttaccacaatcacagcgctcaagcactccgtctagcgaaatcggcgctactccaccctccagtccacaccatatcctgacctggcaaaccggcgaggcaaccgaaaactcccctatcttagatgggtcggagtctcctccgcaccagagtactgatgagtag

SEQ ID NO: 28515 - DNA, 3228 bp, synthetic construct
  source 1..3228: mol_type = other DNA; note = Synthetic coding sequence
atggtggtggaggtggactcaatgcccgcagctagtagcgtgaaaaagccatttggccttcgaagcaagatgggaaaatggtgttgtaggtgcttcccatgctgtcgcgagagcgggaaatcaaatgtgggaacatccggcgatcacgatgatagcgctatgaaaacactgagatccaaaatgggtaaatggtgccgacattgtttcccctgttgccgcggaagcggcaagtccaacgtcggggcttctggtgatcatgacgattctgctatgaaaacactcaggaacaaaatgggaaagtggtgttgccattgcttcccttgttgcagagggagctcaaaatccaaggtgggcgcatggggcgattacgacgactccgcatttatggaaccacgctaccacgtcaggggagaagacctcgacaaattgcaccgagcagcttggtggggcaaagtgccgaggaaggacttgatcgttatgctcagggacaccgatgtgaataagcaagataagcagaaaagaacagcactgcatctggcttcggctaacggcaactctgaggtggtcaagctcctgcttgataggagatgccaattgaacgttctggataataagaaacgcacagcactgattaaagcggttcagtgtcaggaagatgaatgcgctcttatgctcctcgaacatgggactgatcctaacattcctgatgagtacggcaacactaccctgcattatgcaatctacaatgaagacaagctcatggctaaagccctgctgctgtatggcgctgatatagaatccaagaacaaacatgggctgacccccttgctgctgggagtgcatgagcaaaagcaacaggtcgtgaagttcttgatcaagaaaaaggccaatctgaacgcgctggatcgctatggtagaaccgctttgatccttgccgtgtgctgcggcagtgcaagcattgtatctttgcttttagaacaaaatattgatgtgtccagccaggacctctccgggcaaaccgcgagagagtacgctgtgagcagccatcaccacgtgatctgtcagcttctgtctgactataaggaaaaacagatgctgaagatatccagcgagaactccaaccccgagcaagatctcaagctcacgagcgaagaggagtcgcagcggtttaagggaagcgaaaacagccaacccgaaaagatgagccaagagccggaaatcaacaaggatggggatcgcgaggtggaagaggaaatgaaaaaacacgaatctaacaacgtaggcctgttagaaaatctgacgaacggggtgacagccggaaatggcgacaatggactgattccacagcgcaagtcacggacgcctgaaaaccagcagttccctgataatgaaagtgaggaatatcatcggatatgtgaactgctcagtgactataaggaaaaacagatgccaaaatattcctccgaaaacagcaaccctgaacaggacctcaagctcacttcagaggaggagtcacagcgactcaaaggttccgaaaatggccagcctgagaaaagatcccaggaacctgagattaacaaggacggtgaccgggaactggagaacttcatggccatcgaagagatgaaaaagcacagaagtactcacgtgggattccctgagaatctgacaaatggtgccaccgctggaaatggagatgatggcctcatcccccctcgcaagtctcgcacccccgagtcccagcagtttcccgatactgagaacgaggagtaccattcagacgagcagaatgacacccagaagcagttttgcgaggagcagaacacaggaattttgcacgacgaaattctgattcacgaagagaagcagattgaggttgtggagaagatgaacagcgagctgagcctttcatgtaagaaggagaaagacattctgcatgagaactcaacgctccgggaagaaatagccatgcttcgcctggaacttgacaccatgaagcaccagtcgcagctgcgcgagaaaaaatacctcgaagatattgaaagtgtgaagaagcggaatgataacctgttgaaagcactccagctgaacgagttaaccatggacgacgacaccgccgttctggtgattgacaacggtagtggcatgtgcaaggccggatttgcaggtgatgatgcaccgcgtgcagtgttcccaagcatcgtgggcagaccaagacagcagggaatgatggggggaatgcaccagaaggaaagttacgttggcaaggaggcgcagtctaagagaggaattttgactcttaaataccccatggagcacggtatcatcactaattgggacgacatggaaaagatctggcatcacacattctataatgagttgcgcgtggctcccgaagagcaccctgtgctattaacagaagccactttaaacccgaaggcaaaccgagaaaagatgactcagattatgtttgagaccttcaacacccctgccatgtacgtggccattcaggccgttctgtcgttgtacactagcggacggaccacaggcatagtaatggacagtggtgatggcgtgacacacactgtccccatttatgaggggaacgccctgccacatgcgacactgcggttagatctcgccggtcgcgaactgccggattatttgatgaagatactgaccgagcatggttatcgattcaccacaatggccgagagagagattgtccgcgacataaaagagaagctgtgctacgtcgctctggattttgagcaggaaatggccacagtcgcgtcctcctcttctctggagaagtcttacgagctcccggacggccaggtgattaccatcggaaacgaacggttccgctgtcctgaagctttgttccaaccttgtttcttgggaatggaatcgtgtggtatccacgagacaacctttaatagcatcatgaaaagcgacgttgacattcgaaaggacctatacacaaataccgtcttaagtggaggtacaactatgtaccctgggatggcccaccgtatgcagaaggaaatcgccgcactggccccttctatgatgaaaatccgaattattgctcccccaaagcgcaagtatagcgtgtgggttgggggtagcattttagcctctttgtcaactttccagcagatgtggatcagtaaacaggaatacgacgaatctggaccgtcaatcgtgcaccgcaagtgtctgtag

SEQ ID NO: 28516 - DNA, 1752 bp, synthetic construct
  source 1..1752: mol_type = other DNA; note = Synthetic coding sequence
atgctcagcgagtctaaagaaggcgaggaaaaggaggaagtaacgatggataccagtgagaacaggcctgagaatgatgtccctgagcctcctatgcctattgctgaccaggtgtccaacgacgatcgcccagaaggttctgttgaggacgaggaaaaaaaagaatcgtccctgccaaagtcgtttaagaggaaaatcagcgttgtgagtgccaccaagggagtgcccgcagggaactctgatacggagggtggtcagccgggtcgtaaaaggcgctggggcgcatctaccgccactacacagaagaagccgtcaatctcaattaccacggagagtctgaagtcactgatcccagatattaagcccctagcaggccaggaggccgttgttgacctgcacgctgatgatagtagaatcagcgaggacgagactgagagaaacggcgacgacggcacccatgacaaaggtctgaagatatgtagaacggttacccaggtggtgccggcagagggccaggagaatggccaacgcgaggaagaagaggaggaaaaagaaccagaagccgagcccccagttcccccacaggtgagcgtcgaggtggccttgcccccacctgcagagcatgaggtcaagaaagtaaccttgggagatacactcacccgaagaagcatttcccaacagaaatcaggcgtttccatcacgatcgatgacccggtccggaccgcacaagtcccctctcccccaaggggcaaaattagcaacatcgtccacatctcaaacttagtcaggccttttaccctaggccagctgaaggaattgctgggacgcacgggaacacttgtggaagaggcattttggatcgataagataaaaagccactgctttgtcacttattctacagtggaggaggccgtagcgacacggaccgccttacacggcgtcaagtggccccagtctaaccccaagtttctgtgcgcggactatgctgaacaggacgagctcgactatcataggggccttctggttgacagacccagcgagaccaagacagaagagcaagggatcccccgacccctgcatcccccacccccacccccagtacagcctcctcagcatcctagagctgagcagcgcgagcaagagagagctgtgagagagcaatgggctgaacgggagcgcgaaatggagcggagagaacggactcgctccgagagagaatgggatcgcgataaggtacgcgagggccctcgaagccggtccagatctcgcgataggcggagaaaagagagggctaagtccaaggagaaaaaatccgaaaaaaaggaaaaggcacaggaggaacccccagccaagctgctggacgatctcttcagaaagacaaaggctgctccatgcatctattggctgccccttaccgacagccaaatcgtacaaaaagaggccgagcgcgcagagagggccaaagaaagggaaaagaggaggaaggagcaggaagaggaggagcagaaggagagggagaaagaggctgagcgcgaacgaaatcggcagctcgagcgggagaagcgtcgcgaacactcccgcgaacgggaccgggaacgagaacgggagcgggaaagggatagaggcgaccgagatcgggatcgggaaagggacagagaaaggggtagagaacgggataggcgggataccaagcgccatagtcgcagcaggtccaggtctacacccgtcagagatcgtggtgggaggcgctag

SEQ ID NO: 28517 - DNA, 963 bp, synthetic construct
  source 1..963: mol_type = other DNA; note = Synthetic coding sequence
atgtctaaaagtgcttcccctaaggagccagaacaacttaggaagttgtttattggaggcctatcctttgagaccactgatgagagcctgagatctcactttgaacaatggggaacactgacagactgcgtcgtgatgcgtgatccaaatacaaagcgtagcagagggttcggattcgtcacttacgctaccgttgaagaagtggacgcggctatgaacacgactccccataaggtggacgggagggtcgtcgagccgaagcgggctgtcagccgcgaagactcccagagacccggagcccatctcacggttaaaaaaattttcgtggggggaataaaggaggatactgaagagcaccacctgagggattatttcgaacaatatggtaaaattgaagtgatcgaaataatgacggatcgcggtagcgggaaaaagcggggttttgcatttgtcacattcgacgaccacgactcagtcgataagatcgtgatacagaagtatcataccgtgaaggggcacaattgtgaggttagaaaagccctaccaaaacaggagatggccagcgcgagcagtagccaacgaggtcggcgaggttccggcaatttcggtggtggacgcggagatggattcggtgggaacgacaactttggccgagggggaaatttctccggacggggaggctttgggggatcctgcggaggcggaggttatggaggcagcggcgacgggtacaatggttttggcaacgatgggagtaatttcggagggggtgggtcttacaatgacttcggcaactataacaatcagagcagcaactttggtccaatgaagggagggaactttggaggccgaagttcgggtccgtacgggggtggcggtcaatattttgccaaaccccagaaccagggagggtacggggtcagctctagcagctcctcatacgggagtggcaggcgcttctag

SEQ ID NO: 28518 - DNA, 3294 bp, synthetic construct
  source 1..3294: mol_type = other DNA; note = Synthetic coding sequence
atggctgctgcggctgccgaacagcaacagttctacctgctcttgggcaatctcttgtcccccgataacgttgtgcgaaaacaagctgaggaaacctacgagaacattccaggccaaagcaaaattacctttttgcttcaagcaataagaaatactactgctgccgaggaagcgaggcagatggccgctgtgctgctgcgcagactgttgtccagtgccttcgatgaggtgtaccccgctctgcctagcgacgtgcaaactgccattaagtccgaattgctaatgattatccaaatggagactcagtctagtatgcgcaagaaagtgtgcgacatagcggctgagctagcaagaaatctgatagacgaggatggcaacaaccagtggcctgagggccttaagtttctgttcgatagcgtttcttcgcagaatgtgggattgagagaggccgctctgcatattttttggaattttcctggtatttttggtaatcagcaacagcattatctggacgtcatcaagaggatgttggtgcagtgtatgcaggaccaggagcaccccagtatccgtaccctgtcggcaagggctacggcagcatttattctcgccaatgaacataatgtggctctgtttaagcacttcgctgatttactacccggttttctgcaggcagtgaacgattcctgttatcagaacgatgactccgtgttaaaaagcctggtcgaaatcgcggatactgtaccaaaatacctcagaccacacctggaagcaaccctgcaactgagtctgaaactgtgtggagacacatcactgaacaatatgcagcgacagctggctctcgaagttatcgtgaccctctcagaaaccgccgctgcgatgctgagaaagcacacgaatattgtcgcccagaccataccccaaatgttggcaatgatggtcgatttagaagaggatgaggactgggctaatgccgatgagctggaagacgatgatttcgattcgaacgccgttgctggtgaaagcgctttggacagaatggcctgtgggctcggtggaaagctggtcctccctatgattaaggaacacattatgcaaatgctgcaaaacccggactggaaataccggcacgcaggactgatggccctttctgcaattggggaagggtgtcaccagcagatggagggcatacttaatgaaattgtgaactttgtgctcctctttttgcaggacccccacccaagagttaggtatgccgcttgtaatgcagttggacagatggccacagacttcgcaccaggatttcagaagaagttccacgaaaaggtcattgccgcattgctacagaccatggaagaccagggtaatcaaagagttcaggctcacgcagctgctgcattgatcaactttactgaggattgtcctaagtctctgctgatcccatacctcgacaaccttgtcaagcacctgcactccatcatggtgcttaagctgcaggagttgatccagaagggcaccaagctggtgctcgaacaggtcgtgacctcaattgcaagcgttgctgacactgccgaagaaaagtttgttccttactacgacctgttcatgccctctctcaagcatatcgtggagaatgccgtccaaaaagagctccgcctcctccggggaaaaacaatcgagtgcattagtctgatcggccttgccgtgggcaaagaaaagtttatgcaagacgccagcgatgtaatgcagttattgctgaagactcagaccgatttcaacgacatggaagatgacgacccccagattagttatatgataagcgcatgggccaggatgtgcaaaatcttgggaaaggagttccagcagtatttacctgtcgtaatggggccactcatgaagacggcttctataaaacccgaagtggccctgctcgacacacaagacatggaaaacatgtctgacgatgatggctgggaattcgtaaacctgggggaccagcaatcctttgggatcaagacagctgggctggaagagaagtcaactgcctgccagatgctggtgtgttacgcaaaggaactcaaggagggttttgtagagtacacagaacaagtcgtgaagttgatggtcccactgctgaagttttacttccatgacggtgttcgggtagcagccgctgagagcatgcctcttcttctggaatgcgccagagtgagagggccagaatacctgactcagatgtggcatttcatgtgtgacgccctcatcaaggctatcggtactgaacccgacagtgacgtcctgagcgagatcatgcattccttcgcgaagtgtattgaagtgatgggagacggctgcctgaacaatgaacacttcgaggagctggggggaatccttaaggctaagctcgaggaacactttaaaaatcaagagttgcggcaggtgaaacggcaggacgaggactatgatgaacaggtggaggagtcactacaggacgaggatgataatgacgtttatatcctgactaaggtgagcgacatactgcactccattttctcatcttacaaagagaaagtccttccctggttcgaacagctcttgccattaattgtcaatttaatctgccctcaccgcccatggccagaccgccaatgggggctgtgcatttttgatgatgtaattgagcattgttccccggcatccttcaaatatgccgagtacttccttcgacccatgctccagtacgtttgcgataattctccagaggttcggcaggccgcagcgtacggtcttggagtgatggctcagtacggaggcgacaactacagacccttctgtacagaggcacttcccctgctggtcagggtgatccaatcagccgactccaagacgaaggaaaatgtaaatgctacggagaattgtatcagcgccgttgggaaaatcatgaagtttaagcctgactgcgttaatgttgaagaggtgcttcctcattggctgtcctggttacctctgcatgaagataaagaggaagccgtccaaacatttaactacctgtgtgatctaatagaatcgaatcaccccatcgtcctcggtccaaacaacaccaatttgcccaagatcttctctattatagcagaaggcgaaatgcacgaggcaatcaagcacgaagacccgtgtgccaagcgcctcgccaatgtcgtcagacaggtccagacctccggcggactctggactgagtgcattgcccagctctcacctgaacaacaggctgcaattcaggagcttcttaactccgcttag

SEQ ID NO: 28519 - DNA, 2715 bp, synthetic construct
  source 1..2715: mol_type = other DNA; note = Synthetic coding sequence
atgttccctgcccttgagactcatttaaaacagaccatacctgacccttatgaggacttcatgtaccgacacctgcagtactatggctatttcaaggcgcagcggggatctctgcctaactcagcgacacatcagcacgttagaaaaaataatccccaatgccttctcaatggctcgctcggagaaaaggacgatctgatccctgatacattgcagaaggaaaagcttctgtggcccatttccctcagttccgccgttcatcgacaaatcgaggcaattaaccgcgacttccacagttgtctgggctggatgcaatggcgaggcctgagcagtctccagccgccaccacctaggttcaaggactctcccgcatcggccttcagggtggccggtattaccgatagccacatgctgtcgctccctcacctgcggtctcgccaattgctgtacgacgagctggacgaagtgaatcctcgccttcgggaacctcaggaactcttttctatcttgagcacaaaaaggccactgcaggcccctcgctggcccatagaatgcgaagttataaaagaaaatatccaccatatcgagtgggcccctccccagcccgagtacttctaccagcccaagggtaacgaaaaagtgcccgagatcgtcggcgaaaagaaaggcaccgtagtgtaccagctcgactcggttccaattgaaggttcctactttacatccagcagagttggtgggaaaagaggcatcgtgaaagagctagccgtaactctccagggtcctgaagataataccttgctgttcgagtcacgcttcgaaagtggaaatctccaaaaggccgtgcgcgttgacacatacgaatacgagctgactctaagaacagacctatatactaacaagcacactcaatggttctatttcagagttcaaaacacacgaaaggacgctacttacaggttcaccatagtgaacctcctcaaaccaaaaagcttatatactgtgggcatgaaacctttactctactctcagctcgacgcaaatacaaggaatattggatggcgtcgggagggcaacgaaataaaatactacaaaaataatactgatgacggccagcagcccttttactgtctgacttggaccatccagttcccttacgaccaggatacctgcttttttgcccatttctacccttacacgtacaccgacctgcagtgctaccttctcagcgtcgcaaacaatccaatacagtcacaattctgtaagttacagaccctgtgcagaagtctggctgggaacaccgtgtatctactgaccatcaccaacccatcacagacgccgcaggaggcagccgcaaaaaaggccgtcgtgctgagcgcacgggtgcatccaggtgaaagtaacggcagctgggttatgaaaggattccttgactttatcctctcaaattcgccagatgctcagctgcttcgcgacattttcgtcttcaaagtgctcccaatgttaaaccccgatggcgtcatcgtggggaattatcgatgttcccttgctgggcgtgaccttaatagacactataaaacaatcctgaaggagagctttccgtgcatctggtacacccggaacatgattaagcgcctcttggaagagcgagaggtcctgctgtactgtgattttcacggccatagcaggaagaataacatatttttgtacggctgtaacaacaacaatcgcaagtactggcttcatgagagagtctttccgctgatgctgtgcaaaaacgcacctgataagttcagttttcatagctgtaactttaaggtacagaaatgcaaagaaggaaccggcagggttgttatgtggcgtatgggaatccttaactcgtatacaatggagtccaccttcggtggctctactctggggaacaagagggatacccactttactattgaagacttgaagtcattggggtatcacgtctgcgacactttgttggacttctgtgaccctgatcagatgaaattcacgcagtgcttagccgaattgaaggagcttctgcgacaggaaattcataagaagtttcacgagctcggtcaggacgttgacctggaggggtcctggtcagatatttcccttagtgatatcgagtcaagaaactctacctcaggcagtgactcttcactgtccgatgggctgcctgtccatctcgccaacatagccgatgaactgacgcaaaagaagaaaatgtttaaaaagaagaaaaagaagagcctgcagacacgaaagcaaagaaatgaacagtaccagaagaagaacctgatgcagaaattgaagcttaccgaggacacctccgaaaaagctggctttgcatcgaccctacagaaacaacccacattttttaagaatagcgaaaacagcagtttccttccaatgaaaaatgaaaatcctagattaaatgagacgaatctgaacagacgagacaaggatacgccgctcgacccgtcaatggccactctcattcttcccaagaataaaggcagaatgcagaacaaaaaacccggttttacagtatcgtgctcaccgaaacgcacaatcaacagcagccaggagcccgctcccggtatgaaacccaactggccacggagcagatacccagccactaaacgaggctgcgctgcaatggcagcctatcctagtctgcacatttacacctatccatag

SEQ ID NO: 28520 - DNA, 789 bp, synthetic construct
  source 1..789: mol_type = other DNA; note = Synthetic coding sequence
atggccctgtcactgggatggaaagcacatagaaaccactgtggtctgttactgcaagcgctaagatcaagcgggctactgctgtttccttgtggccaatgtccatggcgcggagcaggatccttcctcgaccccgagattaaagctttcttggaggagaatacagaggtgacttctagcggctctctcaccccggagatccagctccgtctgttgaccccgagatgcaagttttggtgggagagggctgacctgtggccccacagtgacccatattgggcgatttactggcctggtgggcaggcgctttccagatatctcctcgacaaccccgacgtagtgaggggcaagagcgtgctggacttaggtagcgggtgcggggcaactgctatcgcggcaaagatgagcggcgcaagtcgcattctcgccaacgacatcgatcctattgcgggtatggccatcaccctgaattgcgaactgaacagattgaaccctttccccattctcattcagaacatactgaacctcgagcaggataagtgggacttggtggtgctgggcgatatgttctatgacgaagatctggcggattcactgcaccagtggctgaaaaaatgcttctggacttaccggacaagggtactcattggggaccccggtcggccacaattctctgggcattcgattcagcaccatttacataaggttgtcgaatactctttgttggaatctacgagacaggaaaacagcggattgacgacctctacagtctgggggttccaaccgtag

SEQ ID NO: 28521 - DNA, 2619 bp, synthetic construct
  source 1..2619: mol_type = other DNA; note = Synthetic coding sequence
atgaattatcccggacgcggaagtccccgatcaccagagcacaacggcagaggaggcggtgggggtgcttgggaactaggaagcgatgctcgacccgcattcggaggcggtgtgtgttgtttcgaacatctcccaggaggcgaccctgacgacggtgacgtacccttggcacttctccgcggagagcccggattacaccttgccccaggaaccgatgatcacaatcaccacctcgcacttgatccctgtctgtcagacgaaaattacgatttctcgagcgcggagagtgggagctcactgcgttactatagcgaaggtgaatctggaggcggaggatcctctctgtctctgcacccaccgcaacagcctcctcttgtgccaacgaactccggagggggaggggctacagggggatcccccggagagcgaaagaggacaagactggggggtcccgctgctagacacagatacgaagttgttaccgaactgggaccagaagaagtccggtggttttataaggaggataagaagacatggaaacccttcattgggtatgattccctccgaattgaactggcctttcggactctgctgcagacaaccggtgctcgaccccagggaggggacagagacggggaccatgtgtgtagtccaacaggccctgcctcttcgagcggcgaggacgacgacgaagaccgcgcttgcggcttctgtcagagcactactggtcacgagcctgaaatggtcgaattggtgaatattgaaccggtgtgcgtacgtggcggtctgtatgaagtagacgtgacgcagggtgagtgctatccagtctactggaatcaggccgataaaatccctgtcatgagaggccagtggtttatcgacgggacatggcaaccgttggaagaggaagaaagtaatcttatcgaacaggagcacctgaactgcttcagggggcagcagatgcaggaaaacttcgatatcgaagtgagcaagtccattgacggcaaggacgcggtgcactctttcaagctctcgagaaaccatgtggactggcactctgtcgatgaggtgtatctgtattccgatgcaacaaccagtaagatagctcgaacggtaacacagaagctcggcttctccaaggcaagttcttcagggacaagactgcatcggggttacgtggaagaggcaaccctggaagacaagccctctcagactacccacattgtatttgttgttcatggcattgggcaaaagatggaccaggggagaatcatcaaaaatactgctatgatgcgtgaagcagctaggaagatcgaggagaggcatttcagcaatcacgctacacacgttgaattcttacctgtcgagtggcggtcaaagcttaccttggacggtgacactgtagactccattaccccggataaggtgagaggactgcgtgacatgttaaattcgagtgccatggacatcatgtattacacctccccactgtatcgcgacgaactggtgaagggcctgcagcaagaactgaaccgcctctactcgttgttttgttctcggaaccctgactttgaggagaaagggggtaaggtctctatcgtctctcacagtttgggatgcgtgattacgtacgacatcatgaccgggtggaatccagtgcgcctgtacgagcagctcctgcagaaggaggaagaactcccggacgaacgttggatgtcctacgaagaacgacacctactggacgagctctatatcacaaagagacgactgaaagagattgaggaacggctgcatggactgaaagcaagtagcatgactcagacccctgcactgaaattcaaggtggaaaactttttttgtatgggcagtccgctggctgtctttctggcacttagaggtatcaggccaggaaacacgggaagccaagaccatatcctgcctagagagatctgcaatcgcctgctgaacatatttcacccaacagatcctgtggcataccgcctggaacccctcatcttgaagcactactctaatatctcacccgtgcaaattcattggtacaatacatcaaacccgctcccttacgagcatatgaagcctagcttcctgaacccagccaaggaaccaacatccgttagcgaaaacgagggaattagcacgatcccttcaccagtgacctcaccagtacttagcagacgtcactacggcgagtccattacaaatattggcaaagcctccattttgggggctgccagcattggcaagggactcgggggaatgctgttctctcgatttgggaggtcttcaaccacccagtcttccgaaacctcaaaagactcaatggaggatgagaagaagccggtcgcttcgccctctgcaacgaccgtgggaacccagactctcccgcattccagttccggcttccttgatagtgcattagaacttgatcaccggatcgacttcgagttaagggaaggactggtggaatccaggtattggtccgccgtaacaagtcatacagcctactggagctccctggacgtcgcgttgtttctactgactttcatgtataagcatgagcatgatgatgacgcgaaacccaacctggatcccatctag

SEQ ID NO: 28522 - DNA, 1461 bp, synthetic construct
  source 1..1461: mol_type = other DNA; note = Synthetic coding sequence
atggtgagtcacacttttcacatgaggaccgaggagagcgacgcctcccaggaaggcgacgacctccccaagagcagcgccaatacatcacacccaaagcaggacgactcgccaaaatcctccgaggaaaccatacaaccgaaggagggtgacatccctaaggccccagaggagacaatccaatctaaaaaagaagatttgccaaaatccagtgaaaaggctatccaaccgaaggaaagtaacatccccaagtctagcgctaaacctatacaaccgaaacttggaaacatcccaaaggcatcagtcaagccttctcaacctaaggagggagatatccctaaggcgcctgaagagactatacagagtaagaaagaggacctccccaaatcttctgaagaggccatccagcccaaggaaggcgacattcctaaatcttccgctaaacctatacagcccaaactcggaaacatagccaagacctctgtgaagcctagtcagcctaaggaaagcgatatacctaagtctcctgaagagaccatccaaccaaaagagggtgatatccccaagtcctccgccaaacccattcaaccgaagctcgggaacatccctaaggcaagcgtgaagccaagccagcccaaagaaggggacattagtaaatcccccgaagaggccattcagcccaaagagggcgaccttccgaaaagcctcgaagaggccatacaacccaaagagggagacatccctaagtcgccggaggaggccattcagccgaaagagggcgacattccaaaaagcttggaagaagcaatacaacccaaagagggtgatatcccaaagagtcctgaggaaactatacaacccaaaaagggagacattcctaagagccccgaggaggccatccagcccaaggagggagatatccctaagagcccaaaacaggccatccagcccaaagagggcgatattcctaaatccctggaggaagccattcctcccaaagaaatcgacattccaaaaagcccagaggagaccattcaacctaaagaggacgactctcccaagtccctagaggaggctactccgtccaaggaaggtgatattctgaaacctgaggaggaaacaatggagttccccgagggagacaaggttaaagtgatactctccaaagaagatttcgaagccagcttgaaggaggctggggagaggcttgttgccgttgactttagcgcaacttggtgtggcccatgtcgcaccatccgcccttttttccacgccctgagcgtgaaacacgaggatgtcgttttcctcgaagttgatgccgacaactgcgaagaggtagttcgagagtgtgcgatcatgtgcgtccccactttccagttctacaaaaaagaggagaaagttgacgagttgtgcggagctctcaaagagaagctggaggccgtgattgccgaacttaaatag

SEQ ID NO: 28523 - DNA, 1005 bp, synthetic construct
  source 1..1005: mol_type = other DNA; note = Synthetic coding sequence
atggctgcctctggatccgggatggcgcagaagacgtgggaattagcaaacaatatgcaggaggcccagtccatcgatgagatttacaagtacgacaagaaacagcaacaggagatcttggctgccaagccttggacgaaggaccaccactacttcaaatactgcaagatctctgcactggccctgctcaaaatggtgatgcatgccagatccggcggaaatctggaagtgatgggcctcatgctcggcaaggtagacggtgagacaatgattattatggacagtttcgccctcccggtcgagggaacggagacccgagtcaacgcccaggccgcagcttacgaatacatggccgcttacatcgaaaacgccaagcaagttggcagactcgagaacgccattggttggtatcactcgcacccaggctatggctgctggcttagtggcattgacgtgagtacacagatgctgaatcaacagttccaggagccattcgttgcagtggtgattgacccaacaagaactatttccgccggtaaggttaacctgggcgctttccgaacttaccccaagggttataaacccccagacgagggaccatcagagtaccagactatcccactgaataagatagaagactttggagtgcattgcaaacaatactacgcactggaagtatcatactttaagtccagccttgatcgcaagctgctggagctcctgtggaataaatactgggttaatacactaagcagcagtagtctgctcacaaatgccgattatacgacaggccaagtcttcgatctgtctgagaaattagagcaatctgaagcccagctcggtagagggtcattcatgctggggttggagacacatgatcgcaaaagtgaagataaactggccaaggccacccgcgattcttgtaagacaactatagaggcaatccacgggctgatgtctcaggtaatcaaagacaaacttttcaaccagatcaatattagttag

SEQ ID NO: 28524 - DNA, 1350 bp, synthetic construct
  source 1..1350: mol_type = other DNA; note = Synthetic coding sequence
atggtcatggagaagccgagtccactgctagttggtcgtgagtttgtgaggcagtactacactttactgaacaaagcaccagagtatctgcaccggttttatgggagaaacagttcctatgtgcatggtggggtcgacgcttcaggcaaaccccaagaggcagtgtatggccagaacgacattcatcacaaggtgctttcactcaacttctcagagtgtcacaccaagatcaggcatgtggacgctcatgcgacactgtcggatggcgtggtggtgcaggtgatggggctgctgtccaatagcggacagccggaacgcaagtttatgcagacatttgtgttagcacccgagggctcggtgcctaacaagttttatgtgcataacgacatgtttcgttacgaggacgaggtgttcggcgactccgagcctgagctggacgaggaatcggaggatgaagtcgaagaggagcaggaagaacgacagcccagccccgagcccgtgcaagaaaacgccaattctggatattacgaagcgcacccagtgacaaatggcatcgaggagccactcgaggagagctcacatgagcccgaacctgaaccagagtctgaaacaaaaacagaggaattgaagccgcaagtcgaggaaaagaatctggaagagctcgaagagaagagcacaacaccgccaccggcagagccagtctccctcccccaggaacccccaaaacccagagtagaagcgaagcccgaggtgcagagtcagcccccaagagtgcgggagcagcgcccacgggagagacctggattcccacctcggggacctcggccaggacggggtgatatggaacagaatgattctgacaaccgtcgaattatcaggtatcccgactcccaccagctgttcgtgggcaacctccctcacgacattgatgagaatgagctcaaagagttcttcatgagctttgggaatgtggtcgaactgcgcattaataccaaaggcgtgggtggtaagctgccgaacttcggatttgtggtgttcgacgacagtgaacctgtacagagaattctgatagctaaacccatcatgttccgcggagaggtccgtttgaacgtggaagaaaaaaaaaccagagcagcccgagaacgagagacccggggaggtggcgacgaccgcagagacattcgacgtaacgatcgtgggcctggcggaccacgagggatcgtgggtgggggaatgatgagggatcgagatgggagggggcctcccccaagggggggaatggcccagaagcttggatccggtcgcggtaccggacagatggagggcaggtttactggacaacgccgttag

SEQ ID NO: 28525 - DNA, 333 bp, synthetic construct
  source 1..333: mol_type = other DNA; note = Synthetic coding sequence
atggaagagatacctgcgcaagaagctgcaggttcaccgcgagtgcagttccagagcttagaaacacagagcgaatgcctctccccagagccacaattcgtccaggacacagatatggagcaaggactgacaggcggtatcttgttacggctgcccactacccggattcactcagtgaatagttgccccgcactgagccacactcaggcctctgcattttccggggaaaccctggcagtgttgaccgctggcatctccaagagatggccaaagtaccgtctgccaatcgacatcgccaggccctgtagtgaaaccccctttccacgcttgtag

SEQ ID NO: 28526 - DNA, 822 bp, synthetic construct
  source 1..822: mol_type = other DNA; note = Synthetic coding sequence
atgggccagaaagttaccggcggaatcaaaacggtagacatgcgcgacccaacctatcgtccactgaagcaggaattgcaaggcctggattattgcaaaccaacgaggctggacttgctgctggatatgcctcctgtcagttacgacgtgcagttgctgcattcctggaacaataacgacaggtcgctgaacgttttcgttaaggaggatgataagttaatattccatagacacccagtggctcagtcgacagacgctatccgcggaaaggtaggttatacaagagggctgcatgtgtggcaaataacttgggccatgcgacagagaggaactcacgccgtcgtgggggtagccaccgcggatgcaccattacacagcgtcggctatactaccttggttggaaataatcacgagagctgggggtgggacctcggcagaaaccggctctatcatgatgggaaaaatcagccatccaagacatatccagcctttctcgaaccagatgagactttcattgtgcctgattccttcctggtggcccttgacatggatgatgggactctgtctttcatcgtggatggccagtatatgggggtggctttccgaggacttaaggggaaaaaactctacccggtggttagcgcagtatggggccattgcgagattaggatgaggtatctgaacggcctagatcccgagcccctcccactaatggacctctgcaggcgaagcgtacggctggccctgggcagagaaagactcggcgaaatacacaccctgcccctccctgctagcttgaaggcatatctgctgtatcagtag

SEQ ID NO: 28527 - DNA, 2916 bp, synthetic construct
  source 1..2916: mol_type = other DNA; note = Synthetic coding sequence
ctcagccggagagtaccctgtgtaaggaggggatgtcggcctcctctgcctcctctaccaggatctcagagtcgggcttggagcagagacagagaagcccctttagaccccggtaggccggctcagtctggacgtaggcccacttctcgcagcgtgtctcatgcttgcagctggaacgggggatcattagacccactggaaggaaccccagcccttttgaggtccgccgagcggctgatgcggaaagtgaagaaactgcgccttgataaggagaacacaggtagttggaggtcatttagtctgaatagcgaaggggcagagaggatggctaccaccgggacccccaccgctgacagaggggatgcagctgccacggacgacccggctgctcggttccaggtgcagaagcacagctgggacggacttaggtctatcatccatggcagtagaaagtatagcggactgatcgtgaacaaggccccacatgattttcaattcgtgcagaagacggacgagagcgggcctcactcccaccgactgtactacttaggcatgccctacgggtcacgcgagaatagtttgctctactcagagatacccaagaaggtgcgtaaagaagcactcctgctactgagttggaagcagatgctggaccacttccaggccacaccacaccatggcgtgtattcccgcgaggaggagctgctccgagagcgaaaacgcttaggcgtgttcggcatcacgagctatgatttccacagcgagagcggactgtttctgttccaggcctccaacagtcttttccactgtagagatggaggcaagaatgggtttatggtttcccccatgaaacctttggaaatcaaaacacagtgctccggacctagaatggacccaaagatctgcccggctgatcccgcttttttttcgttcatcaacaattccgacctgtgggttgccaatattgaaaccggggaggagaggaggctcacattctgtcaccagggcctgagtaacgtgctggatgacccaaagagcgctggagtggccacatttgtgatccaggaggagttcgacaggttcaccggttactggtggtgcccaacagcgtcttgggaggggtctgaaggactgaagacactcagaatcctgtacgaagaggtggatgaaagcgaagttgaggtcatccatgtcccgtcgcccgcacttgaggagcggaagaccgacagctacagatatccaagaacaggtagcaagaatcctaaaattgcactcaagcttgctgagttccagacagacagtcagggcaaaatcgtttcaacgcaggagaaagagctggtccagccatttagctcgctattccccaaggttgaatacattgccagggcgggatggacccgtgatggcaagtacgcttgggcaatgtttttagatcggcctcagcagtggctccagctcgtgctgctgccgccagctctgttcatcccgagtaccgagaacgaagagcagcgtcttgcctccgcacgcgctgttccccgtaacgtgcaaccatacgtggtgtatgaggaagtgacaaatgtgtggattaacgtccatgacattttctatccctttccgcagtcggagggtgaggacgagctctgcttcctgcgagccaacgagtgtaaaaccggcttctgtcacctgtacaaggtcacagccgtactcaaatctcaggggtatgattggagcgagcctttctcccccggagaagatgagtttaagtgcccgatcaaggaagagatcgctctgaccagcggagagtgggaagtgctcgcaagacacggcagcaagatctgggttaacgaagagaccaaattagtttacttccagggcaccaaggacacccccctcgaacatcacctctacgttgtttcttatgaagccgcaggtgaaattgtacgtctgacgacacctggatttagccacagttgcagcatgtcccaaaatttcgacatgttcgtctcacactattctagtgtctccacacccccttgcgtgcacgtatacaagctcagtggtcccgacgatgaccctctccataagcagcctaggttctgggcctccatgatggaggcagcatcgtgtccccctgactacgtccccccagaaatctttcacttccatacgcgaagcgacgtgcgtctgtacggcatgatatacaaacctcacgctctacagccaggcaagaaacatccaactgtgttgttcgtgtacgggggtccgcaagtgcagctggttaataatagcttcaagggaataaagtacctcaggcttaacacgcttgctagcctgggctacgctgtagtggtgatcgacggcagaggatcctgtcagcgaggcctccggttcgagggggcactgaagaaccaaatgggtcaggtggagattgaggatcaggtggagggcttgcagttcgtggctgaaaagtacgggtttattgaccttagccgggtggccattcatggatggtcctatggtgggttcctgtctctgatgggcctgattcacaaaccacaggttttcaaggtggccatcgccggagctccagtgaccgtctggatggcctatgatactgggtacacagaacggtatatggacgtccctgagaataaccaacatggatatgaggccggaagcgtcgcactgcacgtggagaagctcccaaacgaacctaacagactgctgatccttcatggctttctggacgaaaatgtgcacttttttcacacgaatttcctggtgtctcagttgattcgggctggaaaaccctaccaattgcagatatatccgaatgagagacattccattagatgccctgagtcaggcgagcactatgaggtgaccctgttgcattttttacaggagtacctgtag

SEQ ID NO: 28528 - DNA, 2592 bp, synthetic construct
  source 1..2592: mol_type = other DNA; note = Synthetic coding sequence
atgggcaatagagagatggaggaacttattccgctggtcaacagacttcaagacgccttctcagctctgggccagagttgcctcctggagctgccacagatcgccgtggtcgggggacaatctgctggtaagagttccgtattggagaacttcgttggcagagactttctaccaagaggcagtggcatcgtgacaaggcgacctctggttctccagttagtcacttctaaagcggagtatgctgagttcttacactgcaaagggaaaaaatttacggattttgatgaagtcaggctcgagatcgaagccgagaccgatagagtgaccggcatgaacaagggaatcagctctatcccaatcaacctgcgagtttatagccctcatgtgttgaacttaaccctgatcgatttaccgggaataacaaaagtccctgtgggagaccagccaccagatattgagtaccagattcgggaaatgataatgcaatttatcaccagggaaaattgcctcattttggccgtgactcccgcaaacacagaccttgccaactctgatgcattgaaactcgctaaggaggtggacccccagggactccgcactattggggtcattactaagctggacctcatggacgagggtacagacgcacgcgatgtactcgagaacaaattgctccccttacggcgaggttacgttggggtcgtgaatagatcacagaaggatatcgacggaaaaaaagatattaaagcagcaatgctcgccgaacgcaagtttttcctatctcatcctgcctatcgacacatcgccgaccgaatgggaactccccacctccagaaggtgctgaaccagcagctgacaaatcatattcgggacacactgccaaattttagaaataagcttcagggtcaactgctatccatcgagcacgaggtggaggcttataagaactttaaaccggaagatccaactcggaagactaaggcattgcttcagatggtgcagcagttcgccgtagactttgaaaagagaatcgagggatctggggaccaggtggatacactagagcttagcgggggagctaaaattaaccggattttccacgagcgcttcccattcgagattgtgaagatggaatttaatgagaaggaacttaggcgtgagatttcgtacgccattaaaaatatacatggaatccgcacggggctgttcacacccgacatggcatttgaggctattgtaaaaaagcagatcgtcaagctcaagggtccaagcctgaagagtgtcgatctggtaatacaggagctgataaacactgtgaagaaatgtacaaagaaattggcaaacttcccaagactgtgtgaggaaacggaacgtatcgtggccaatcatattcgcgagagggaagggaagaccaaggaccaagttctcttgctgatcgatatccaggtttcttacatcaacacaaatcacgaagacttcatcggctttgctaacgcacaacagcggtcctctcaagtgcacaagaaaacaacggtcgggaatcaggttatccgaaagggttggttgacaatctcaaatatcgggattatgaaaggtggcagcaagggctattggttcgtcctgactgccgagtcactctcttggtacaaagacgatgaagagaaggagaagaaatatatgttgccattagacaacctgaaggtccgtgacgtcgaaaagtctttcatgtcctccaaacacatattcgccttatttaataccgaacaacggaacgtttacaaagattatcgctttctggaactggcttgtgacagtcaggaggacgtcgatagctggaaggcatccctgctccgtgcaggggtttatccggataagtctgtcggcaataacaaagctgagaacgatgagaacggccaagccgagaatttcagcatggatccgcagctggagcggcaggtcgaaactatccgaaacttggtggattcttacatgagtatcattaataagtgtattcgagaccttattcccaagaccatcatgcacctgatgataaacaatgttaaggattttatcaacagtgaattactggcccagctgtattctagcgaggatcaaaatacccttatggaagagagtgcggaacaggcccagagaagagatgagatgctgaggatgtaccaagcccttaaagaggccctcgggatcattggtgacatctccaccgccaccgtttcgaccccagcaccacctcctgtggacgatagttggatccagcactcacggagatcaccccctcccagcccaaccacacaacggcgaccgactctgtccgcacccctggccagacccactagcggaaggggaccagcccctgctatccccagccctggcccacattccggagctcctcctgttccatttcggccaggcccattgcctccgtttccttcaagctcagactcctttggtgcgcctcctcaagtgcctagtcgcccaaccagagcaccccctagtgtgcccagccgcaggccacctccctctcccacccggcctacgatcataagaccacttgaaagcagtcttctggactag

SEQ ID NO: 28529 - DNA, 1263 bp, synthetic construct
  source 1..1263: mol_type = other DNA; note = Synthetic coding sequence
atgctaaaggctgtgatcttaatcgggggaccacagaaaggcaccaggttccggcctctctctttcgaggtacccaaacctttattccctgtggccggtgtgcccatgatccagcatcacatcgaagcctgcgcccaggtgccgggtatgcaggagattctccttatcggtttctaccagccagacgagcccctgactcaattccttgaggctgctcagcaggagttcaatctgccagtccgctacctccaggagttcgccccacttggcacaggaggaggcctgtaccattttcgggaccagatactggctggctctcccgaagctttctttgtgttaaacgccgacgtatgttccgattttcccctcagcgccatgctggaagcccaccgcagacaaagacaccctttcctgcttctgggcacaaccgcaaatcgcacacagtcattgaattatggatgtatcgtggaaaatccacagacccacgaagttctgcactacgtagagaagccctcaacttttataagtgatatcatcaattgcggcatctacttgttcagccccgaggccctcaagccgctgagggacgtatttcagaggaaccaacaggacggtcagctcgaggattctcctggcctgtggcccggtgctgggacaatcaggcttgaacaggatgttttttctgcactggccggacagggacagatctacgtccacctgactgatggtatatggtcacaaatcaagtcagctggatctgcactctacgcaagtcgcctctacctgtcaaggtatcaggatactcatccagaacgccttgcaaaacacacacccggagggccttggattcgaggtaacgtatacatccatcctaccgccaaagtggccccatcagccgtactggggccaaatgtcagcattggtaagggcgtgacggtgggagaaggcgtgagactgcgggagtccatcgtcctgcacggcgctacgctgcaagaacacacctgtgtgctccactccatcgtcggatggggatctacggtggggagatgggcccgagtggaaggtacacccagcgacccaaacccaaacgatcccagagcgagaatggacagcgaaagcttgtttaaagacggaaagctgcttccagcaattactatcctcggctgtcgtgtccgaattcctgccgaggtcctgattctcaactccatcgtgctgccccacaaggagctctcacggtcgtttacaaatcagatcattctctag

SEQ ID NO: 28530 - DNA, 2481 bp, synthetic construct
  source 1..2481: mol_type = other DNA; note = Synthetic coding sequence
atggttgctcccgtcttggagacatcccacgtgttctgttgtccgaaccgagttaggggtgttctgaactggagcagcggacctagaggcctgctagcgttcggcacatcttgttcagtggttctttatgaccccctgaaaagggtggtggtgacgaatctgaatggccacacagctcgggttaactgcatccagtggatctgcaagcaggacggctcaccctcgaccgaattagtgtctggcggatcagacaaccaagtgattcactgggagatcgaggataatcagctgctgaaggcggtgcatctgcagggccacgagggaccagtgtacgcggtgcacgcagtttatcagcgtcgcacgtccgacccggctttgtgcactcttatcgtgtccgccgctgccgatagtgctgtgcgcctttggtcaaagaagggcccagaggtcatgtgcttacaaactctcaactttggcaacggctttgcactcgctctgtgtctgtcatttcttcccaatacagatgttcccatcctggcgtgtggaaatgacgattgccggatccacattttcgcacaacagaatgatcagtttcagaaggtactctcattgtgcggtcatgaagactggatccggggagtggagtgggccgcttttggccgagatcttttcctcgcatcttgctctcaggactgtctgatccggatttggaaactgtatattaaatccacatcgcttgagacccaggatgatgacaatatcaggctgaaggaaaatacattcacgattgaaaacgagtccgtgaagatcgcatttgccgtgactctggaaacagtgctagccggacatgagaactgggttaacgccgtgcactggcagccagtattctataaggatggcgtgctccagcagccagtccgcctgttaagtgcctctatggacaaaacaatgatcctgtgggcacctgatgaggaatcaggcgtgtggctagagcaggtgcgagtaggggaggtgggtgggaacaccttggggttctatgactgtcagttcaacgaggacggtagtatgattatcgcccacgctttccacggggcactccacttatggaagcaaaataccgtcaaccctcgcgaatggaccccagagattgtgatcagtggacacttcgatggggttcaggacctggtatgggatcccgaaggagaatttatcatcacagtcggcaccgaccagacaactagactttttgcaccatggaagcgcaaagaccagtcccaggtgacatggcacgagatagccagacctcagatacacggatacgatttaaaatgcctagctatgatcaaccgctttcagttcgtttccggagccgatgaaaaggttctgcgggtgttcagtgctccaagaaacttcgttgagaacttttgcgctattaccggccaaagccttaatcatgtactctgcaaccaagattctgaccttccggaaggtgccacggtgcctgctcttggactgagtaacaaggcagtgtttcagggcgacattgcgagtcagccatctgatgaggaggagcttctcacatccaccggttttgagtaccagcaggtggcattccagccgtccatactcacggagccaccaaccgaagaccatcttctccagaacacattgtggcccgaggttcaaaaattatacggacatggctatgagatattctgcgtaacatgcaactcctcaaaaacccttctggcttccgcctgcaaagcagccaagaaggagcacgccgcaattatcctgtggaacacaacatcttggaaacaggtgcaaaatctggtctttcattccctgacagtgacccagatggccttctctcccaacgaaaagttccttctagctgtgtcaagagacaggacctggagcctgtggaagaaacaggatacaatcagccctgaattcgagcctgtgttttccctgttcgccttcaccaataagataacatcagtgcactccagaatcatatggtcgtgcgattggtctcccgatagcaagtactttttcacaggcagtcgagacaagaaagtcgtcgtctggggtgagtgcgactcgacagacgattgcatcgagcataatatcggaccttgctccagcgtgctggatgttggtggcgctgtcaccgcagtgtccgtgtgtcctgtcctgcatcctagtcaaagatacgtcgtggctgtgggtttggagtgcgggaaaatttgcctgtatacttggaagaaaaccgaccaagtgcccgagatcaatgactggacacattgcgtggaaacttctcagagtcaaagtcacacgctggccattcgcaaactgtgctggaaaaactgtagcggtaagactgaacagaaggaggcagaaggtgccgaatggttacactttgcctcatgtggcgaggatcacacagtgaagatccaccgggtgaacaaatgcgccctgtag

SEQ ID NO: 28531 - DNA, 1152 bp, synthetic construct
  source 1..1152: mol_type = other DNA; note = Synthetic coding sequence
atggacagaacttgtgaagagaggcctgctgaagacgggtccgacgaggaagacccagactccatggaggcgcctactaggattagggacacccccgaggacattgtgctggaggctcccgcatcggggttagctttccatccagcacgcgatctgttggccgcaggcgacgtcgatggggacgtctttgtcttctcttactcgtgccaggaaggcgagacgaaggaactgtggagctcaggccaccacctcaaggcctgccgagccgtggcattttccgaggacggccagaagttaattaccgtctcaaaggataaagccatccatgtgttggatgtggaacaggggcagctcgagagacgcgtcagcaaagcacacggagcgccaattaactcactgctcctcgtggacgaaaatgttctggctacaggggatgacactggtggaatctgcttgtgggaccaaaggaaggaagggccactgatggatatgcggcagcacgaggaatacatagccgatatggctctggaccctgccaagaagctcctgttaacggctagcggggacggatgtttggggattttcaatatcaagcgacggagatttgagcttttatccgaacctcagtccggagacctgactagtgtgacactgatgaaatggggcaaaaaagtggcctgtggtagctctgagggcactatctatctgtttaactggaacggttttggcgctactagcgacaggttcgccctccgagccgaatctattgactgtatggtccccgtcaccgagtctctcctgtgcactggatccactgacggtgtgatcagggccgtgaatatcctaccgaaccgtgtcgtggggagcgtggggcagcacacaggtgagcccgtcgaagagctggctctgtcacactgtggaaggttcctcgcatccagcgggcatgaccagagactgaagttctgggacatggctcaattgagagccgtggtagtggatgattaccgcaggcgcaagaagaaggggggaccactcagggcccttagcagtaagacatggtccaccgatgacttcttcgcaggactgagggaagaaggggaggattccatggcgcaggaggagaaggaggagacgggagacgactcggactag

SEQ ID NO: 28532 - DNA, 999 bp, synthetic construct
  source 1..999: mol_type = other DNA; note = Synthetic coding sequence
atgtctgaggctggggaggaacagccaatggagactactggcgcaacagaaaatgggcacgaggctgtgcctgagggcgaaagcccagcaggtgccggaactggggctgcagcaggggctggcggagctacggccgcacctccctctgggaatcagaatggtgctgagggtgaccaaattaacgcttccaagaacgaggaggacgcgggtaagatgtttgtgggaggcttgtcatgggatacaagcaagaaggatttgaaggattattttaccaagtttggcgaggtggtggattgcaccattaaaatggaccccaacactggcagaagtaggggatttggattcatcctgttcaaagatgccgctagtgtggagaaggtcttggaccagaaagaacatagattggatggacgtgttatcgatcctaagaaagccatggctatgaaaaaggatcccgttaagaaaattttcgtggggggtctcaacccagaggccactgaagaaaagatcagagagtacttcggagagtttggggagatcgaggcgatagaactccccatggacccaaaactgaacaaaagacgtggtttcgtgtttatcaccttcaaggaggaggagccagttaagaaagtgctcgaaaagaaatttcacaccgtttccggaagcaagtgtgagataaaggttgcacagcctaaggaggtgtaccagcagcagcagtatggaagcggtggcagaggaaatcgcaacagagggaatcgtggcagcggaggcggagggggtgggggaggccagtcacagtcctggaatcagggatacggtaattactggaatcagggatacgggtatcaacagggctacggccctggctacgggggatacgattattctccttatgggtattatggctacgggccagggtacgattactctcaggggagcaccaactatgggaagagccagagacgaggcggtcatcagaataattacaagccatattag

SEQ ID NO: 28533 - DNA, 2745 bp, synthetic construct
  source 1..2745: mol_type = other DNA; note = Synthetic coding sequence
atgggtgattctcgcgacctttgcccacaccttgattcaatcggagaggtcacaaaagaggatttacttttaaagagcaaaggcacatgccaatcatgtggcgttaccgggccaaatctttgggcttgcttgcaggtggcctgtccctacgtgggttgtggagagtcgtttgccgatcacagcacaattcatgcacaggcgaaaaagcataatttgactgtgaatctgaccactttccggctatggtgctatgcctgtgagaaggaagtgtttctggaacagagactggctgctcctttgctgggcagctcctcgaagttcagcgagcaagactcccctccgccttctcaccctcttaaagccgttcccattgctgttgccgatgagggagagagtgagtcggaggacgatgacctgaaacctcgcggacttaccggtatgaagaacttggggaatagttgctacatgaatgccgctctgcaggcgctctccaactgcccccctttgacgcaatttttcctggagtgcgggggtttggttaggaccgacaaaaagcctgccctgtgcaagtcgtaccaaaaactggttagcgaagtgtggcataagaagcgtccctcatacgtggttcccaccagtttatcccacggaatcaaattggtaaacccaatgttcaggggctacgcccaacaggacactcaggaattccttagatgcttgatggatcaattacacgaggagctgaaggaaccagtagtcgctaccgttgcattgactgaggcaagggactcagactcatccgataccgatgaaaaaagagagggtgaccgtagcccttctgaggacgaatttctgagttgtgactccagcagtgacaggggggagggggacggccagggaaggggcggaggatcctcacaggcggagaccgagctgctgatccccgacgaagcgggtcgagcaatcagcgaaaaggaaaggatgaaggaccgcaagttcagctggggccagcaacgaacaaactcggaacaggttgatgaagacgctgacgtcgacacagctatggcggctctggacgatcagcctgcagaggcacagcccccttctcctcgatctagctcaccatgccgaactcctgagcctgataatgacgcccacctgcggtcgagctccaggccatgcagcccagtccaccatcacgaagggcatgccaagctaagtagctcgcccccaagagccagcccggtcaggatggccccttcttacgttcttaaaaaagcccaggtgctgtctgcagggtcaaggagaaggaaggagcagagatacaggagcgtgatcagcgacatcttcgacgggagcatcctgagccttgttcaatgcttaacgtgtgaccgagtgtcaacaactgtggagacttttcaggatctgtctctgccaattccgggtaaagaggatcttgcaaaactccattcagccatttaccaaaatgttccagccaaacctggggcttgcggtgactcctacgccgcacagggatggttggcgttcatagtcgaatatatccggaggttcgtggtgtcttgtacgccttcttggttttggggcccagtggtcacgctggaggattgtctcgctgccttttttgctgccgatgagctcaaaggcgacaacatgtattcttgcgaaaggtgcaagaaactccggaacggagtgaaatattgcaaggtgctgagactcccagagattctgtgtatacatcttaagagattcaggcacgaagtcatgtactcttttaagatcaatagccacgtgagcttcccactcgaaggccttgatctgaggcccttcttggccaaagagtgtacatcccagatcacaacttacgacctgttgtccgtgatttgtcaccatgggactgcaggatccggccactacatagcttactgccagaatgtgatcaatgggcaatggtacgagttcgatgatcagtacgtgactgaggtgcacgaaacggtggtgcaaaacgcagagggttacgtgttgttttaccgcaaaagcagcgaagaagcgatgcgtgagcggcaacaggttgtgtccctcgccgcaatgcgcgaaccgagccttctccgcttctacgtgtccagggagtggcttaataagtttaatacctttgctgaacccggacccataacaaatcagacgtttctgtgttcacatggcggtatcccccctcacaaataccattatatcgacgatctggttgtgatcttgcctcagaacgtgtgggaacacctgtacaatcggttcggaggcggtccagcagtgaatcacctctatgtgtgctctatttgtcaagtggaaattgaagctctggctaagagacgtcgcatcgaaatagatacctttattaagctgaataaagcattccaagctgaagaatcccccggagtaatatactgcatctctatgcagtggttcagagagtgggaagccttcgtcaaagggaaagataatgaaccccctgggcctatcgacaactcgaggattgcccaggtgaaaggctccggacatgtgcagcttaaacagggcgcagattatggccagatttctgaagaaacctggacctatttgaactcactgtacggaggaggcccagaaatcgctatccggcagtccgtagctcaaccattggggccagaaaatctgcatggagaacaaaaaatcgaagctgaaacgcgcgcagtgtag

SEQ ID NO: 28534 - DNA, 2772 bp, synthetic construct
  source 1..2772: mol_type = other DNA; note = Synthetic coding sequence
atggccgcttctacggggtatgttagattgtggggagccgcacgatgctgggtgctgagacggcctatgctggcagccgcaggaggccgagtaccgacggccgctggcgcttggcttcttagagggcaaagaacctgtgacgccagtccaccatgggctttgtggggacggggtccagccattgggggaagtgccggagccggtgaggggcctgtgattacggctctgactcctatgacaatcccagacgtctttccgcacttacccttgatcgccatcacccgcaatcctgtctttccccgttttattaaaataattgaagtgaagaataagaaactcgtagaacttctgcggcgtaaggtccggttagcccaaccttacgtgggggtattcctgaagagggacgacagcaatgagtccgacgttgttgagagcctagatgagatttatcacacaggaacatttgcccagatacacgaaatgcaagatctcggagataaacttcgaatgatcgtgatgggacataggagagtgcatattagtcggcaattggaagtcgaacctgaggagccagaagctgaaaacaaacacaagcccaggcgaaagtccaagagaggaaagaaagaagcggaggatgaactatccgccaggcatccagccgagctggccatggagcccacgcccgagctgccggctgaagtgctgatggtggaggtcgaaaacgtggttcatgaggatttccaagttactgaagaagttaaggcgctgaccgctgaaattgtgaaaacaattcgcgatattattgcactgaatccactatacagagagtctgtgctgcagatgatgcaagcaggacagcgtgtcgtggataaccctatctatctgtcagacatgggtgcagccctaacgggtgccgaatctcacgaactacaggacgtcctcgaagagactaacatcccgaagagattgtacaaggcactgtccctgctcaagaaggaatttgagcttagtaagcttcagcagagactagggcgagaggtcgaagaaaagatcaaacagacgcatcggaagtacctcctgcaggagcagttgaagattatcaaaaaggagctgggcttggagaaagacgataaagacgcgatcgaggaaaagttcagggagagactaaaagagctggttgtgcctaaacacgtgatggatgtggtcgacgaagaactgtctaagcttggcttactggataaccacagttctgagttcaatgtgactcggaactatttagattggctgacaagtataccttggggtaagtattccaatgagaatctcgacctggcccgagctcaggccgtgcttgaggaagatcactacggtatggaagacgtgaagaaacgtatcctggagtttatcgccgtgtcacagctgagggggagcacacagggaaagatactctgtttttacgggccacctggtgtaggaaaaacctccatagcaaggtctattgccagagcactcaatagagagtattttcgattttcagtcggcggtatgactgacgtggcggaaattaaggggcatcggaggacatatgtcggtgcgatgcccggtaagatcatccagtgcttaaagaaaaccaagacagagaatcccttaatactgatagacgaggttgacaagatcgggaggggctaccagggcgaccccagcagtgccctcctcgagcttctcgatcctgagcagaacgccaactttcttgatcattatttggatgtgccagtagacctgagcaaggtgctatttatctgcactgctaacgtgaccgacacgatccctgagcccctgcgcgatcggatggagatgataaacgtttccggctacgtggcccaagaaaagctggccattgccgagagatacctggtcccacaggccagagctctctgtggattggatgaatctaaagcaaagttgtcgtcagatgtgctaacattgctgatcaagcagtactgtagggagtctggcgtacggaatctgcaaaaacaggtcgagaaagtgttgaggaaaagtgcttataagatcgtttcaggagaagccgagtctgtcgaagtgacccccgaaaacttacaagattttgtggggaagcccgtgttcacggttgaacgtatgtacgatgtgactcctcccggagtggttatgggactcgcttggacggctatgggcggtagcactttgttcgtagaaacaagcctgagaaggccacaggacaaagacgctaagggcgataaggatggttctctcgaagtgacaggccagctgggagaagtaatgaaggagagcgccaggattgcttatacctttgcgcgtgcgtttctgatgcagcacgcacccgctaatgactatcttgttaccagccacatccacttgcacgtgcctgagggcgctacaccgaaagacggcccttcggccggatgtaccatagtgacggcgctactgagcctagcaatgggtaggccagtccggcagaatctggccatgaccggggaagtgtcactgaccggaaagatcctgccagtgggcggaattaaggaaaagacgatcgcagccaaacgagccggagtcacttgtatagtcctgcccgcagagaacaagaaagacttttacgacttggcagcctttataacagaagggcttgaggtgcattttgtggagcactaccgggagatttttgacatcgcttttccagacgaacaagccgaggccctggctgtggagaggtag

SEQ ID NO: 28535 - DNA, 681 bp, synthetic construct
  source 1..681: mol_type = other DNA; note = Synthetic coding sequence
atgggcccactacccaggactgtggaactgttctatgacgtcctgtcaccttattcctggttaggtttcgagatactgtgccggtaccagaacatttggaatatcaacttgcaactgagaccgtccctaataaccggcataatgaaggattcgggaaacaagccccctgggctgctaccgagaaaggggctctacatggctaatgacctgaagctcttacggcaccacttgcagatccctatccattttccgaaagatttcctcagcgtgatgctcgaaaaagggtctttgtctgccatgcgattccttactgcagtgaatctcgagcaccctgagatgctggagaaagccagtcgtgagctgtggatgagggtctggtcccggaacgaggacatcaccgagccacaatccatcctggccgcagccgagaaggctggaatgagtgccgagcaggcgcaggggttgttggaaaagatcgcaaccccgaaggtcaagaaccagttgaaagaaaccacggaagctgcttgcaggtatggtgccttcggattacccatcactgttgctcatgtggatggtcagacacacatgttattcggcagcgatagaatggagctgctcgctcaccttctcggcgagaaatggatgggcccaatccccccagctgtgaacgcccgactctag

SEQ ID NO: 28536 - DNA, 2055 bp, synthetic construct
  source 1..2055: mol_type = other DNA; note = Synthetic coding sequence
atggaggctaaccacagcgaacagctcagcgctgaacgacaatcgactccacctggggacagttctagtctgcctagccataatggattggagaaggaggacggccaagatagccccacacccgtgcagcctcctgaaaaggaggcttccgtgcaccctgatatctccgaagaactcaacaggcagttggaagatattatcaacacttacggctccgctgcttcgactgcgggtaaggaaggaagtgcgagggcgtcggagcagcctgaaaatgcagagtcaccagataacgaggacggtgattgtgaggagaccacagaggaggccggaagagagcccgtagcctccggagagccacccaccgttaaagagccagtgtctaacaaggaacaaaagctcgagaaaaaaattcttaaggggttaggaaaggaggcaaatctgctaatgcagaatcttaacaagctgcaaactcccgaagaaaagttcgatttcctgtttaagaaatatgccgaacttctcgatgagcaccgaaccgaacagaagaaacttaaacttctacaaaagaaacaagtgcagatacaaaaggaaaaggaccagctgcaaggagagcacagccgcgctattctcgccaggagtaagttagaaagcctctgccgcgagctgcagcggcacaataaaactctgaaggaggaagctttgcagcgggcaagggaagaagaagagaagcgtaaagaaatcactagccatttccaatccacattgacggacatccagggccagattgaacagcaaagcgaaaggaatatgaaactctgccaagagaacacagaactggccgagaagctgaagagtatcatcgaccagtatgaactgcgagaagagcacctcgacaagatttttaagcaccgcgaactgcagcagaaactggtcgatgccaaactcgaacaggcacaggaaatgatgaaagaggctgaggagcggcataagagagagaaagaatacctgctaaatcaggcagctgagtggaagttgcaggctaaagttctgaaggagcaggagacagtgctgcaggctcagctgaccctttacagcggcagattcgaggagttccaatcaacgctcactaagtctaatgaggttttcgctactttcaaacaagaaatggacaaaaccaccaaaaaaatgaagaaattggaaaaggacacggccacctggaaggcacggtttgaaaattgtaataaggcactattagacatgatcgaggaaaaggccctcagggcaaaagagtacgagtgcttcgtgatgaaaatcgggaggttggaaaatctctgtcgagctctgcaggaggagcgcaatgagctgcataaaaagattagggatgccgagatatccgagaaggatgaccaatcccagcacaactcagacgaggagcctgagagtaacgttagcgtggatcaggagatcgacgccgaggaggtgaatagcgttcagaccgcggtaaagaatctggctaccgcatttatgattattcatcatcccgaatccacccctcatcagtccaaagagacacagcccgagatcggctctagtcaagaaagtgcagatgccgctctcaaggaaccagagcagccaccgctcatccccagtcgggactcggagtcccctctgccacctctgacaccccaggccgaggccgaagggggaagtgatgctgagccccctagtaaggcttctaattcacctgccggactgggggctgagacccagtgcgaggggttgcctgtcggcgctcaagctgaccaggcatcctggaaaccagaggccgaggcctcgggccaggccccacaggcaccaaccgaagcttctcttcagaaaatggaagcagacgtgccagcaccggcatgtgccgctgaggagcatgtggctgccatggtcccagcctgcgaaccgtctagacagcctccaagggccgcagccgaagagcttcccgttggcgctagcgcgggaccacagcctagaaacgtggccgatactaacttggaaggggtggattag

SEQ ID NO: 28537 - DNA, 1461 bp, synthetic construct
  source 1..1461: mol_type = other DNA; note = Synthetic coding sequence
atgaacggcacgctggaccaccctgaccaaccggatctggacgcgattaagatgtttgtgggtcaggtgccaagaacatggtctgagaaggacctcagagaacttttcgaacagtacggcgcagtgtacgagattaatgtgcttcgggaccggagccaaaacccccctcaatccaaaggctgctgttttgttacattctatactcgtaaagccgcactggaggcccagaatgccctgcacaacatgaaagtgctccctggaatgcaccatcctatccaaatgaaacccgctgatagcgagaagaacaacgcagtagaggatcggaaactctttatcggaatgatctcaaagaagtgtacggagaacgacattcgtgtgatgttttcttccttcggccagatcgaggagtgtaggatcctgagaggacccgatggactttcccgtgggtgtgccttcgtcacctttacaactagagccatggcacagaccgccataaaagcgatgcaccaggcgcagactatggagggatgttcttcccctatggtagtgaaattcgctgatacccaaaaagacaaagagcagaagcggatggcccagcagctgcagcagcaaatgcagcagatctccgctgcctcagtgtggggcaaccttgccggtctgaacaccttaggaccacagtatctagcattgtacctccaacttctacagcagactgccagctcaggaaatcttaatacactaagcagtctccatcctatgggcggtctgaatgccatgcagttacagaacctcgccgcactggctgcagccgcatccgctgcccagaatacaccgtccgggaccaacgctctgacgacttcatccagcccgctctctgtcctgacatcatcaggctcatctccttcaagttcatcctcaaattctgtcaaccccatcgccagtctcggggcactccagaccctcgcgggagctactgcaggcctcaatgtcgggagccttgccggtatggctgcgctgaacggtggactgggcagctctgggctttctaacggaacggggagcacaatggaagctctcacacaagcctactccggtatccaacaatacgccgctgccgcactgcctactctgtataaccagaacttgctcacccagcagtccatcggcgctgctggaagccagaaagaaggccctgagggagctaacctgttcatttaccatctgcctcaggagttcggtgatcaggacctgctgcaaatgtttatgccctttggaaacgttgtttcagcaaaagtattcatagataaacaaaccaatctgtcaaagtgttttgggttcgtcagctacgacaaccctgtcagtgcacaggctgcaattcagagcatgaacggcttccaaatcggaatgaaacggctgaaggtgcagctgaaaagatccaaaaatgacagtaaaccctactag

SEQ ID NO: 28538 - DNA, 7811 bp, synthetic construct
  source 1..7811: mol_type = other DNA; note = Synthetic coding sequence
atggagaaagctacagtccccgttgcagctgctaccgccgctgagggagagggatcccccccagctgtggccgcagtcgccggtccgcctgcagccgctgaggtcggaggtggagtgggaggctcctcacgggcacggagcgccagctctcctagaggcatggtgcgcgtgtgtgacctgcttctgaagaaaaagccacctcaacagcagcaccacaaagcaaagcgcaacagaacctgcaggccaccctcatcctctgagtcctcatccgatagcgataactctggcggtgggggaggcggaggcggtggcggtggcggtggaggcggtacatcaagtaataattctgaggaagaagaggacgacgacgacgaggaggaggaagtgtccgaggtagagagcttcatattagatcaggacgatctggagaatccgatgttggaaacggcctccaaactgctcttatctggcaccgccgatggagccgatttacgcaccgtggatccagaaactcaggcacgcctggaggctttgcttgaggccgctggtattggaaagctgtccacagccgacggcaaggctttcgccgaccccgaggtgctaagaaggttgacatcctccgtaagttgtgccttggatgaggccgcagcggctctaacgaggatgagggctgagagcactgccaatgcagggcagtcagataatcgatccctcgctgaagcctgttctgaaggagatgtgaacgctgtgcggaagctcctgattgaggggcgttcggtgaacgaacacacagaagaaggggaaagcctcctgtgcctggcctgctctgccggatattacgaactagcccaggttctgctggcaatgcacgccaatgtcgaggaccggggaatcaaaggcgacattacacctctgatggcagctgccaacggcggacacgtaaagatagtgaagcttctcttggcccacaaagcagatgttaacgctcagagctccacaggaaacactgccctgacttatgcctgcgctgggggatatgtcgatgttgtgaaggtgctgctcgaatccggcgcatcgatcgaagaccataatgagaacggtcacacccctctcatggaggctggctccgccggacacgtggaagttgcccgacttctgctagagaacggagctggcatcaatacgcacagcaacgagttcaaggaatcggctctcaccctggcatgctataagggacaccttgaaatggtgcgcttcctgctagaggccggagctgaccaggaacacaagaccgatgagatgcacactgcactgatggaggcctgtatggatggacatgtggaagtggctcggctactgcttgacagcggggcacaggtaaacatgccggcagactcatttgaatctccgctaactctcgcggcatgtggcggtcacgttgaacttgccgctcttttgatcgaacgtggggcatctcttgaggaagtgaacgacgagggctatacccccctcatggaggccgctcgcgaggggcacgaggaaatggtcgccttattgctggggcagggggcaaacataaacgcacaaaccgaagagacccaggagacagctttgacactagcatgttgcggaggttttctggaagtggccgactttctcattaaagccggagccgatatcgagctcgggtgcagcacaccacttatggaggctgcgcaggaagggcatctcgagcttgttaaatacctcttggccgcaggtgccaatgtacacgccactaccgccaccggcgacactgccctgacttatgcctgtgagaacggtcacaccgatgtggcggatgtcctgctgcaagcaggcgcagacctggaacatgagtccgaaggagggagaaccccactgatgaaagctgctagagccggacacgtctgcacggttcagttcctgatcagtaagggagctaacgtcaaccgaacgacagcaaataatgaccacacggtactcagcctcgcctgcgccggaggtcatcttgcggtcgtagagctactcctcgctcacggcgcagatccaacccacagactgaaagacggctccaccatgctgattgaggctgctaaagggggacacacaagtgttgtttgttacttgctggactacccaaataacctgttgtccgctcctccccctgatgtgacgcagcttacgcctccaagccacgatctgaaccgggcacccagggtgcccgtccaggcactgcccatggtggttcctccgcaggagccagataaaccgcctgccaacgtggccaccacactgcctatccggaataaggccgctagcaagcagaagagttcttctcacctgcctgcgaattcacaagacgtgcagggatacattacgaatcagagccctgagagcatcgttgaggaagctcagggaaagctcacggaactggaacaacgtattaaggaagctattgagaagaatgcacagctacaaagtctcgagctggcacacgccgaccagctcaccaaggagaagatcgaagagctgaacaagactagggaagaacaaattcagaagaagcaaaagatcttggaagagctccagaaagttgaacgagagctgcagctcaagacccagcagcagctaaagaagcaatatctagaggtaaaagctcagcgcatacaattgcagcaacaacagcagcagtcctgccagcacctcggactgttgacacctgtaggcgtgggagagcagttatctgagggtgactatgctaggttgcaacaggtggacccagtgttacttaaagacgaacctcagcaaaccgcagcccagatgggattcgctccaatccagccgttggccatgccccaggctctgcccctggcagcagggccactcccacccggaagcatcgcaaatctgacagagctgcaaggcgtcatcgtgggacagccagtgttgggacaggcacaactggcgggactcgggcaggggattcttacagagacccagcaaggcttgatggtggcctcccccgcacaaaccctcaacgacaccctagatgatattatggccgctgtaagcggcagggcctctgcaatgagtaatactcctactcattcgatagcagcatcaatctctcaaccccagacacctaccccatcccccatcattagcccctcagccatgctgcccatatatcctgcaatcgacatagacgcgcagaccgaaagtaatcacgatacagctttaacactagcttgcgctgggggacacgaagaattggtgcagaccctgcttgagcgaggagcttcaatcgaacatcgagacaaaaagggatttacacctctgatcttggccgcaacggcgggacacgtcggggtggtagagatacttctggataacggagcagatattgaagctcaatccgaaagaaccaaagacactccactgtccctggcgtgctctgggggacgccaggaggtagtggagttactactggcacgaggagcgaacaaagagcaccgcaacgttagcgattatacccccttgtcgctggcggcttctggagggtacgtcaatataatcaaaatactcctgaatgctggggcagagatcaacagtcgcaccggttccaagctaggtatatccccgctgatgctcgccgcaatgaacggacacactgctgctgtgaagctactgctcgatatggggtcggatataaatgcacaaattgaaacaaaccggaacacagccctcacccttgcatgctttcagggcaggaccgaagtcgtaagtctgctactcgaccgaaaggccaacgttgagcatcgggctaagacgggtttgacccctcttatggaggccgcatccggaggctatgccgaggttggtagagtcctgctcgacaagggcgctgacgtgaatgcacccccagtgccttcctctagagacacagcgttgaccatagcagcagataagggacactataagttctgcgagctgcttatcggacggggagcccatatcgacgtgcgtaataaaaagggaaatactcccttgtggctggccgcaaacggcggacacctggacgttgtccaactcctagtgcaagcaggagctgatgtcgacgcagctgacaaccgcaagatcaccccccttatggctgcctttcgcaaaggacacgtcaaagtcgtgcggtacttggtgaaggaagtgaatcaatttccatcagactctgaatgcatgcggtacatcgcgactattaccgataaggagatgctgaagaaatgtcatctgtgcatggagagcatcgtccaggccaaggaccggcaggccgcagaggctaacaaaaatgcaagcatcctgcttgaagagctcgacctcgagaaactgagggaagagagccgacggcttgctcttgcagctaaacgagagaagcgtaaggagaagagacgcaagaaaaaggaagaacagcggcgaaagctggaggagatcgaggccaaaaataaggagaattttgagcttcaggcggctcaggagaaagaaaaacttaaagtggaagacgaacctgaagtactgaccgaacccccttctgccacgacaaccacaaccattgggatatccgcgacttggactactcttgccggatcacatggcaaaagaaataacaccatcaccacaacttcgtctaaacgcaaaaaccggaaaaataagatcacgcctgagaacgttcagataatctttgacgacccactgcctatttcctattctcaacccgagaaggtgaatggcgagtccaagtcatctagtacatccgaatccggtgatagcgataatatgagaatctcctcctgttcagatgagagctcaaattctaattcctcccggaagagcgataaccacagtcctgccgtggttactactaccgtttcttccaagaagcagccctccgtgctggtcacctttccgaaagaagagcgtaagagcgtttctggaaaggcaagcataaagcttagcgagacaatctccgagggcacctccaacagcctctcaacctgcacaaaatctggtccctcccccctgtcctctcccaatgggaaacttaccgtggctagcccgaagcgtggtcaaaaaagagaggaaggttggaaagaagtcgttcgacggtcaaagaaagtgtctgtgccatctaccgtaatatcaagggtaataggacgcggtgggtgtaacatcaatgccataagagagtttaccggagctcacattgatattgataaacagaaagacaagacgggcgacagaattattacgatacgtgggggtaccgagagtacgcgccaggctacgcaactgataaatgccctgatcaaagatcctgataaagaaatcgatgagcttattcccaagaataggctgaaatcctcatcagcaaactcaaagattgggtccagcgctccgaccactactgccgcaaacactagcctgatggggatcaagatgaccaccgtggcgctctcctctacgagtcagaccgcaaccgccttgacagttccagcaatttctagtgcctcaactcacaagaccatcaaaaaccctgttaacaatgtgcggccaggattcccagtatccctgcctctcgcctatcctcctccacagttcgcccatgccttgcttgccgcacagacgttccagcagattcggccacctcgattgcctatgacccacttcggaggtacgtttccacccgctcagagcacatggggcccattccctgtacgaccattgtctccagcgcgagccaccaactcacctaagccccacatggttccccgacattccaatcagaattcctctggctcccaggtgaattctgccggaagcctgactagtagtcccactaccaccaccagctcctcagcctcgacagttccaggcacctctacgaacggatctccgtcaagcccatccgttcgcagacaactttttgtgacagtggtcaagactagtaacgctaccacaaccacagtgaccacaactgcttcgaacaataacactgcccctaccaacgccacatatcccatgcccaccgccaaggaacactaccccgtgagttctccctcatcacccagccctccggcacaacccggaggcgtgtcccggaacagccctctagactgtggctccgcgtcgcccaacaaggttgccagtagctcggagcaggaggccggttccccgccagtggtcgagaccactaatacacgtccccctaactcttcgtcttctagcggatctagcagcgcccactcaaatcaacagcagccgcctgggtcggtgtcccaggaaccgagaccccctttgcagcagtcccaggtcccaccaccagaggtgaggatgactgtaccaccactggctacaagcagtgcccctgtcgcagttcccagtactgcacctgtgacttatccaatgcctcagactcctatgggatgcccacagccaaccccgaaaatggagactccagcgatccggccaccgcctcacggaactacggctccccacaaaaatagcgcgtctgtccaaaactcatccgtggccgtgctcagtgttaaccacattaagagaccacactcagtgccttcatctgtgcagcttccgtctaccctctccacgcagagtgcgtgccaaaactctgtccaccctgccaataagcctattgcacccaacttttctgcgcctctgccttttgggccattttctaccctatttgaaaattcacctacctccgcgcacgccttctgggggggaagtgtcgtgtccagccagagcacaccagagagtatgctctccggaaagagctcttatctccccaatagcgatcctttacaccagtccgacacgtccaaagctcctgggttccggcctcctttgcaaaggcccgctccatctccatccggcatcgtgaatatggattccccttacggtagcgtgacccctagctccacacacctaggaaattttgcatctaacatctcaggaggtcaaatgtacggcccaggagcacctctggggggagctccagccgcagccaattttaaccggcagcacttctcgccactgtcacttctcacaccttgtagtagcgcgtctaacgattcatccgcacaatcagtatcttcgggagtaagagcgccaagccctgctccatccagtgtccctttgggcagcgagaaaccaagcaatgtgtctcaggatcgaaaagtgcctgtccctataggaaccgaaagatcagctaggattcgacagaccggcacctccgctccttccgttatcgggtcgaacctttccacttctgttggacattccggcatttggtcgttcgagggcatcggaggtaatcaggacaaagttgattggtgtaatcccggaatgggcaaccccatgattcatagaccaatgtccgatcccggagttttcagccaacaccaggcaatggaaagagactcgacaggcatcgtgacgccctctggcaccttccatcaacatgtgcctgccggttacatggatttccccaaggtaggtgggatgcctttctccgtatacggtaatgccatgatccctcccgttgctccgattccagacggggcaggtggtcccattttcaatggaccccatgccgcagacccatcctggaattcacttattaaaatggtatccagcagcacagagaacaatggtccgcagaccgtgtggactggcccttgggcccctcatatgaattctgttcatatgaaccaattaggata

SEQ ID NO: 28539 - DNA, 3075 bp, synthetic construct
  source 1..3075: mol_type = other DNA; note = Synthetic coding sequence
atgaccgagggcaggcggtgtcaggttcatctcctggatgataggaagttggaattacttgtgcagcccaagcttttggccaaggagctcctcgatctcgtggcttctcacttcaatctcaaagagaaggaatactttggtatcgcattcactgatgaaacaggccacctcaactggctgcagctggatcgtcgcgtgctggaacacgacttccccaaaaaaagtggacccgttgtgctgtacttctgcgtgcggttctacattgagagcatcagttatcttaaggataatgccacaattgagctgttctttttgaacgcgaagtcttgtatctacaaggagctgattgacgtcgacagcgaggtggtcttcgagctggcctcatacatcctacaggaagccaaaggcgactttagcagcaacgaagtagtgcgctccgacttaaaaaagttgcctgctctgccaacacaggccctcaaagaacacccctcattggcctactgtgaggaccgcgttatagagcactataagaaactgaacggccagactcgcggacaagcgattgttaattatatgtccattgtcgagagcctccccacttacggtgtgcactactatgcagtgaaggataagcagggcatcccctggtggctgggtctctcgtacaaagggatcttccagtacgactaccatgataaggtgaagcccaggaagatttttcagtggagacagctggagaatctttactttcgcgagaaaaaattttcagtcgaagttcacgaccctcgcagagcgtcagtcactagacgaacattcggtcactctgggattgccgtacatacctggtatgcgtgtcccgcattaatcaaaagcatctgggcaatggccatttcccaacaccagttttacctggatagaaaacagagtaagtctaagatccacgctgccagatccctctcagagattgcgatcgacctcaccgagaccggcactctaaaaacctcaaaacttgccaacatgggttcgaaagggaaaatcatttccggatctagtggcagcctgctatcctcgggctcccaggagagtgacagctcccagtccgccaaaaaagatatgctggctgcattgaagagccgccaggaagctcttgaagaaacattaaggcagcggcttgaggagctgaagaagctctgtctgcgggaggccgagctaactgggaaactacctgtggagtatccccttgaccccggagaagagcctcccattgtcagacgcaggatcggcaccgccttcaagctggatgagcagaagatcttgcccaaaggagaagaagctgagctcgaaaggctggagcgcgaatttgcaattcagtctcagataaccgaggctgcccgacgcctcgcctctgaccccaacgtgagcaaaaaactgaagaaacaacgaaaaacatcttatctcaatgcattaaagaagcttcaggaaatcgaaaatgccatcaacgaaaatagaatcaaatctggcaaaaagcctacccaacgagcttcattaattatagacgatggaaacatcgcttccgaggactccagcctttctgatgccctggtcttagaagatgaggattcccaagtgacttccactatcagtcctctgcattcacctcacaaagggcttccaccccgtcctccctcccataaccggccaccccctccccagtccctagagggtctaaggcagatgcactatcatcgcaatgactacgataagtctcctattaaacccaagatgtggagtgaatccagccttgacgaaccctacgagaaggtgaaaaagagatctagtcactcgcactcttcatcgcacaaacgattccccagtacggggtcatgtgctgaggcaggcggagggtcaaacagtcttcaaaactcccccatcaggggcctgcctcactggaactcacagagcagcatgccttcaactcctgacctcagggtaagatctcctcattatgttcactccacacgctccgttgacatctccccaactagactgcactccctggcgctacacttccgccataggtcttctagcctggagagtcagggtaaactactgggttctgaaaacgacaccggcagccctgacttttacacgcctagaacacggtcaagcaacggcagcgatccaatggacgactgttcttcctgtactagtcattccagctctgagcattattaccctgcccagatgaatgctaactacagcaccctggccgaggacagcccttccaaggcacgccagcggcagcgacaaaggcagcgggcagctggtgccctgggctctgcttcttctggaagcatgcctaacctcgctgcaaggggtggagctgggggagccggaggcgcaggcggaggcgtgtaccttcattctcaatctcaaccctccagtcagtatcgcatcaaggaatatcccctctatatcgagggaggcgctacccctgtggtggtccgtagtctcgaatctgaccaagaggggcattattctgtgaaggcacagttcaaaacaagcaatagctataccgcaggaggcctcttcaaagagtcctggcgcggaggagggggtgatgaaggagacactggcagactcacacccagtcgctcccaaatcctcaggaccccaagcctaggaagagagggtgcacacgataaaggtgccggacgcgctgctgtgagcgatgagcttcgccagtggtatcaacgctctaccgcatcacacaaggaacactcacgactgtcccacacatcctctacatcgagcgactccgggtcacagtattcaacctctagccaatctaccttcgttgcccattcccgcgttacgcgaatgccccaaatgtgtaaggcaaccagcgcagcgctgcctcagtcacaacgaagcagcactccctcctccgagatcggcgctacacccccatccagccctcaccacatcttgacatggcaaacaggagaagcaaccgagaactccccaatactcgacggatccgaaagcccacctcaccagtccacggacgagtag

SEQ ID NO: 28540 - DNA, 864 bp, synthetic construct
  source 1..864: mol_type = other DNA; note = Synthetic coding sequence
atgtcacaagcctggtggcacacttccgtgtcccctgccacacaagaggctaaggccggtggcctgctacaacccagacgacaacgcctctggctcaagcgctgtaggatttcatctagtgcctgcgaagaccttagtgcagccttgattgctaacaagaatctgaccagaatggaccttagcggcaatggtgtaggattccctggcatgatgctgctgtgcgagggccttcgccatcctcagtgcaggctgcagatgattcaactacgaaagtgtcagctagagtccggtgcctgccaggagatggcttccgtcctcgggacaaatccacacttagtggagctcgatcttactggtaacgcactcgaggacttgggcctccgtctactctgtcaaggtcttagacatcctgtatgccgtcttcgcaccttatggctgaaaatctgtaggctcacagccgcagcatgcgatgaattggcatccacgttatctgtgaaccaatcccttcgcgagctcgatctctcgttaaacgaactcggcgacctcggcgtgctccttctgtgtgagggactgcgacatcccacatgtaagctgcaaactttaaggctggactcatgcggcctaaccgccaaggcttgtgagaacctgtattttaccctgggcataaaccagacacttaccgacctgtatctaaccaataacgcactgggcgatactggcgtgaggctgctctgcaagcgtttgtctcaccccggttgtaaactgcgggtgctctggctgtttggaatggacctgaataaaatgacccattcccggctggcggcattacgagtgacaaagccctatcttgatatcggctgctag

SEQ ID NO: 28541 - DNA, 615 bp, synthetic construct
  source 1..615: mol_type = other DNA; note = Synthetic coding sequence
atggccggttacttgtcagagagcgactttgtgatggttgaggaaggattttcaactcgggacctgctgaaggagctgacactgggcgcatcacaggctaccaccgacgaggtcgcagccttcttcgtggccgatctgggggcaattgtgagaaagcacttttgcttcttgaaatgcttgccgagagtgagacccttctacgcagtcaaatgcaactctagccctggtgtgttgaaggtcctggcgcaattgggactgggtttcagttgcgcaaataagatcgcttccgtaatcaacagtgcccttgacttgtattttccagaagggtgtggtgtggacatcttcgctgagttgggccgatattatgttacatccgcattcactgtggctgtgtcaatcattgcgaaaaaagaagttctcctggatcagcctggaagggaggaggagaatggctccaccagtaaaaccatcgtgtatcacctggatgagggtgtatatggcattttcaactctgtgctgttcgataatatatgcccgaccccaatcctgcagaagtccaaaaaccattccccatgctatatgtcgttagagtccatacacttcatagccgtttag

SEQ ID NO: 28542 - DNA, 519 bp, synthetic construct
  source 1..519: mol_type = other DNA; note = Synthetic coding sequence
atgatgaaactgaaaagcaatcagaccagaacatatgatggtgatgggtataaaaagcgagccgcatgcctgtgcttcagaagtgagagcgaggaggaggtactgttggtttccagcagccgacacccagatagatggatagtgcccggaggcggtatggaacctgaggaggaaccgagtgtggcggctgtaagagaggtctgcgaggaggccggtgtgaagggaaccctgggtcgcctggtggggatttttgaaaaccaggagcgaaagcaccggacctacgtgtacgtcctcatcgtgactgaagtcctggaggattgggaggatagtgtcaatatagggaggaagagggagtggttcaaaatagaagacgctatcaaagtcctccaatatcacaaacccgtacaagcctcctactttgagacgctgaggcagggatacagtgccaacaatggcacaccagtcgtggccactacgtattcggtgtcagctcagtcctctatgtcaggtattcggtag

SEQ ID NO: 28543 - DNA, 4284 bp, synthetic construct
  source 1..4284: mol_type = other DNA; note = Synthetic coding sequence
atgtcaatgctgaagccatctgggttaaaagcccctacaaagattctcaaacctggaagcactgctttgaagactcctactgccgtggtggcacctgtggagaagactatctcatcagagaaagcttcatccacgccaagtagcgaaacccaggaggagtttgtggatgacttccgcgtgggcgagagggtgtgggtcaacggcaataagccgggttttatacagttcttgggcgagacacagttcgccccaggccaatgggcaggaatcgttctggatgagcctatcgggaaaaatgacggcagcgttgctggtgtgcgatacttccagtgtgaaccgcttaagggcatcttcaccagaccatcgaaactgacgagaaaagttcaagcagaagacgaggccaatggccttcagaccaccccggcaagccgcgcaacttcacccctctgcacatccactgcatccatggtgagtagcagcccatccactccctccaacatcccgcagaagccttctcagcccgctgccaaagagccaagcgccacacccccaataagtaatctcacgaaaaccgcttctgaaagcatcagtaatctgtcagaggccggaagtattaaaaaaggtgagcgcgagctgaaaattggcgatcgcgtgttagtaggtggaaccaaggcaggtgtagtaaggttcctgggggagacggacttcgctaagggagaatggtgcggcgtggagctcgatgaacccctcgggaagaatgatggggcagtggcaggcaccaggtattttcagtgtcagccaaagtatggattattcgcgcctgtgcacaaggtgaccaagataggttttccatccaccacccctgccaaggccaaagccaacgcagtccgcagggtgatggccactaccagtgctagtttaaaacgttccccaagcgcttctagtttatcctccatgagtagtgttgcctctagcgtttcctcaaggccaagccggactggcctgctcacggaaacatcgtccagatatgcacggaagatctccggcacaacggccctgcaggaagccctgaaggaaaaacagcagcatattgagcagcttctggcagagagagatttggagcgggctgaagttgcaaaggctacttctcatgttggggagattgagcaggagctggccttggcccgagacggccacgatcagcatgtgctggaattagaggctaagatggatcagctgaggaccatggtggaagcagctgatagggaaaaggtggaactcctgaatcagttggaggaagagaaaagaaaggtggaagacctgcagttccgggtcgaagaagaaagtattaccaagggggacctcgaaacacagactaagttagagcacgccaggatcaaggaattggaacagtccctactgtttgaaaaaaccaaagctgacaaattgcaacgcgagctggaggatacccgcgttgcaacggtgagcgaaaaatcacgaattatggaattggaaaaagatctcgcccttcgtgtgcaagaagtcgcagaactcagaaggcgccttgagtcaaataaacccgcaggtgatgtggatatgtccctttcactgctgcaggaaataagcagtttgcaggaaaaacttgaggtcactcgaactgatcaccagcgcgagataacgagcctgaaggagcattttggcgctagagaagagactcaccagaaggagatcaaggccctctataccgccactgagaaactgtctaaagaaaacgaaagtcttaagtcaaaattagagcatgcaaataaagagaactcagatgtgatcgccctttggaagtccaagttggaaactgccattgccagtcaccagcaggccatggaggaacttaaggtgagttttagcaagggacttggaaccgaaactgccgaattcgccgaactaaagacccagatcgagaagatgcgcctcgattaccagcacgaaatagaaaatttacaaaaccagcaggacagcgaaagggctgctcacgcgaaggaaatggaggcccttcgagcaaaattaatgaaggtcatcaaggaaaaggaaaattcactcgaagctattaggtcaaaacttgataaagcggaggaccagcatttggtggagatggaagatacactgaataagctccaggaggcagaaattaaggtaaaggagctggaggtcttacaggctaagtgtaacgagcaaactaaggtcatcgataactttacatcacaattgaaagcaactgaggaaaagctgctggatctcgacgcgctgcgaaaagcctcaagcgagggtaagtctgaaatgaaaaagctgcgacaacagctggaagcagcagagaagcagataaagcacctggaaatcgagaagaatgcagagtctagcaaggcctcgtccatcacccgggagctccagggacgcgagctcaaactgacgaacctccaggaaaacctgtcagaggtatctcaggtcaaggagaccctggaaaaggagttgcagatccttaaggagaagtttgctgaggccagtgaagaagctgtgtctgtgcagcgcagtatgcaggagaccgtgaataaacttcatcagaaggaagagcaatttaatatgctgtcctccgatctggagaaacttagggagaacctagcggatatggaagctaagtttagagagaaggacgagagagaagaacagctgattaaggctaaggaaaagctagagaatgatatcgcggagattatgaagatgtctggtgacaacagttcccagttgacaaagatgaatgatgaactcagactgaaggagcgggacgtggaggagcttcaactgaaacttacgaaagcgaatgaaaacgcgtcatttctccagaaaagcatcgaagacatgacagtaaaagccgagcaaagccagcaggaggctgctaaaaaacacgaggaagagaagaaagagctcgagagaaaactatccgatctggagaagaaaatggaaacaagccataaccaatgccaggagctaaaggctaggtacgagcgcgcaacatcagagacaaagactaaacacgaagaaattctgcagaacctgcagaagactctccttgataccgaagataagctcaagggtgccagggaggagaactccggacttctccaggaattagaggaactgcgtaaacaggccgacaaggctaaggcggcacagacagctgaggatgcaatgcagattatggaacagatgactaaggagaaaacagaaacactagccagcctggaggacactaagcagaccaacgcaaaactgcagaatgagctcgacaccctgaaagaaaacaatctcaagaatgtcgaagagctaaataagtctaaagagctgctcactgtagagaaccagaaaatggaagaatttagaaaggagatcgagactctgaaacaggcagccgctcagaagagtcaacaactctcagcgctgcaggaagaaaatgtcaaacttgccgaggaactgggccgttctagggatgaggttaccagccaccagaagctggaggaagagagatccgtccttaataaccaactcctggaaatgaagaagcgcgagagcaaattcattaaggatgcggacgaagagaaagcttcactgcagaagagtattagtattaccagtgccttattgacggaaaaagatgctgagctcgagaaactgcggaatgaagtgactgtactccgtggcgaaaatgcgagcgccaaatcgctacactccgttgtgcagaccctcgagtctgataaggtgaaactagagctcaaggtgaagaatctggagctgcagctgaaggaaaacaagcggcagctgtcttcgtcctcgggaaacacagatacgcaggctgatgaggatgagagggcacaggagagtcagatcgacttcctcaactccgtaattgtggacctacagagaaagaaccaggacctcaaaatgaaagtggaaatgatgagcgaagcagctctgaacggcaatggggacgatttgaacaattacgacagtgatgaccaggagaaacagtccaaaaaaaagcccaggctgttttgtgatatttgtgattgtttcgatctgcacgacaccgaggattgcccaacgcaagctcagatgagcgaagaccctccccactccactcaccatgggagccggggtgaggaacgaccctactgcgaaatctgtgagatgtttggtcactgggctacaaattgcaacgacgatgaaacgttctag

SEQ ID NO: 28544 - DNA, 1179 bp, synthetic construct
  source 1..1179: mol_type = other DNA; note = Synthetic coding sequence
atgggggatagctgccccgctgtgaccttccggtcacaaaaggaaaaccgcgcagggctccaggagaaactgcgctacttacagcagcagctccaggatgagaccccgcgtaggcaagaagctgagctgcaggagcctgaggaaaagcaggaacccgaagaaaagcaagaacctgaggagaaacagaaaccagaggctggcctctcatggaactcactaggcccagctgctacctcccagggatgccctggcccaccaggatctcctgacaaaccatctaggccacatgggcttgtgccagccggatggggcatgggtccacgggctggagaagggccttatgtctcagaacaggagctccaaaagctgttcactggtattgaggagctcagaagggaggtatcctctctgactgcaaggtggcaccaggaggagggggctgttcaggaggcattgagactccttgggggacttggaggtagagtcgatgggttccttgggcagtgggaaagggcccagcgggagcaggcccagactgcccgagacctccaggaactgagagggagagccgatgagctgtgcaccatggttgagaggtctgctgtgagcgtggcctctcttagaagtgagctcgagggtttgggccctctcaaaccaatcctcgaagaatttggtagacagttccaaaatagccgtagggggcctgacctgagcatgaacctggacagaagtcatcaggggaactgcgcgagatgcgcctcccaggggagtcagctatctaccgaatccctgcagcagctcctggatcgggctttgacaagcctggtggatgaagtaaaacagagaggcttaacacccgcttgcccaagctgtcaacggctccacaaaaaaatcctcgaattggaaagacaggcactcgccaagcacgtaagagcagaggcgctttccagcactctgaggttagcccaagatgaggcactacgtgctaaaaacttgctcttgactgacaagatgaaacccgaggagaaaatggccacactggatcatctgcacttaaagatgtgctcactgcatgaccatctatctaacctcccacttgagggttcgactggcaccatgggcggtggatcttcagccggaactcctcctaagcagggcggttccgcacccgaacagtag

SEQ ID NO: 28545 - DNA, 1692 bp, synthetic construct
  source 1..1692: mol_type = other DNA; note = Synthetic coding sequence
atgagtgatgatgcaggggacactctagcgacaggtgacaaggccgaggtcaccgaaatgccaaactccgactcgctgcctgaggatgccgaagtacactgtgactccgcagcagtctcccacgagcctacccctgcagaccctaggggagagggtcacgaaaatgcagccgtccagggcgcaggcgcagcagctataggacccccagttcaacctcaggacgctaatgcactggaaccgccactcaatggtgacgttaccgaagacacgctggccgagtgtattgacagtgtgtccctagaggccgagccaaggagtgagattcctctgcaggaacagaattacctcgcagtcgattcgccgccatctggagggggatgggccggatggggctcctgggggaaatccctcctgagctctgcaagcgctacagtggggcatggactaacagccgtgaaggagaaggcaggtgcaacactcaggattcatggcgtgaactccgggtcaagcgagggggctcaacctaatacggagaatggagttcccgagatcacagacgcagccaccgaccaggggcctgctgagagcccgcctacgagtccctcttctgcaagtaggggcatgctcagcgccatcactaacgttgttcagaataccggtaagtccgtgctgactggaggacttgacgctttggagtttataggaaagaaaaccatgaacgtcctcgccgaatctgatcctggctttaagaggactaagacactaatggagcggacagtgtctttgagccaaatgctccgcgaggctaaggagaaggaaaaacaaagattagctcaacaactgactatggaacggaccgcccactacgggatgctgttcgacgaatatcaggggctgtcgcaccttgaagcgcttgagattctcagcaatgaatccgagagcaaggtccagagttttctggcgtcactggacggtgaaaaattggagctgctaaagaatgatctgataagcatcaaagatatttttgccgctaaggaattagagaatgaggaaaaccaagaagaacagggactggaagaaaagggtgaggagttcgcgagaatgttaactgaactgctctttgaactccacgtggccgcaacccctgataagctcaataaggccatgaaaagagcccacgactgggtggaggaggaccagacagtggtgagcgtggacgtggccaaagtgtccgaggaagaaacgaagaaggaggaaaaggaggaaaaatcacaggatccacaggaagataaaaaagaggagaaaaagaccaaaaccatcgaggaggtgtacatgtcttctatagagagtcttgcggaggttactgcgaggtgtatcgagcagttgcataaggtggccgaactaattctccacggccaggaggaggaaaagccagctcaggatcaggccaaggttctcatcaaactgactacagcaatgtgtaatgaagtggcttcactgtccaaaaagttcactaactcacttactaccgtgggatccaataaaaaggcggaggtgctgaatccaatgattagctctgtattgctggaagggtgcaactccaccacatacattcaggatgcatttcaactcctgctccccgtgttgcaagtgtcacatatccaaactagttgccttaaggctcaaccatag

SEQ ID NO: 28546 - DNA, 1257 bp, synthetic construct
  source 1..1257: mol_type = other DNA; note = Synthetic coding sequence
atgttttctcccgatcaggagaaccaccccagcaaagcgccagtcaagtatggagagcttatcgtgctcggttataatgggagcctccccaatggtgatcggggaagaaggaaaagccgttttgccttgtttaaaaggccaaaggctaacggagtaaaaccatcaactgtccacatagcatgcactccccaagccgctaaagccatctctaataaggaccagcactctatatcctacactctttcccgggcacagaccgtggtcgtggagtacacccacgactccaataccgacatgttccagatagggagatcgacggaaagccctattgattttgtcgttacagatactgtccccggatcacagagtaattcggacacacagagtgtacaaagcactattagccgttttgcatgcagaatcatctgtgaacgtaatcccccttttacagctaggatttatgccgctggttttgactcatccaagaacatctttctgggggaaaaggccgctaagtggaagacatcagatggtcagatggatggcctgaccacaaacggagttttggtaatgcacccaaggaacggtttcacggaagactctaagcccggtatctggcgcgagatcagcgtttgtggcaacgtgttttcactgagggagacccgctccgctcagcagcggggaaaaatggttgaaatcgaaactaaccaattacaggatgggagtctgatcgatctttgcggcgctactctcctctggcgtacagcagaagggctgagtcatacccctactgtgaaacatttggaggcccttcgacaggagattaacgctgcccgtccccagtgcccagtcggcttcaatacgctcgcgttcccttccatgaaacgtaaggacgtggttgacgagaagcagccatgggtgtaccttaactgcggacacgtgcatgggtatcacaattggggtaacaaggaggagagagacggtaaggaccgggagtgtcctatgtgtcgatctgtaggtccatatgtgccgctgtggttggggtgtgaagccggtttctatgtcgacgcgggtcctccgactcacgccttttctccctgtggacacgtgtgttctgagaagaccacggcatactggtctcagatccccctgccacacggcactcacacatttcacgccgcatgcccattttgtgcgcatcagcttgcgggtgagcaaggatacatccggttgatcttccagggccctctggattag

SEQ ID NO: 28547 - DNA, 3963 bp, synthetic construct
  source 1..3963: mol_type = other DNA; note = Synthetic coding sequence
atgcaggacgattccatcgaagccagtacctcaatcagccagcttttaagagagagctacctggccgaaacacgacatcggggtaacaacgagcggtctagggccgagccgtccagcaatccctgtcattttggctcaccctctggtgccgctgaaggcggtggaggccaggatgatctgcccgacctctccgcgtttctgtcacaggaggaactagacgaaagcgtgaatttggctagattggctattaactacgatccactggagaaagccgatgaaactcaggcccgaaaacggctgagcccagaccagatgaagcacagccccaacctgagcttcgagcccaatttttgccaagataatcccaggtctcccacgtccagcaaagagagtccacaggaggctaagagaccacagtactgttcggagactcagagcaagaaggttttcctgaacaaggccgcagacttcatagaggaactgtccagccttttcaaaagccattcatccaagagaatccggccacgcgcatgtaaaaatcacaagtccaagctcgagagccagaacaaagtgatgcaagaaaacagttcaagcttttcagatcttagcgaaagaagggagagatcatcagtcccaattccgatacccgctgacacccgagataatgaggttaaccatgctctggaacaacaggaggccaagcgacgggaagccgagcaggccgcaagtgaagccgctggaggcgataccacacccggttcctcccccagctctctctattatgaggagccattagggcaaccaccaagatttacacagaagcttaggagccgagaagttccggaaggaacacgggttcagctggattgcatcgtagtcggaatcccaccccctcaagtgaggtggtattgcgaaggaaaggaattggaaaacagcccagatatacatatagtccaggcagggaatctccactcactaaccatcgcggaggctttcgaggaagacactggaaggtactcatgcttcgccagcaatatctatggcacagactccacaagcgcggagatctacatcgaaggcgtctccagttccgacagtgagggagaccccaataaggaggaaatgaatcggattcagaagccaaacgaggtatcatccccgcctaccacatccgccgtaatcccacccgcagtgccccaagcccaacatctggtggcgcaaccacgggtggctaccatccagcagtgccagtcgcccaccaattacctgcagggccttgacggcaagccgattattgccgctcccgtctttactaaaatgctgcagaatctatctgcatctgagggacagctggtcgtcttcgagtgcagggtcaagggggcaccgtccccaaaagtggaatggtatcgagaaggtaccctaattgaagactcacctgatttccgcatcctgcagaagaagcctagatctatggccgagcctgaagagatctgcactctggttatcgctgaagtatttgccgaggactctggatgttttacctgtacagcatccaacaaatacggaaccgtttccagcatcgcacaattacacgtcagaggcaacgaggatctttccaataatgggtcattgcacagcgcaaactcaacaaccaatttagctgccatcgagccacagccttcccccccacatagcgaaccccctagcgtggagcagcccccaaaaccaaaattggagggcgtgctggtcaatcataacgaacccagaagtagctccagaataggcctgagagtgcatttcaatctcccggaagatgacaaaggaagtgaagcgtcatccgaagctggcgtcgtcacaactcgacagaccagacccgattctttccaggaacgtttcaatggccaagccaccaagacacctgaaccatcatcccccgtgaaagaaccccctcctgtactcgccaagcctaagctggattcaactcagcttcaacagctccacaaccaggtccttctcgagcagcaccagttgcagaatcctcctccgtcatcccccaaagaatttcccttctcaatgactgtactgaacagtaacgcacctccggctgttacgacttcaagcaagcaagtgaaggccccatccagccagaccttctcactcgcacggcctaagtattttttcccttccactaacacaaccgctgccacggtcgccccttcaagcagcccggtgttcaccctgtcaagcacaccccagaccattcagcggacagtgtccaaggaaagcctgctagtttcccacccctctgttcagaccaaatcccccggaggtctgtctattcagaatgaaccgttgcctccgggtcctacggaaccgacccccccaccattcactttcagcattccgtccgggaaccagtttcagcctcgatgcgttagccccattcccgtgtcccccaccagccggatccagaaccccgtggccttcttaagctccgtgcttccgtcactgccagccatcccccctaccaatgctatgggacttccaagatccgcaccctctatgcctagtcagggcttggctaagaagaatacgaagagtcctcagccagttaacgatgataatatcagagagactaaaaacgcagtgatccgcgatctgggtaagaaaatcactttttcagacgtccgacccaaccagcaggaatacaagatttcttcatttgaacagaggttgatgaacgaaatagaatttcgattagaaaggacccccgttgacgaaagcgacgatgagatacagcatgacgaaatccccaccgggaaatgcatcgccccaatatttgacaaacggttgaaacacttccgcgtaaccgagggttcgccggttacatttacgtgcaaaatcgtgggaatccctgtgcctaaggtgtactggttcaaggatgggaagcaaatcagtaaaagaaatgaacactgcaagatgcgccgagaaggggacggaacctgttctttacatattgagagcactacaagcgacgatgacggcaactacaccataatggccgctaatccacagggacggatttcctgcagtggacaccttatggttcagtctctgcctatccgttctcggctgaccagcgctggccagtcacacagaggcagatctagggttcaagagcgggataaggagcccttgcaggaaaggttttttcgaccccatttcctgcaggcccctggggacatggttgcccacgaaggaagactctgcagactagattgcaaagtttccgggctgccgcctcctgaacttacatggttgctgaatggtcagccggtgctaccagacgcttctcacaaaatgttagtgcgcgagaccggcgtccactctctgctcattgaccccctgactcagagagacgccggtacctataagtgcatcgccactaataaaaccggtcaaaactcattttcattggagttatccgtggtagcgaaagaggtgaaaaaagcaccagttatactggaaaagctccagaattgtggggtacctgagggccacccagtgcggcttgaatgcagggtcattggaatgcctcctcctgtcttctactggaagaaggacaatgaaacgataccttgtaccagagagagaatctccatgcatcaggacaccactggatatgcttgtctgctgatccagcctgcaaaaaaatccgatgccggatggtacaccctgtccgctaaaaacgaagccggaatcgtgagctgtactgctcgcttggacatctacgctcagtggcatcatcagatcccgccacccatgtccgtccgccctagtggctctcggtacggcagtctcacaagcaaggggttagatattttttctgcgttctctagcatggagtccaccatggtgtattcttgttcaagcagatcggtagttgaatcagatgagctgtag

SEQ ID NO: 28548 - DNA, 4206 bp, synthetic construct
  source 1..4206: mol_type = other DNA; note = Synthetic coding sequence
atggcatcttgcgcatctatcgacattgaagatgcgacccaacatttgagagatatcctaaagctggatcggccagccggtggtccaagtgccgaaagtcctcggcctagctccgcgtataatggggacttgaatggcttgctcgtgccagacccactgtgcagcggagattctacatctgcaaacaaaactgggctccgaaccatgccacccatcaacctgcaagaaaagcaggtgatttgcctttccggtgatgacagttcaacctgtatcggaattctcgccaaagaggttgaaatcgtcgcctctagcgactccagtatctcatctaaggcccgtgggagcaacaaggtcaagatccagcctgtggccaaatatgattgggaacaaaaatattattacggaaatttaatcgctgtcagcaattcatttttggcttacgctattcgcgcagctaataacggttccgctatggtccgcgtgatcagcgtgagcacatccgagcggacgcttctgaaggggttcaccgggtcagtagcagacctggctttcgcgcacctaaattcaccccagctggcctgcctcgatgaagccggaaacttgttcgtctggcgactggcattagtgaatggcaaaattcaggaagagatcctggtccacatccgccagccagagggcaccccacttaatcatttccggcgaattatctggtgcccttttattccggaagaatcagaggactgttgtgaggagagctcacccaccgttgcgctattacacgaggacagagcagaggtgtgggatctcgatatgctgcgatcttctcactccacatggccggttgatgttagtcaaataaagcagggcttcatagtggttaagggtcactccacatgcctgtcagagggtgccctaagccccgatggaaccgtgctcgcgacggcctctcacgatgggtacgttaagttctggcaaatctacatagagggtcaggacgagcccaggtgtctgcatgagtggaagccgcacgacggtcgacctctctcttgtctcctattctgtgacaaccacaagaaacaggaccctgatgttcctttttggaggttccttatcaccggagcagaccaaaatagagaactgaagatgtggtgtactgtgagttggacctgcctgcaaacaattcgatttagcccagatatatttagttctgtgagcgttccaccatctctcaaggtttgcctagatctgtcagctgagtatctgattttgagcgacgtgcaaagaaaagtcctatatgtaatggaactgctccagaatcaggaggagggtcatgcatgctttagcagcatttctgagtttttattaactcatcctgtcctgagctttggcattcaggtcgttagccgatgtcggctccgacatactgaggtcctgcccgctgaagaggaaaatgacagcttgggcgcagatggcactcatggtgccggagcgatggagagtgcagcaggcgtcctgatcaagctcttctgtgttcacaccaaggcactgcaggacgttcagattcggttccagccacagctgaaccctgacgttgtcgcaccactccccacgcatacagctcacgaggacttcacctttggggagtcacggcctgagttggggtctgaaggcttgggatctgcagcacatggttcccagcccgacctcagaagaattgtggagctcccagctccagcagacttcctctctctgtccagcgaaactaagcctaagctgatgacaccagatgccttcatgacacccagcgccagcttacagcagattaccgcctccccaagttcaagcagcagtgggtcttcttctagctcatccagttccagcagctctctgacagcagtcagcgctatgagttccacttccgcggtggatcccagcctgacaagaccaccagaggagctgacactgagcccaaagctccaactggatggcagcttgacaatgtcttcttctgggtccctgcaggcgtcaccacggggtctgttacctgggctgttaccagccccagctgacaagctgacccctaagggtcctggacaagtgcccaccgccacttccgccctcagtctggaattacaggaggtggagcctctgggtttgccccaggcatcccctagtaggacgaggagccctgacgttatctcctctgctagtaccgctctgagtcaagatattccagagatcgcctcggaggccttgagcagaggcttcggatccagcgctcccgaagggcttgagccagattccatggccagcgcagcatccgcactgcatctcctcagtcccagacctcgcccaggtccagagttaggtccacagcttggcctggacgggggaccaggcgatggtgataggcacaacacacccagtctgctggaggcagcgttaacccaagaggcaagtacaccggattctcaagtctggcctacagccccagatattactagggagacatgcagcacgctggccgagagtcccagaaacggactgcaagaaaaacataagagtctggcctttcatcgcccaccttatcatctgttgcaacagcgcgactcacaggacgctagtgccgagcagtcagaccatgacgacgaggtggcctccctggcttctgctagcggtggcttcggcaccaaggtgcctgcacccagactacccgctaaagactggaagaccaaggggtctccgagaaccagtccgaaattgaaaaggaagagcaagaaggatgacggagatgcagcaatgggctccaggctgaccgaacaccaggttgctgagcctccggaggactggcctgctttgatctggcagcagcaaagagaactagcggagctgagacattcccaggaggagcttctgcaaagactgtgcactcagctggaaggacttcagtctacagtgaccggccacgttgagcgtgccctggaaacgcggcacgaacaagagcagagacgtctagagagagcccttgcagagggtcagcagaggggaggccagctgcaggagcaattgactcagcagctgtcgcaggctctctccagcgctgttgccggtcggctagagagatcaatcagggacgaaatcaagaagaccgtccccccttgcgtttctcggtccttggaacctatggcaggccaactctccaacagcgtcgctacaaagctcaccgcagtcgaggggtccatgaaggaaaacatttcaaagctcctcaaatccaagaacttgactgatgccattgcgagggccgcagcagacaccctgcaggggcctatgcaggctgcctatcgcgaggcattccagagtgtagttttaccagccttcgagaaatcttgccaggccatgtttcagcagatcaatgacagctttcggcttggcacccaggaatacttacagcagctggaatcccatatgaagagtcggaaggccagagagcaggaggcgcgtgaacccgtgttagcccagcttagaggtttggttagtactcttcagtctgctacagaacagatggccgcaacagtggccggatctgtgcgcgctgaagtacagcaccagctccacgttgccgtcgggtcattgcaagagagcatcttggcccaggtccagcggatcgtcaagggggaagtgtctgtggctctaaaggagcagcaggcagccgtaacatcttcgatcatgcaggcaatgcgatcagcagcagggaccccggtgccatcagcacatttggactgtcaggcacagcaagcacacatactccaactgcttcagcaaggccacctgaatcaggcattccagcaggccctaacagcagccgatcttaacctggttctctacgtgtgtgagacggttgatccggcacaggtgtttggccagccgccttgccctttgtcccaaccggtgctgttaagcctgatccaacaactggcaagtgacttagggacccgtacggatttgaaacttagttatcttgaggaagcggtgatgcacctcgaccattctgatcccataactagagaccacatggggtccgtgatggcccaggtacgtcagaagctgtttcagtttctgcaggcagagccccacaactctctcggaaaagccgcacgccgactttcactgatgttgcacggactggttacccctagcttgccatag

SEQ ID NO: 28549 - DNA, 576 bp, synthetic construct
  source 1..576: mol_type = other DNA; note = Synthetic coding sequence
atgtctagcggagccgatggagggggaggggcagctgtggccgctagaagcgataaggggtcccctggcgaagatggctttgtgccatcggcattgggcactagggaacattgggatgcggtatatgaaagagagctgcagacctttcgcgagtatggcgacacgggcgaaatatggttcggggaagaaagtatgaatagactcatccgctggatgcagaagcataagattccactcgacgcctcagtgctggatataggaactggaaacggagtcttcttggtggaattggctaagttcggattcagtaacatcactgggatagactacagtccttctgctatccagctttcagggtccattatcgaaaaagagggcctttctaacattaagctgaaagtcgaggatttcctgaacctcagtacacagctcagtggtttccatatttgcatcgacaagggcacattcgacgcaatctctttaaaccccgacaacgctatcgaaaagcgtaagcagtacgtgaaatctctgtcacgggtcctgaaggtgaaagggttcttcaacaacgtcatgtag

SEQ ID NO: 28550 - DNA, 2622 bp, synthetic construct
  source 1..2622: mol_type = other DNA; note = Synthetic coding sequence
atgggaaatagagaaatggaggagctgatccctctggtcaatagactccaggatgctttctccgcactgggccagtcatgtctgctcgaactgccccagattgctgttgtgggaggtcagagtgctggcaaatcttccgtcctcgagaactttgtgggcagagactttctgccaaggggatccggcattgtgaccagaagaccattagtactccagctagtcacatcaaaagccgaatacgcggaatttctccactgcaagggcaagaagttcacagattttgatgaggtcagactggagatcgaagcagaaaccgaccgcgtaaccggaatgaacaaaggaattagctctattccaatcaaccttcgggtgtactctccccatgtcctaaacctgacactcattgatttgcctggtatcaccaaggtcccagtaggagaccagccaccagatatcgaatatcagattcgtgaaatgatcatgcaatttatcacacgcgaaaattgtcttattctggcggtaactcccgcaaacactgacctcgccaacagtgacgctcttaaacttgccaaggaggtggatcctcagggcctccgaacaatcggcgtcattacaaaactcgatctgatggacgaaggcaccgatgcaagagacgtgcttgagaacaagctcctgcccttgcggagaggttacgtgggggtcgtgaaccgctctcagaaggatatagacggtaagaaagacatcaaagccgctatgttagccgagcggaagttctttttatcccacccagcttatagacacatcgcggaccggatgggcaccccgcatctgcagaaggtgctcaaccagcagctgaccaatcacatccgggataccctgcctaattttaggaataagttgcagggtcaacttctgagcatcgagcacgaggtcgaagcctacaagaacttcaagccagaagatcccaccaggaagacaaaggcactgttgcagatggtgcaacagtttgcagtcgatttcgaaaagcgcattgagggcagcggtgaccaagtggatacactagagctctctggaggagcaaaaataaaccgcatctttcacgagaggtttccatttgaaattgtgaaaatggagttcaacgagaaagaactgaggagagagatttcgtatgctattaagaacatacacggcattcgtaccgggctgttcacccctgacatggctttcgaagccatcgtgaagaaacagattgtgaaactgaagggcccttccctcaagtcagtggatttggtgatccaggaactcataaataccgtgaagaaatgcactaaaaagctggctaattttccgagactctgtgaggagacagagcgcatcgtcgcaaaccacatccgtgaacgcgagggtaaaaccaaggaccaggtcctgctactgatagacattcaagtgtcctacatcaacaccaaccacgaagactttattggctttgcaaacgcccagcagaggtcttcgcaggtgcacaagaagaccaccgttggtaatcaggggaccaacctcccccctagccggcaaatagtgattcggaagggctggctcactatatccaatatcggcattatgaaagggggatctaagggttattggttcgtcctaaccgctgagtccttgagttggtacaaggacgatgaggaaaaggaaaagaagtacatgttacccctggacaatcttaaagtgagagatgtcgaaaagtcattcatgagctcaaagcatatctttgcccttttcaataccgagcagcgcaatgtgtataaagattaccggtttctggagttagcatgtgattcacaagaggacgtcgattcatggaaggcttctctcctgagggccggtgtgtacccagacaagtccgtgatgaacaagaaggccgaaaacgacgagaacgggcaggccgagaacttctcaatggatccccaactggaacgccaagtagagacaattcgaaatcttgttgactcctacatgagtatcattaataagtgcatcagggacctaattccaaaaacaattatgcacctgatgatcaacaatgtgaaggattttatcaacagcgaactgctggcccaattgtactccagcgaggaccaaaacaccctcatggaagaaagcgccgagcaggctcagcggagagatgagatgcttaggatgtaccaggctctaaaagaggctctcggaattatcggagacatttctactgccaccgtctcaacccctgcccctcctcccgtggatgatagctggattcagcattcaagaaggtctccacccccaagtcctacaactcagcgtagaccaaccctgagcgcgccactcgctcgtccaacatccggcagagggcctgctcccgctattccctccccaggccctcatagtggagcaccacctgtgccctttcgccctgggcctttaccgccttttccgtcatctagcgactcgtttggggcaccgcctcaggtgccaagtagaccaacacgggctccgccttctgtcccgtctcgtagacctccgccaagtccaacaagaccgaccattatacggcctctagagagttcattgctggactag

SEQ ID NO: 28551 - DNA, 3111 bp, synthetic construct
  source 1..3111: mol_type = other DNA; note = Synthetic coding sequence
atgaggaaacaggaggtgcgaaccggaagggaggccggacaggggcacgggacgggatcgccagcagagcaggtgaaggccctgatggacctattggcaggcaaagggagtcaaggctcccaagctccgcaggcactggatcggactcctgacgcgccactgggcccttgctccaatgatagccgtatccagagacatcgaaaggccctcctgtccaaagttggcggtggcccagagcttgggggaccatggcaccgtttagctagccttctgctggtggaggggctgacagaccttcagctccgggagcacgactttacacaagtcgaggcaacccgtggcggtgggcatcccgcacgcacagtggctcttgatcgattgttcctgcctctgtcaagagtgtccgtgcctcctcgggtgtcaataaccataggagtggccggaatgggtaaaacaacactggtgcgccattttgtgcggttgtgggcacacgggcaggtcggcaaggatttctctctggtcctaccactgacattcagggatctaaatacccacgagaagttatgcgcagacaggttgatctgctccgtcttcccacacgtgggcgaaccgtctcttgcagtggctgtcccagctagggctctgttgatcctagatggtctggacgaatgccggaccccactggactttagtaatacagtcgcttgcactgatcctaagaaagagattcccgtagatcatctgataacaaacattatccgtggcaacctgtttccggaagttagtatctggatcacttcacgaccctcagccagtggacagatacctggagggctggtcgaccggatgaccgagattagaggcttcaacgaggaggaaattaaagtgtgtttggagcagatgtttcctgaggatcaggccctgcttggatggatgctgagtcaggtgcaggccgatcgcgctctatacctgatgtgcactgtgccggctttttgcaggctgaccggcatggcactcggccatctttggcgttccagaactggccctcaagatgctgagctttggcctcccaggactctgtgtgaactctattcctggtatttcagaatggcgctaagtggcgagggacaagagaaaggtaaggcgtcacctagaatcgaacaagttgcccatggagggagaaaaatggtcggcacacttggtcgactggccttccacgggctgctgaagaagaagtacgtgttctatgagcaggatatgaaagcatttggagtcgaccttgctctcctccagggcgcaccttgtagctgcttccttcagagagaagaaacgttggcatcaagcgtggcttactgcttcacgcacctctctctgcaggagttcgtggcagccgcatactattacggagccagcaggcgggctattttcgacctctttaccgagtccggcgtctcttggccgcgattaggctttttaactcatttcaggtcagcagcccagcgagccatgcaggcggaggacggcaggctagatgtgtttcttcggttcctgtctggcctgctttcgccacgcgtgaacgctctgctcgccggatctctccttgcacaaggtgagcatcaggcctatcggacacaggtagccgagctcctgcaagggtgtctgcgcccagatgccgcagtgtgtgctagagccatcaatgtcctccattgtctgcatgaactccaacacaccgaactggccaggagcgtcgaagaagccatggaatctggtgcgttggcacgcctgactggcccagcccaccgagcagccctggcctatttactccaagtctctgatgcctgtgcgcaggaagcgaacctctcattatctctatcccagggtgtactgcaaagtctgctcccgcagttgctgtattgccgaaagttgcgcttagatacaaaccaattccaggatcctgtcatggaactgctggggtctgtgctgtccggcaaggactgtcgtatacagaagatttccttggccgagaatcagatcagcaataagggggctaaagctctggccaggtctctcttagtgaacaggagtttgacatccctggatctaaggggcaattcaattggccctcagggagcgaaggctctcgcagatgctttgaaaatcaaccgtactcttacatctctcagtttacagggtaacacggtcagggacgatggcgctagaagcatggctgaggctctagcctccaacaggactcttagcatgttgcatttacagaaaaacagtattggacccatgggcgcacagcgtatggctgacttaaagcaaaaccgcagcctgaaagaactcatgttctcatccaactccatcggagacggaggggctaaagctctggcagaggctctcaaggtgaatcaggggctggaaagtctcgatctccaaagtaactctatttctgatgctggggtcgctgccctaatgggggctttatgcactaaccaaaccttactttccttgagcctaagagagaactctatttctccggagggggcacaggctattgcccacgctctgtgtgcaaattcaacgctcaagaatctggatctccagtggaactttatccaagccggagctgctcaagctctcggtcaggccttgcagctgaatcgtagtctcacctctcttgacttgcaggaaaatgcaatcggagacgatggagcctgtgccgttgctagagctctaaaggtcaacacagccctgaccgccttgtacctgcaggtcgcctctattggcgcatccggggctcaggtgctgggggaggctcttgcagttaatcggacactcgaaattctggacttgaggggtaatgccatcggagtagccggtgcaaaggctttggcaaacgccttgaaagtaaatagctcactgagacgtctgaacctccaggaaaactccttgggaatggatggagccatctgtattgccacagccctgtctggaaaccatcggttgcagcacataaacctgcagggtaatcacataggagactccggcgctcgaatgatctccgaggcaatcaaaaccaacgcccctacttgcaccgtcgaaatgtag

SEQ ID NO: 28552 - DNA, 2784 bp, synthetic construct
  source 1..2784: mol_type = other DNA; note = Synthetic coding sequence
atgttctggaagttcgacttgaataccacaagtcatgtagacaagctgctggacaaagagcacgtgacattgcaagagctcatggacgaggacgatatcctgcaggagtgtaaggcccagaatcagaagttgctggattttctgtgccggcaacagtgcatggaagagttggtgagcctgattacccaggatcccccactggatatggaggaaaaggtccgcttcaaataccctaacaccgcctgcgagcttttgacttgtgatgtaccgcagataagcgaccgcctgggaggagatgagtccctcttgtctttactctacgacttcctggatcacgagccccctctcaacccgctcctggctagtttcttctccaagacaataggaaatctgattgctaggaagacagagcaggtgataaccttcctaaagaaaaaagacaagtttattagtctggtcctgaagcatattggaacttctgccctgatggatctcttgcttaggctggtgtcatgcgtggagccggcagggctccgtcaggacgttctgcactggctgaacgaggaaaaggtcatccaaagactggtggagcttatacacccaagtcaggatgaggaccgccagtcaaacgccagtcagaccttatgtgatatcgtgaggctgggcagggaccagggttcccaactacaggaggccctggagcccgacccactgctcacggctttggaatcccaagactgcgtggagcagctactaaaaaacatgttcgatggcgatcgaactgaaagctgcttggtctctggcacacaagttctcttgactctgcttgaaactcggagagtcggcacagagggcttagtggatagcttcagtcaggggctggagcggagctatgccgtcagttcttccgttctacatggtatcgaacccaggttgaaagacttccatcagttgctcttgaacccacctaaaaaaaaggccattcttacaacgatcggtgtattagaggaacctttgggtaatgccaggctgcacggggctcggctgatggcggctctgctgcataccaacacccctagcattaaccaggagctttgcagacttaatacaatggacctcctactcgatctcttttttaagtatacgtggaataatttcctgcatttccaggtcgaattgtgtatagctgccatcctctcccatgccgctcgcgaagagcgtacagaagccagcgggtccgagagccgcgtagagcctcctcacgagaacgggaaccggagtctggaaactcctcagccagccgcaagtctaccggacaatactatggtgacccacctttttcagaagtgttgcctggtgcagcgcatccttgaggcctgggaggcaaatgatcacacccaggctgccggtggaatgcgcagggggaacatggggcacctcacccggatcgccaacgcagtggtgcaaaacctggagcgcggaccggttcagacccacataagtgaggttattcggggactccccgctgattgtaggggcagatgggagagcttcgtggaggaaaccctgaccgagactaatagaaggaacaccgtggatttggctttctctgactaccaaattcagcagatgactgccaattttgttgatcaattcggttttaatgatgaagaatttgctgaccaagatgataacatcaatgccccattcgatcgcattgctgagattaacttcaatattgacgcagatgaggattcacctagcgccgctctgtttgaggcatgctgctcagatagaatccaaccctttgacgacgacgaagacgaggacatatgggaggatagcgacacccggtgtgccgctagggttatggctaggccaaggtttggggctccacatgcttcagagagctgctcaaaaaatgggccagagcgcggaggacaagatggcaaagcctcactggaggcccatagagacgcaccaggagcaggtgctccccctgcccctggcaaaaaagaggcccctccagttgagggtgatagcgaagctggagcaatgtggacagctgtttttgacgagcctgcaaacagtactcccactgccccaggcgtggtgagggacgtgggaagttccgtgtgggcagccggtacttctgcacctgaagagaagggctgggccaagtttaccgacttccagccgttctgttgtagcgaaagcgggccacgctgctccagtcctgtggataccgagtgctcccacgcagaaggatctcgcagtcaggggccagaaaaagccttctccccagcctcaccatgcgcatggaatgtctgtgtgacaagaaaggcacccttattggcatcagattcttccagcagtggcggatctcattcagaggacggagaccagaaggccgcttctgccatggacgcagtgtcgcgcggaccaggacgggaggctcccccacttcctaccgtggcaaggacagaggaggccgtgggcagggtaggttgcgcagactccaggcttctgagtcccgcttgccccgctcctaaagaagtgacagccgctcccgcagttgctgtgccccctgaagccactgttgctatcacaactgccctttcaaaggccggaccagccatccccacccctgccgttagttccgcactggccgtagccgtgcctctgggaccgatcatggcagtcaccgccgctcctgctatggtggctactttgggtactgtaactaaggacggacagatgccaaggcaaaaagagcttccctag

SEQ ID NO: 28553 - DNA, 2220 bp, synthetic construct
  source 1..2220: mol_type = other DNA; note = Synthetic coding sequence
atggggttcagtaacatggaagatgacggccctgaggaggaggagagagtggctgaacctcaggccaacttcaatactcctcaggccctgaggtttgaggaactgctggccaatctcctgaacgaacaacaccaaattgcaaaggagctgttcgagcagctgaagatgaaaaagcccagcgcaaagcaacagaaagaagtggaaaaggtcaaaccgcagtgtaaagaagttcaccaaacactcatactggatcctgcccagcgcaagaggcttcagcagcaaatgcagcagcacgtgcaacttctcacacagattcacttactcgcaacctgcaaccccaatttgaaccccgaggcttccagtacccgaatttgccttaaggagctgggtacctttgcacagtcttccatcgccctgcatcaccagtataacccgaagtttcaaaccctttttcaaccctgtaatctaatgggtgcaatgcaacttatagaggatttttctacccacgtgtccatagactgcagtcctcataagacggtaaaaaagaccgcgaatgagtttccatgtctgcccaagcaggtggcctggatccttgcaacgtcaaaggtcttcatgtatccggaattattgccagtttgctccctcaaggcgaaaaatccgcaggacaagattctgttcaccaaggcggaagacaacctgttggcattaggactgaagcattttgaagggacagaatttctgaacccgctcatctcaaagtatctgcttacatgcaagaccgcaaggcagctcacagtcagaatcaagaatttaaacatgaatagggcacctgacaatatcataaaattttacaaaaaaaccaagcagttgccggttctgggcaaatgttgcgaggagatccaaccgcaccagtggaagcctccaatcgagcgggaagagcacagactccctttttggctaaaggcttcactcccaagcatccaggaggaactacggcacatggcagacggagccagggaggtcggtaacatgacaggaactacagagattaactcggaccagggtctcgagaaagacaattcagagctggggtcagagacgaggtatccattactcctacccaaaggagtagtgctgaagctcaaacccgtggctgatcgctttcctaaaaaagcctggcgccaaaaacggtctagcgtcttaaagcctctgctgatacagccttctccctccctgcagcctagtttcaacccgggaaagacccccgctcagtcgacccacagcgaagccccaccgtccaagatggtgctgagaatacctcaccccatccagccggcaacagtcctccagacagtgccaggcgtgccacctttgggagtttcagggggtgagtcattcgaatctccagcggctctgcctgccatgccacctgaggccaggacatcgttccctctgagcgagagccagacactcctctccagtgctcctgtgcctaaggtcatgatgccctccccagcgtcctccatgttccgtaaaccctatgtgagaaggcgcccatctaagcgccgaggggcacgtgcctttaggtgcataaaaccggctcctgtaattcatccagccagtgttatttttaccgttcccgcaactactgtcaagatcgtgtccctgggagggggatgcaacatgatacagcccgtgaatgcagctgtcgcccagtccccacagaccatccctatagccaccctgctggtgaaccctacgtctttcccttgccctctgaaccagccccttgtggccagctcagtctcccctttaatcgtgtccggcaactctgttaatctgcccatcccaagtacacccgaggataaagctcatatgaacgtggacatcgcatgcgctgtcgctgatggtgagaatgctttccaggggctggagcccaaactcgagcctcaggagctgtcccctctatccgcaactgtttttcccaaggtggagcattcacccggaccccctccagtcgataagcagtgccaggaggggctgagcgagaacagcgcttacagatggacggtcgttaagacagaagaaggacgtcaagccctggagcccctgccacagggcattcaagagagccttaacaactcatcccccggtgatctagaggaggtcgtcaagatggaacccgaggacgctactgaggagattagtgggtttctctag

SEQ ID NO: 28554 - DNA, 1911 bp, synthetic construct
  source 1..1911: mol_type = other DNA; note = Synthetic coding sequence
atggagaaagccgtcaacgacggatcccatagcgaggaattattttgccatctgaagacaatctccgagaaggaggacctaccgaggtgcacctcagagagccacctgagttgcctcaaacaggatatcctgaacgaaaaaacagagctggaggccacgctcaaggaggccgaattagtgacacatagtgtagagctcttgctacctctgtttaaagacaccatcgaaaaaataaattttgagaatgcaaaccttagcgccctgaatctgaagatctcggagcagaaagagatcttgataaaggaactcgacaccttcaaatcagtgaaattagcgctggagcacctgctgcggaagagggactacaagcagacaggggacaatttgtcctcaatgctcttagagaacctaaccgacaacgaatcggaaaacactaacctgaagaagaaggttttcgagaaggaagcacacatacaggagctgtcctgtttgttccagagtgaaaaggccaacactctcaaggctaatcggtttagccaatcagtcaaggtcgtccacgaaagactgcaaatccagatccataagcgcgaggccgagaatgacaaactcaaagagtacgtgaaaagcctagagacaaaaatcgcaaaatggaacctgcagagtagaatgaacaagaacgaagccattgtcatgaaagaggcatctaggcaaaagactgtggctttgaaaaaggcgtcaaaggtctataagcagaggcttgaccactttaccggcgctatagaaaaattaacttctcagattagggatcaggaggccaagctgtccgaaaccatttccgcaagcaatgcttggaaatctcactatgagaaaatcgtaattgaaaagacagaactagaggtccagatcgagactatgaagaaacaaattatcaacttattagaggacttgaaaaagatggaggatcacgggaagaatagctgcgaagaaatcctgcgcaaggtgcacagcatcgagtacgagaacgaaaccttaaaccttgaaaacacaaagctgaagttacggtttccctgtcggatcacggagtccaaaaatatgaacatactgatcgttctggatatgctttgctatataagtagcgagaaaacgaccttggccgcacttaaggacgaggtggtgtccgtcgagaatgaactctccgagctgcaggaggtggagaagaaacaaaagactctgatagagatgtacaaaacccaggtgcagaagttgcaggaagctgccgagattgtcaaaagtagatgcgagaatctcctgcataaaaataatcaaattacgaaaaccaagaataagaatgttgaaaagatgagagggcagatggagtcccatctaaaggagctggaaagggtatgcgatagtcttaccgctgcagagcgtcgcctccacgaatgccaggagtccctacagtgctgcaaagggaaatgcgctgaccaagaacacacaattagagagctgcagggccaagtggatggcaaccataatcttctgacaaagctaagcctggaggaagagaattgtctgatacagttgaagtgtgagaatctccagcaaaagctcgagcagatggacgccgaaaacaaggagctcgagaagaagctcgctaaccaagaagaatgtttgaagcactccaacttgaagttcaaagaaaaaagcgccgaatataccgcactcgccaggcagctggaggcagctttggaagaggggaggcagaaggtcgcagaagagatcgaaaaaatgtcttctcgggaatctgcccttcagatcaaaatactggacttagaaacagagctgcgcaaaaaaaacgaagagcaaaaccagctggtatgcaagatgaactctgacccagaaactccatag

SEQ ID NO: 28555 - DNA, 873 bp, synthetic construct
  source 1..873: mol_type = other DNA; note = Synthetic coding sequence
atggctgctgtggaaaaaaggagacaggcagtccctcctcccgcaggattcactgatagcggccgacagagtgtatctagagccgctggcgctgctgaatcggaagaggacttcctgcgccaagtaggtgtcaccgaaatgctgagagctgctttactgaaagtgctcgaggcgaggccagaggaaccaattgccttcctggctcactatttcgaaaacatgggcttgaggagccccgtgaacgggggagctggtgaaccccctggacagctcctgctgcagcaacagagactgggacgagcactgtggcatttacgcctggcccaccactctcaacgtgccgcatttaataacaacgtatcagtggcatatgagtgcttgtcggcgggaggccgtcgcaagcgtcccggtctcgatggtcgaacttattcagaactgttaaggcggatatgtcgcgacggccaggcccctgaagaagtggtagcccctcttctaagaaaggtgcagtgtagggaccacgaggcggtccctctatctgtgttccgagccggaactttaacctgcttcgtcttgctcgagttcgtggcaagggccggtgctctgttccagcttctagaggactcggctgccgctgtcgccgacagacgagtcggccaggctgtcctggacactctggagggggctctacaggctagtgatgccgcagctcctgctcgcttcctggaggccggatcccgcttggggccagattcattagcgctggccttggacagggcagtgggcggacggagacccagcgcgcctatgacaagagaagagtttttggaacgtgccgcagctctattcatcgccaaagttaagcctgtgggctag

SEQ ID NO: 28556 - DNA, 1221 bp, synthetic construct
  source 1..1221: mol_type = other DNA; note = Synthetic coding sequence
atggcagatagccagctgttctgcgtggcagaggaaagaagcggccactgcgccgtggtggacggcaactttctctacgtgtgggggggttacgtgagcatcgaggacaacgaagtttacctgcccaacgacgagatatggacttacgatatcgattccggcttgtggaggatgcatctgatggagggcgaactgcccgcatccatgagcggatcctgcggcgcttgtatcaacggaaaactctatatctttggtggatacgacgataaagggtactccaatcggctctatttcgtcaacctccggacccgggatgaaacctacatatgggagaaaatcacagacttcgagggccagccacctaccccccgtgacaaactgagttgttgggtgtataaagataggcttatttatttcggcggatatggctgtcgaagacactcggaacttcaggattgttttgatgttcacgatgcaagttgggaagagcagattttttggggttggcataacgatgttcatatctttgacacaaagacccaaacctggtttcagcccgagatcaagggtggcgtgccaccccagccgagagcagctcacacgtgcgcggttctcggcaacaagggctatatcttcggcggacgggtcctgcaaacccggatgaatgacctgcattaccttaacctcgatacctggacctggtcagggaggattaccatcaatggggagtcccccaaacaccgctcatggcacacactgaccccaatcgcggacgataaattatttctgtgcggaggcctatctgcggataatatcccactgtcagacggctggattcacaacgttaccaccaactgctggaagcaattgactcatctcccgaaaacccgccctaggctgtggcacaccgcatgtttaggcaaggagaacgaaataatggtttttggcggaagtaaggatgatctcctagctttagatacaggtcactgtaatgatctgctcatcttccagacacaaccatactcactgttaaggagctgcttggattgtataggcaagaatagcatcatgttagagtcgcagatctcactgctgcccccaaagctgttgcagcaggtgctgaaaaagattacattttgggcagccgcaaatcatcgggaagagcagagagtacaaaaggaagagacagagaataagtaccagtggatctcctccaactag

SEQ ID NO: 28557 - DNA, 1113 bp, synthetic construct
  source 1..1113: mol_type = other DNA; note = Synthetic coding sequence
atggtgcagcccttcacaacaattccctttccaccacctccacagaacggaatcccgaccgaatatggggtgccgcatactcaggattacgccggtcagactggagagcataatcttactctctacgggagcacgcaagctcacggcgaacagtcgtccaactcaccatctactcagaatggtagtctcacgaccgaagggggagcccagaccgatggccagcagtcacagacacaatcttctgagaattctgagagcaagagcaccccaaagaggctccacgtctctaacattccttttcgattccgcgacccagacctgaggcaaatgttcggccaatttggcaagatccttgacgtcgagatcatcttcaatgaacgtgggtccaaaggcttcggctttgtcactttcgagaattcagcagacgccgacagggctagggagaagctgcatgggacagtcgtggaggggagaaaaatagaggtcaacaatgccacagcccgagtgatgaccaacaaaaaaatggtgaccccttacgcgaatgggtggaaattgtcccctgtcgtgggagcggtctatggccctgagctttacgccgcatcttcttttcaggccgatgtaagcttgggtaacgatgccgctgttcctcttagcgggagagggggaattaacacatatataccactgattatccctggctttccctatccaactgctgcgacaacggcagctgcattcagaggcgcacacctgcgaggacgaggcagaactgtgtatggagccgtccgggcagttccgccaacggccatccccgcatatccaggcgtggtttatcaagacggcttttacggcgcagatctctacatagaaagcgctaattgcttcagatctaatagggttgatatgcagccaacagatatgcattccctgcttctgcagccacagccaccacttctgcagccactgcagccactcaccgtgacagttatggcgggatgcacacaaccgacaccaacaatgcccttgcccttgcccctggccatggagctggctttgtggagagtctatacagaggtagctaccgccgacttgccacccaccgaggtgacttag

SEQ ID NO: 28558 - DNA, 534 bp, synthetic construct
  source 1..534: mol_type = other DNA; note = Synthetic coding sequence
atgagcgaagatagcgagaaggaggattactctgatagaacaatctccgacgaagacgagagcgatgaagatatgttcatgaaatttgtgagtgaggatctacacagatgtgcactcctcacggccgattccttcggagacccctttttcccaagaacaacccagattctcctcgagtatcagttgggccgatgggttccacggttgagggaacctagagacctgtatggcgtatcttcatccggtcctctcagcccgactcgctggccataccactgtgaagtaattgatgagaaagttcagcacatagatggggtcagctgttggtccgagagccaccaggccggtgcgcagtggtgtgacctgggatccctccagccacctccgccaaggttcaagaggtttgcatgcttctcactgctgagttcaagagattaccgtagagtcccccctcggtcagcaaattttgtatttctggtagagaccgggtttcaccatgttggacaggacggactgagattgctgactagctag

SEQ ID NO: 28559 - DNA, 1827 bp, synthetic construct
  source 1..1827: mol_type = other DNA; note = Synthetic coding sequence
atgtccgataaatccgatttgaaggccgaactcgagcgcaagaaacagagactggcacagatacgcgaggagaagaagagaaaagaagaagagcgcaagaagaaagaagcagatatgcaacagaagaaggagcctgtccaggacgacagcgacctcgatcggaaaagaagagaaacagaggcgctgctacagagtatagggatttctcccgagccgcctctggtgcctacgcctatgagcccctcatccaagtctgtttcaacgccctccgaagccggatcccaggacagcggcgacttggggcctctgactaggaggcgattacataaactgggcgtgagcaaagtcacccaggttgactttctcccaagagaggtcgtgtcttatagcaaagaaacccagacccctctggctacgcaccagtctgaggaggacgaagaggacgaagagatggtcgagtcaaaagtgggccaggacagcgaattggagaatcaggataagaagcaggaagttaaggaggccccacctcgagagctcacagaagaggagaaacaacaaatcctccactccgaagagttcctgatcttcttcgaccggaccatccgagtgattgaaagggctctggccgaagattcggacatcttttttgactattctgggagggaactggaggagaaggacggtgacgtccaggctggcgcaaacctctccttcaacaggcagttttatgacgaacattggtcaaagcatagagtggtgacgtgcatggactggtcactccaatatccggagttaatggttgcttcgtataataacaatgaagatgccccacacgagcctgacggcgtggctttagtgtggaatatgaaattcaagaagaccacgccggaatacgtttttcattgtcagagcagtgtgatgagtgtgtgcttcgctcggtttcatcccaacctcgtggttgggggaacgtattctggacagatcgtgctgtgggataaccggagccacagaaggacacccgtgcagcggacgccactgtccgcggctgcacacacacatcctgtttattgtgtgaacgtggtgggcacacagaatgcccacaacctgatcacggtctccaccgacggcaagatgtgctcttggagtctcgatatgctttccactccccaagaatccatggaactggtatataataaaagtaaaccagtcgcagtaactggaatggcgttccccacaggagacgtcaacaattttgtggtcggcagcgaagagggtacagtctatactgcatgtcgccacggaagcaaagccggtataggggaagtgtttgagggacaccagggacccgtgacaggcatcaattgtcatatggctgttggcccaatcgatttcagtcaccttttcgtgaccagctctttcgattggacggtcaagctgtggactaccaagcataacaaaccgctctatagtttcgaagacaacgccgattatgtctatgacgttatgtggtctccagtgcatccagccctcttcgcctgtgtcgacggaatggggcgactggacctgtggaatttgaataacgatacagaggttccaacagcatcagtcgccattgaaggcgcaagtgcgttgaaccgcgtccggtgggcccaggcgggtaaagaggtggcggtgggggatagcgaaggacgaatctgggtttacgacgtgggtgaattagcggtgccacacaacgacgaatggacccgatttgcgcgaaccctggtggagataagggcgaacagagcagattctgaagaagagggtacagtcgaactcagcgcgtag

SEQ ID NO: 28560 - DNA, 627 bp, synthetic construct
  source 1..627: mol_type = other DNA; note = Synthetic coding sequence
atggagggcgctgcagcacctgtggccggtgatcgtcctgacctcgggctgggagctcctggctctcctcgcgaagcggtcgccggagcgactgcagctttggagcctcgcaaaccccacggggtgaagaggcatcaccataaacacaacttaaagcaccggtatgaactccaggagacactggggaagggaacctacggcaaggtaaagcgggcaaccgagcggttctctggacgtgtggtggccattaagagtatccgcaaggacaaaatcaaagacgagcaagatatggtacatattaggagggagatcgagattatgagttcgttgaaccaccctcacatcatttccatctatgaagtgttcgagaataaagacaaaatcgttatcattatggagtatgcgtcaaagggcgagctctacgactatatcagtgagcgacgacgtctgagcgagcgagaaactcgtcacttcttcagacagatcgtttccgcagtccactattgtcataagaatggcgtggtacaccgagatcttaagctgaaacgaccgtctcgggaaaatcaggtgactacgttacctcagtccgctgtgtccctacggtcatgttggaccgtgatgatgtag

SEQ ID NO: 28561 - DNA, 990 bp, synthetic construct
  source 1..990: mol_type = other DNA; note = Synthetic coding sequence
atggaagtggcggagcccagtagtccaacagaggaagaggaggaagaggaagagcattccgccgaacctaggcccaggacacgttcgaatcctgagggagccgaggatcgggctgtaggagcccaggcttctgtgggatcaaggagcgagggtgagggggaagccgctagcgcggatgatggctccctgaacacctcaggtgctggacccaagtcctggcaggtgccaccacccgcaccggaggtccagattcgtacacccagagtaaactgccccgagaaggtgatcatttgccttgacctctccgaggaaatgtccctgccaaaacttgaaagttttaatggaagtaaaactaatgcattaaacgtgtcccagaaaatgattgaaatgtttgtgcgcacaaagcacaaaatcgacaagtcgcatgagtttgcattagtcgtcgttaacgacgatacagcctggctaagtgggctgacgtccgatcctcgcgaactgtgcagctgtctgtatgaccttgagactgcctcatgtagcacgtttaacctggagggacttttttcccttatccagcagaagacagagcttcccgtcacagaaaacgtacagacaatccctcccccttatgtggtcaggaccatcctggtctactcacgacccccttgccagccacagttttctctgactgaacccatgaaaaaaatgttccaatgtccatatttcttttttgacgtggtgtatattcataacggaacggaagagaaggaagaagaaatgtcttggaaagatatgtttgcttttatgggatctctggacactaaggggacatcctataagtacgaagtggccctggccggacctgctctggaactgcacaattgcatggccaagctgctcgcccaccccctgcagagaccctgtcagtcacacgcttcatacagtcttctagaagaggaagacgaggccatagaagttgaagccacagtgtag

SEQ ID NO: 28562 - DNA, 885 bp, synthetic construct
  source 1..885: mol_type = other DNA; note = Synthetic coding sequence
atgtcacagcccgctggagggcgacgcaagcctcgcaccctaggccctcccgtctgtagcattagaccatttaaatccagtgaacagtatctcgaagcaatgaaagaggatctcgccgagtggttgagagacctctatggactggacatcgacgcggcaaacttcctccaagttctggaaacaggtctggtcctatgccagcatgctaatgtcgtaacagatgccgctctcgcgtttctggccgaagctcccgcacaggctcaaaagattcccatgccccgagtgggcgtgtcctgcaacggcgctgcccagcctggcacgttccaggcccgtgacaacgtttccaactttatccagtggtgcaggaaagagatgggtattcaagaggtactcatgtttgaaacagaggatctggtactgaggaagaatgtgaaaaacgtagtgctctgcctgttggaactcggccgtcgcgcatggaggtttggggtggccgctccaacattagtgcagctggaagaggagattgaggaggaagtgcgcagagagcttgcactccctcctctgcctcagccaggacctgacggggcagagccctgcgagcctttgcacgtgccatcggccgtcctgcacgggcaaagtgtgtatgtgttcctaggtcctgcgcgacagcccccaaaagaccgtctgcttcgcgcagtcctgggttctaaggggggagaggcaagcagggtggacggggctagtgtcggtgaggaggaagaagaggggaaagaagagaaagagcccgctgctccactggaatcgtccccacagccacccgaagggctgcagcctcactggttaaaccaggcaccactgccccctgaggaagagtcttgggtgtag

SEQ ID NO: 28563 - DNA, 1554 bp, synthetic construct
  source 1..1554: mol_type = other DNA; note = Synthetic coding sequence
atggagacagatcttaactcccaagacaggaaagacttggataagttcatcaaattctttgctctgaagacagtccaggtcatcgtgcaggctagactgggagagaagatttgtaccaggtcaagctcttctcctactggctcagattggtttaatcttgcgatcaaagatatcccggaggtgactcacgaggccaagaaggcactggcgggacagttacccgcagtggggcgatccatgtgcgtggaaatatctttgaaaacaagcgagggtgactctatggagttagagatttggtgcttggaaatgaacgaaaagtgtgataaagaaatcaaggtctcctataccgtgtacaaccggttaagcctcctcctgaaaagtcttctcgccattactcgagttaccccagcatacagattatctaggaaacagggccacgaatacgtcattctttataggatttatttcggagaagtccagctgtctggcttaggcgaaggcttccagaccgtgagagtcggcacagtggggactccagtggggacaattactttgagctgtgcttaccgaataaacctcgcctttatgtccacgcggcagttcgaaaggaccccccctattatgggtatcataatcgaccacttcgtggatagaccctaccccagcagctcccccatgcacccttgcaattacagaacagctggggaagacaccggcgtgatctaccctagcgttgaggactcacaggaggtgtgcaccacctccttcagtactagccctcccagtcagcttagttcgagtcgcctttcctaccaacccgctgcattgggagtggggtccgctgatcttgcctacccagtggttttcgctgcgggtctgaacgctacccatccacaccagctcatggttcctggaaaagaaggtggcgtacctctggctccaaatcaacccgtgcacggcacacaggcggaccaagaacgcttggccacgtgtacaccaagtgaccggacacattgtgcagccaccccttcctcatcagaagacaccgaaactgtgagcaactctagcgagggtcgagctagtcctcacgatgtgctggagaccatatttgtgcggaaggtcggcgctttcgtgaacaaacctattaaccaggttacactgacatcgctggacattcctttcgccatgtttgccccaaaaaacctagagctggaggacaccgatccaatggtcaacccccctgacagtccggaaacagagtctcccctccaaggctcactgcattcagatggctcatctggaggaagctctggtaacacccatgacgacttcgtgatgatagattttaagccagctttttctaaagatgatatcttgccaatggatctggggaccttttaccgggagtttcaaaatccaccccaactgtccagcttgtcaattgatattggagcccaaagtatggccgaagatctggatagtcttccagaaaagttggccgttcatgagaagaacgtgagggagttcgacgctttcgtggaaacgctgcagtag

SEQ ID NO: 28564 - DNA, 951 bp, synthetic construct
  source 1..951: mol_type = other DNA; note = Synthetic coding sequence
atggcaacattcgtggagcttagcaccaaggctaaaatgcctattgttgggctcggaacctggaagtcaccattgggcaaggtgaaggaagccgttaaagttgcaatcgatgccggatatcggcacatagattgcgcgtacgtgtaccagaatgagcacgaggtgggggaagccattcaggagaaaatacaggagaaagccgtgaaacgcgaggatcttttcatcgtgagcaaactttggcctacgtttttcgagcggccattggtcagaaaagcttttgagaaaacacttaaggatctcaagctctcttatctcgacgtgtatctaatccactggccacaagggttcaaatccggagacgacttgtttcccaaggatgacaaggggaatgcgatcgggggaaaagctacatttttggacgcatgggaggccatggaagagctcgttgacgaagggctggtgaaggcgttgggagtgtccaactttagtcacttccagatagagaaacttcttaataaacccggattgaagtacaaacccgttaccaatcaggtcgagtgtcacccctacctgacccaagagaagctgattcagtattgccacagtaaggggataaccgtaaccgcatactctccgctggggagccctgacagaccatgggccaagccggaggatccatctctcttagaagatcctaagattaaggagatagccgctaagcataagaagactgccgctcaggtcttgatcaggtttcacatacagaggaatgttattgtgatccccaagtctgtgacaccggctagaatcgtggagaacattcaggtgttcgactttaagctgagtgacgaggaaatggctacaattcttagcttcaaccgcaattggcgcgcttgcaatgttctgcagagcagtcacctggaggattatccatttaacgcagagtactag

SEQ ID NO: 28565 - DNA, 8273 bp, synthetic construct
  source 1..8273: mol_type = other DNA; note = Synthetic coding sequence
gaacccaaggtagtgtttgcgaaagagcagccagtgcaccgggaggtgcaggcccaggctggtgcttctacgactctgtcctgcgaggttgcacaagctcagactgaggtcatgtggtataaagatggaaagaagctgtctttttctagtaaagtcagaatggaagccgtggggtgcacgcgcagactggtcgtgcagcaggctggccaggccgtcgcaggggaatactcatgtgaggccggaagtcagcggctgtccttccacctccacgttgcagagcccaaagccgtgtttgcaaaggagcagcctgcccacagggaagtgcaagctgaggctggagcctccgcgaccctgtcttgcgaggtggcacaagcgcaaacggaggtcacgtggtacaaggacggtaagaaattaagttccagcctcaaggtacatgtagaggccgctgggtgtactaggcggctcgtggttcagcaggctggtcaggcagatactggagagtacagctgtgaggccggtgggcaacagctgtcatttagactgcaagtggcagaacccaaagccgtgtttgccaaggaacagccagctagtcgcgaggtgcaggccgaggccggaactagcgcgacccttagttgcgaagtggcacaggcacagactgaggtcacatggtataaggatggcaaaaaactgagcagctccagcaaggtgagaatggaggcagtgggctgtaccaggagattggtcgtccaggaagccggacaggctgacgctggtgagtattcctgtaaagctggggatcagcgtctgagttttcatctccacgtggccgagccaaaagttgtttttgccaaagagcagccggcacaccgtgaagttcaggcggaagctggggcttcagccactttgtcttgtgaggttgctcaggcacaaacagaggttacctggtacaaagatggaaagaaattatcatccagttctaaggtccgggtggaagccgtcggctgtactcgcaggctggtggtccaacaggcaggacaagctgaagctggtgagtatagttgcgaggccggaggtcagcagctgagttttcgtttgcaggtggccgagcccaaagccgtgttcgcgaaggagcaagtcgtgtttgccaaggatcaacccgtgcaccgcgaggtgcaggccgaagccggtacttccactatgctttcctgcgaagtagctcaagcccagactgaggtcatgtggtacaaggatggtaagaaactgtcttcaagttctaagatgagagttgaagcggttggctgtacgcgccgtctggtggtccaggaggccggtcaggcggatgccggtgaatactcatgtgaagcaggcggacagagactttcttttcatctgcacgtggccgagcctaaggttgtgttcgctaaggagcagcccgcttgccgggaggtgcaagcagaggccggagctagcgctacattatcctgcgaggtagctcaggggcaaatggaagtcacttggtataaggacggaaagaaactgtcaagctccagcaaggttcacatggaggcttcaggctacacccggaggctcgtcgtacaacaggccggacaagccgacgcaggcgaatacagctgcgaggcaggcggacagcgcctatcctttcggctccatgtggcggaactcgagccacagatctcggagagaccctgccgcagagagccacttgtggtaaaggagcacgaggatattatcctgactgctactctggcgacgccctctgctgctactgtcacatggctgaaggacggcgtcgaaattcggaggagcaaaagacacgaaaccgcctcgcagggcgacacccacacgctgacagttcatggagcccaggtcctggacagtgccatttatagttgtagggtgggcgcagagggccaagactttccagtgcaggttgaggaagtcgccgcaaaattctgtcgactgctcgagcccgtctgtggggaactaggtggaaccgtgacgttggcctgcgagctcagccccgcatgtgccgaggtggtttggcggtgtggaaatacccaactgcgtgtcggtaaaagattccagatggtcgcagaaggcccagtcagatctcttacagtgttgggactgcgagcagaggatgctggagagtacgtctgtgaatcccgtgatgatcatacatcagcacagctgacagtaagtgtgccccgtgtcgtgaaattcatgtccgggctttcaactgtggtcgcagaagaaggcggagaggccacattccagtgcgtagttagcccctctgatgttgctgtcgtttggtttagggacggagcactgctgcagccttccgaaaagttcgcaatttctcagtcaggtgccagtcattctctgacgatttcagacctggtgctcgaggatgctgggcaaattaccgttgaggctgaaggtgccagctctagcgctgccctgcgcgtacgggaggcaccagtgctgtttaagaagaaacttgagccccagacagtggaggaaaggtcatccgtgacattggaggtggagctcacacggccttggccagaactgcgctggacccggaatgcaacagccttggcgcctggcaaaaatgtcgaaattcatgccgaaggagcccgtcacaggttggttctgcacaacgtcggattcgcagacaggggattctttggatgcgaaactccggatgacaaaacccaggccaaactgacagtggagatgcggcaggtgaggcttgtgagaggacttcaggccgtggaagcaagggagcaggggacagccacaatggaagttcaactgtcccatgccgacgttgatggatcctggacaagagatgggctgaggttccaacaaggccctacctgccacctggcagtgagggggcctatgcatactctgacactatcaggtttgaggcctgaagatagtggtctgatggtgtttaaagccgaaggggttcacacgagcgccagactcgtagtgacagaactcccagtgagtttctcgaggcccctgcaagatgtggtaacaacagagaaggaaaaggtcaccctcgagtgtgaattatcccggccaaatgtcgacgtcagatggctcaaggatggagtcgagctccgagccggaaagactatggccatcgccgctcagggtgcctgtaggtcccttactatctaccggtgcgagttcgcagaccaaggggtgtatgtgtgtgacgctcacgacgcccaaagttcagcatctgtgaaggttcagggcagaacctacaccctgatataccggagagtgttggccgaagatgctggcgagatacagttcgtggcagaaaatgctgagtctcgcgcacagctcagggtcaaggagctccccgtgactctcgtccgtcctcttcgagataaaatcgcaatggaaaagcacaggggcgtgctagaatgtcaggtttctcgtgcgagcgcccaagtgcgctggtttaagggcagccaagagctccagcctggcccaaaatatgaactggtgtccgatggcctgtaccgtaagctgattatctccgatgtgcatgcagaggatgaagacacatacacctgtgacgctggggacgtcaagacgtcagcccagttttttgtcgaagagcagagtattactatagtcagaggcctgcaggatgtcaccgtcatggagcccgctcctgcctggttcgaatgtgagacgtcaatcccttctgtgcggccaccgaagtggctgctgggaaagacagtgctgcaagcagggggaaacgtaggccttgagcaggagggcactgtccaccggctcatgctccgtagaacctgctcgaccatgacaggcccagtccactttactgtggggaaatctcgctcctctgccaggctggtggtgagcgatattcccgtagtgcttacccgtcctctggagcctaagaccggccgtgaactgcagtctgtggtgctgagttgcgatttcaggccagcaccaaaggctgtgcagtggtacaaggacgacacaccactctctccctccgaaaagttcaagatgtctcttgagggacagatggccgagctgcggattttgaggctgatgcccgctgacgccggagtgtaccgatgccaggctgggtctgcccactcatccaccgaagttacagtcgaggccagggaggtgactgttactggacctttgcaggacgccgaggccacagaagagggttgggcatcctttagctgcgagctctcccatgaggatgaggaagtggaatggagtctgaacggcatgcccctctataacgatagcttccacgaaatatcccataaggggaggcgtcatactctcgtgctgaaatcaattcagcgcgctgacgcgggtattgtgcgggcaagcagcttgaaagtttccaccagcgcacgtctcgaggtcagagtgaaaccagtggtttttcttaaagctctggacgatctgtccgccgaggaacgcggaacattggctctccagtgcgaggtctcagatccagaggcccacgtggtctggcgcaaagacggtgtgcagctcggaccctcagacaagtatgacttcctccatactgcaggtacaaggggactggtggtacacgacgtcagtcctgaggacgcgggactctacacatgccacgtcggcagcgaggaaacccgagccagagtccgagttcacgacctgcatgtcggaatcaccaagaggctgaagactatggaggtcctggagggagagtcctgttctttcgagtgcgtcctgtcacacgaaagcgctagtgatccggctatgtggaccgtgggtggcaaaactgtaggctccagcagccgcttccaagctactcggcaaggacgtaaatacattttagtggtgagggaagccgctccatctgatgccggagaggtggtcttctctgtcaggggcttaacctccaaggcaagtttaatagtgagggaacggccagctgctatcattaagcctctggaggatcagtgggtggccccaggggaggatgtggaactgagatgtgaactttccagagcaggtactcctgtgcattggctgaaagatcgcaaggcaatcagaaagtctcagaagtacgacgtcgtgtgtgaggggacaatggctatgttagtaattcgcggtgcctctctgaaagatgccggagagtacacttgtgaggtggaggctagcaagtctaccgcttccctgcacgtggaggaaaaggcaaactgctttactgaggagctgacaaatctgcaggtcgaagaaaaagggacagccgtattcacctgcaagaccgaacacccggctgccactgtgacatggaggaaaggcctcctcgaacttcgagcaagtggaaaacaccagccaagtcaggagggtctcacactgcgtcttaccatctccgcactcgaaaaggccgacagcgacacttatacctgtgatattggccaggcacagtcacgggcacagttgctggtgcagggcagaagagtgcatataattgaggatctggaggatgtcgacgtccaggaggggagctcggcaacgtttcgatgtagaatctctccagcaaattacgagcccgtccattggtttctcgataagacccctttacatgcaaatgagttaaatgaaattgacgcccagcccggtgggtatcatgtgctgacacttagacaacttgcactgaaggatagtggcaccatttacttcgaagcgggagatcagagagccagtgctgccctgagagtgaccgagaagcctagtgttttttctcgggaactcaccgatgcaaccatcaccgagggcgaagatctaaccctggtgtgtgagacctcaacttgtgatataccggtttgctggaccaaagatggtaagaccctgcgtgggtcagctagatgccagttgagtcacgaaggtcatcgggctcagctgttaattacaggagcaacgcttcaagactccggtcggtacaaatgcgaggcagggggagcctgctctagctcaatcgtgcgcgtgcatgcacgcccagtccgcttccaggaggctctgaaagacctggaggtgctagaaggtggggcagccactctgcggtgcgtgctttcctccgtggccgctcccgtgaaatggtgctatgggaacaacgtgctgcgccctggcgataagtactctctgcgacaggaaggggcaatgctggagttggtggtgaggaacctgcggccacaggacagtggcaggtacagctgctcgttcggcgaccagactacttcggctacactgacagttaccgctctgccagcgcaatttatcggcaagctgcggaataaggaagctactgaaggtgccacagctacactccgctgcgaactctctaaggcagcacctgtggaatggaggaaaggaagcgagaccctgcgtgacggagatcggtactgcctaaggcaggacggtgccatgtgtgaactgcaaattcgcggacttgccatggtggacgccgcagagtattcttgtgtgtgcggcgaggagaggacatccgcctctctgacgatccggccaatgccagcccacttcatagggagactgcgccaccaagagtcaatcgaaggggcaaccgctacactacgatgcgaactgtccaaggccgctcccgtggaatggagaaagggaagggaatccctgcgcgatggcgatcgacacagcctccgccaggacggagcagtgtgcgagttacagatctgtggccttgctgtggctgacgccggtgagtatagctgtgtttgtggtgaagaaagaacctctgctacactcaccgtgaaggccctcccagctaagttcacagagggactgagaaacgaggaagctgtcgagggtgctaccgccatgctatggtgtgagctgtcaaaggttgcgcctgtggagtggaggaagggccctgagaatttgagagacggtgaccggtacatactaaggcaagagggaacccggtgtgaactacagatttgcgggctggcaatggccgacgccggagagtatctgtgcgtctgcggccaggaacgcacttctgctacactgactattagggcactccctgccaggttcatcgaagatgttaaaaaccaggaggcccgagagggtgctaccgccgttttgcagtgcgagttgaattccgccgctcctgtggagtggaggaagggaagcgagactctccgcgacggtgaccgctactcgttgcggcaggacggcaccaagtgtgagttgcagatacgaggactcgcgatggctgacacaggagaatactcttgcgtctgtggccaagagaggaccagcgccatgctgaccgtgagagcccttccaataaaatttaccgaggggctccggaacgaggaggcaaccgagggggcaacggcagttctgagatgcgaactcagcaagatggcaccggttgaatggtggaaggggcacgagacactgagggacggggatcggcactcactacgccaggatggggcaaggtgcgagcttcaaattaggggtctcgttgccgaggatgcgggagaatatttgtgcatgtgcggcaaggagcgaaccagcgctatgctcacagttcgagccatgccatccaagtttatcgagggcttgagaaatgaggaagccaccgagggcgacaccgccactctgtggtgtgaactgtctaaggccgcacctgtggagtggaggaaaggacacgagaccctacgggatggcgatcggcactcactgagacaagatggctcacgatgtgagctgcagatacgcggattagcagtagtggatgctggggagtactcttgcgtgtgcggccaggagcgcacctccgcgactctgacagtgagggcactgccagctcgattcattgaagacgtcaagaatcaggaggcgcgtgaaggcgctacagctgtcctgcagtgtgaactgtcaaaggccgctcctgtagaatggaggaagggcagcgaaacgctgaggggtggagatcgatattccctgcggcaggatgggacccgctgcgagcttcagatacatggcctgagcgtcgccgacactggagagtacagctgcgtctgtgggcaggagcggacatccgctacactgacagtgcgtgcgctacccgctcgacatagtagatccgaggaccaaggaggcctcagacggggacattcctacactgccgtgta

SEQ ID NO: 28566 - DNA, 1449 bp, synthetic construct
  source 1..1449: mol_type = other DNA; note = Synthetic coding sequence
atggtgatggagaagcctagccccctgttagtgggcagagaattcgtcaggcaatactacaccctgttaaataaagcacctgaataccttcatcgattctacggcagaaatagcagttacgtgcacggaggagtcgacgcctcaggaaaaccacaggaggcggtatacggccagaatgatatccaccacaaagtactgagtctgaactttagcgagtgccacacaaaaatccgccatgtggacgcacacgctactctgagtgatggtgttgtggtgcaagtgatgggactgttgtctaactcagggcagcccgaacgtaagtttatgcagaccttcgtactcgcccctgaaggctcagtacctaacaaattttatgttcacaatgacatgttccggtacgaggacgaggtgtttggggacagtgagccagaactcgatgaggaatcagaggacgaagtggaggaggagcaggaagagagacaaccgtcacccgagcccgtgcaggagaacgctaactctgggtactacgaagcccaccctgtgacaaacggaatcgaagaacctctggaagagtccagccatgagcccgagccagagccagagtccgaaacgaagaccgaggaactgaaaccacaggttgaagagaaaaacttggaagagctcgaggagaagtccacaacaccccctcctgccgagccagtgtctctgccgcaggaaccacccaaggcatttagctgggccagcgtcacatctaagaatctacccccaagcggtacagtgtcatctagcggtatcccacctcacgttaaagccccagtgagccagcccagggtcgaggccaagccggaagtccaaagtcagccaccacgcgtccgcgagcagcggcctagagagcgtcctggcttccccccaagggggcctcgacccggacgaggcgacatggagcagaacgattccgacaataggcgcattatccgttacccagactcacatcaactcttcgtcgggaaccttccccacgatattgatgagaatgagttgaaagagttcttcatgagcttcgggaatgttgtggaactgcgcattaacaccaagggggtgggcggtaaattgcctaattttggatttgtggtgttcgacgactctgaacccgtgcagagaatccttattgcgaagccaattatgttccgcggagaggtgcggttaaacgtggaagaaaagaaaacacgggcagctcgggagcgcgaaactcgtggagggggtgacgatcgacgcgacatccgcaggaatgacaggggccctggagggccaaggggtatcgttgggggaggcatgatgagggaccgcgatggccgaggcccacctccccgtggaggcatggcacagaagttgggctcagggcgagggaccgggcagatggagggcagatttaccggccagcgaagatag

SEQ ID NO: 28567 - DNA, 807 bp, synthetic construct
  source 1..807: mol_type = other DNA; note = Synthetic coding sequence
atgtccggcaggaagaggagctttacattcggggcatatggaggagtcgacaagtcgttcacctcaagacgatccgtctggcggtccgacggccaaaaccagcattttccccaagctctcgacctgagccgggtgaatctggtgccctcttatacaccttcactgtacccaaaaaatacggacctttttgaaatgattgagaagatgcaagggtcccggatggatgagcagagatgctcattccctccaccactgaaaactgaagaggactatataccctatccatcggtccatgaggtgctgggtcgtgagggacctttcccactcattctgctgccacagttcggcggatattggatcgaaggtaccaatcatgaaattacgagcattcccgaaacagaaccactgcagtcccccacgactaaggtgaaattggaatgcaaccctaccgcccgtatatacagaaagcacttcttggggaaggagcatttcaactattactccttggatgcagccctgggacacctggttttcagcctgaagtatgatgtgattggcgatcaagagcatctgaggcttctcctaaggaccaaatgcaggacatatcatgacgtgatcccaatatcttgtttgacagaattcccaaatgtggtgcagatggccaaacttgtatgcgaggacgtgaatgtggaccggttctaccccgttctctatcctaaggcatcacgcttaatcgtgacttttgacgaacacgtgatatccaacaacttcaagttcggtgtgatttaccaaaaactaggccagtag

SEQ ID NO: 28568 - DNA, 606 bp, synthetic construct
  source 1..606: mol_type = other DNA; note = Synthetic coding sequence
atgtacaccctcttaagtggactatacaaatatatgtttcagaaagatgagtactgcattctgatcctgggcctggacaacgccggaaagaccacgttcttggaacagtccaaaacccgatttaataagaactataagggcatgagtctatcaaagataacgacgaccgtgggcctcaacattgggacagtggacgtgggtaaggctcgtctaatgttttgggacctcgggggacaggaagagctgcaatctctctgggataagtactacgccgagtgtcacggtgtgatatatgtgattgattcgactgacgaagagcggctcgccgagagcaagcaggctttcgaaaaggtcgtaacatccgaggccttatgcggagtgccagtcctggtgctcgctaataagcaggatgtggagacatgtctctccattcccgatattaagaccgcttttagtgactgcacatctaagattggcagacgagactgtttgacccaggcctgcagtgccctgaccggaaagggggtccgtgaggggatagagtggatggtgaagtgcgtggtgcgcaacgttcatagaccccctaggcaaagggacatcacgtag

SEQ ID NO: 28569 - DNA, 1707 bp, synthetic construct
  source 1..1707: mol_type = other DNA; note = Synthetic coding sequence
atgggtctgctcaccttccgcgacgtagccatcgagttctccttggaggaatggcagtgtcttgatacagcccagcgaaacctgtacaaaaatgttatcttggaaaactacagaaacttggtcttcttgggcatcgccgtcagtaagcaggacctcattacctgcctggagcaggagaaagaacccctgacagtaaagcggcacgagatggtcaacgaaccgcctgtcatgtgcagtcattttgcacaagagttttggcccgagcagaacatcaaagacagcttcgagaaagttacgttgcgcaggtacgagaaatgcggcaatgataacttccaacttaaggggtgcaagtctgtcgacgagtgcaagctccacaaaggaggatataatggcctgaaccaatgcttgcctaccatgcagtcgaaaatgtttcagtgcgacaaatacgtaaaagtttttaataagtttagccacagcgaccgccacaaaataaagcacatggagaataaaccctttaagtgcaaagaatgcggcaggtccttctgcatgctgtctcatttaaccagacacgaaaggaactatacaaaggttaatttctgtaaatgtgaggagtgcgaaaaggccgtgaatcagagttcaaaactgacaaagcacaagcggatatatacttgtgagaaactttacaagtgccaagagtgcgatcgtacatttaaccagttctccaatttaacggagtacaaaaaagattacgcacgggagaagccctacaagtgcgaagagtgcgggaaagcgttcaaccaatcatctcatctcactacacataaaatcatccacacgggagagaagccttacaaatgtgaagagtgcggcaaggccttcaatcaattcagcaacttgaccactcataagaagatccacactggagagcaaccctatatttgcgaggaatgtggaaaggcatttactcagtcatctacattgactacccacaaacggatccacaccggcgaaaaaccatacaaatgcgaggagtgtggtaaagctttcaatcggtcatctaaactcacagagcacaagaacatccacactggcgagcaaccttataagtgtgaagagtgtggaaaggctttcaaccgaagctctaacctgacggagcatcgcaaaatccacacagaggagaagccttataagtgtaaggaatgtggcaaagcctttaaacacagctctgccttgaccacacacaaaaggatccatacaggcgagaaaccctacaagtgtgaggagtgtggcaaagcctttaatcgtagttccaagctgactgagcacaagaaactccacacggggaagaaaccttataaatgtgaggagtgcggaaaggcgttcatccaatcttctaagctgacagagcataaaaagattcactcgggagagatcccctataagtgcgaggagtgcggtaaagccttcaaacactcctccagtctgaccactcacaagcggattcacacaggggagaagccttataagtgcgaggagtgcggcaaggctttcagccggagcagtaagctcaccgagcataagatcatacacacaggcgagaaaccgtacaagtgtgagcgatgcgacaaggcctttaatcagagtgccaatttaactaaacacaaaaaaattcacactggcgagaagcttcagaattggaatgtctag

SEQ ID NO: 28570 - DNA, 1383 bp, synthetic construct
  source 1..1383: mol_type = other DNA; note = Synthetic coding sequence
atggactccgaactcatgcatagcatcgttggctcttaccataagcctccggagcgcgtgtttgtgccttccttcactcagaatgagcctagccagaattgccaccccgcaaaccttgaagtgacaagtccgaagatactccattctccaaatagccaggctctcatactggcactgaagacccttcaggagaaaatccatcgattggaactcgaacgtacacaagctgaggacaacctgaatattctgtctcgggaggctgcacaatataaaaaagccctggagaacgagactaacgagcgaaatctcgcccaccaggagctcatcaaacagaaaaaggacatatctatccagctgtcgtccgcacaaagtcggtgtactcttctggagaagcaactcgaatatacaaaaagaatggtgctgaacgtggagagggagaagaacatgattttagagcagcaggcacagttgcagcgtgagaaggagcaggatcagatgaagctgtatgccaagctcgagaaactggatgttctggagaaggagtgctttcgcctgaccactactcagaagactgctgaggacaaaatcaagcatctggaggagaaactcaaggaggaggaacaccagcggaagctgtttcaggataaggcctctgaactgcagaccggcttggagatttcaaaaatcataatgtcttccgtgtcgaatctcaagcactccaaggaaaagaagaaaagctccaaaaagactaagtgcataaaacgtcgaccaccgtggcagatctgctcaaagtttggggcacttccctttgtggcagagaaaatgagacagcaccgggatccacatatactgcagaaaccttttaatgtgacggagacccgatgtctgccgaagccttcacgtacaacatcttggtgtaaggcgataccgcctgactctgagaagtcaataagtatctgtgataacctgagtgaactactcatggcaatgcaggacgagctggaccagatgagtatggagcatcaggagttgctcaaacagatgaaggagacagagtcacacagcgtatgtgatgacatcgagtgtgaattagaatgcctcctgaagaaaatggagattaaaggcgagcagataagcaagctgaagaagcaccaagactccgtatgtaaacttcagcaaaaagtgcagaactcgaagatgtccgaagcctcaggaattcagcaggaggactcatatcctaagggatccaagaatatcaaaaacagtcccaggaaatgtcttaccgacactaatctcttccagaaaaattcgagctttcatcccatcagggtacataatttacagatgaaactgagaagagatgatataatgtgggagcagtag

SEQ ID NO: 28571 - DNA, 1833 bp, synthetic construct
  source 1..1833: mol_type = other DNA; note = Synthetic coding sequence
atgtctcaaacatcactcaaacaaaaaaaaaatgagcccggtatgaggagttcaaaggagtccctagaagctgaaaaaagaaaggaatcagacaaaaccggggttcggctgagcaatcagatgcggcgagctgtgaatccgaatcactccttgcggtgctgccccttccaaggtcacagtagttgtaggcgctgcctgtgtgcagcagagggcacagcactggggccttgtcacaccatccgcatctacatccatatgtgcttgctttgggaacaggggcagcagatcactatgatgaggggttctcaggagtcctccctccgcaagacggactctaggggctacctcgtgcgctcccagtggtcccgcatctccaggtcgccttcaacaaaagcgccttcgatagacgagcctcgcagtcgcaacacgagcgccaaacttccctcatcaagcacttcatccaggaccccctctacctccccatccctccacgattcctcgccgcctcctcttagtggacagcccagtctgcagccccctgctagtcctcagcttcccagaagcctggacagccgccctccgactcccccagagcctgatcccggaagtcgccgaagtacgaaaatgcaggagaatcccgaggcctgggctcagggaattgtccgggaaatacgtcagactcgagattcacagccccttgaatacagtcgcaccagcccaacagagtggaaaagctcttcacagagacggggtatctatccggcttccacacagctcgaccgcaactcgttgagcgagcagcagcaacagcagcgggaagatgaagatgattatgaagctgcgtattgggcctccatgcgcagtttctacgaaaagaatccttcctgcagcagaccttggcccccaaaaccaaagaatgccattactatcgcactttctagctgcgccctgtttaacatggttgatggcaggaagatctatgaacaagaaggattggaaaagtacatggagtatcagttgacaaacgaaaatgtaatcctgacaccaggccctgcctttcgttttgttaaagcgcttcagtacgtgaacgctaggctgcgagatctttaccctgacgagcaggacctgtttgacatagtgctcatgactaataatcatgcgcaggtgggggttcggttgatcaattccgtgaatcattacgggttactcatagataggttctgtctgactggaggcaaagaccccataggctatctcaaggcttatttgaccaatctgtacattgcggctgactctgaaaaagtccaagaagccattcaggaagggattgcctctgccaccatgttcgacggcgcaaaggacatggcctactgcgatactcaactgcgcgtggcctttgacggcgatgcagtgctcttttcagacgagtctgaacacttcacaaaggaacacggacttgataaattttttcagtatgatacactgtgtgagagtaagccccttgcacagggacccttgaaggggtttctggaagacctgggtagactccaaaagaagttctatgcgaagaatgaaagactgctctgccctattcggacttatttagtgactgctagaagcgcggcatcttctggggcaagagtgctcaagactcttcgcagatggggcctcgaaattgacgaggcactctttttggcaggcgctcctaaatcccccatcctggtaaagatccgacctcacatcttcttcgacgatcacatgttccacattgagggcgcacaaaggcttggttcaattgccgcatatggatttaacaagaagttttcctcatag

SEQ ID NO: 28572 - DNA, 456 bp, synthetic construct
  source 1..456: mol_type = other DNA; note = Synthetic coding sequence
atgtctaaaaacaccgtgtcttccgccaggttcagaaaagtcgatgttgacgagtacgatgagaataaattcgttgacgaggaggacggcggagatggccaagccggtccagatgagggcgaggtggactcctgtctccggcaggggaatatgacggcagccctgcaggcagcactgaagaaccctcctatcaatacaaagagccaggctgtgaaagatagggcgggtagcatcgtactcaaagtgctgatcagctttaaggctaatgatatcgagaaagccgtgcaatcattggataaaaatggggtggacctgttaatgaagtacatttataaaggattcgaaagcccatcggataatagttccgcaatgctcctgcagtggcacgagaaggccctcgctgccggtggcgtaggatctatcgtgagagtgttgaccgcaagaaagacagtctag

SEQ ID NO: 28573 - DNA, 3522 bp, synthetic construct
  source 1..3522: mol_type = other DNA; note = Synthetic coding sequence
atggtcacagtcggtacaaacatactcccttcaaggcctgcggctagcgccaacacagctcgagaggatgcagcactgttctccagaagaatcccccctcgccacaagaacggcgcagcccagcccggtgctgcgcctggcccaggcgcaccgggtgccaatatgggaaatgctcattccaaaagtggcgatcggcattccgctctacccggtagaccggaactcagcttctacggatccttcccaaggaaatggagtgaaaacgtattcttggacaacgagctcctgacctccaaaatcctatccgtcctgagaccacaaagtgagagaggcttccgtgcgggtgatctgcgatatcccactcactttctcagtaccaactctgtgctcgccagcgtgactgcatccctgaaggaacatccccgtggcacattgctgtccgacggaagcccagcactctcacgcaacgtcggaatgacagtcagccagaaaggcggaccacagcctacaccgagcccggctgggcctggaacccagctgggaccaattacaggtgaaatggacgaagctgattcagcctttttgaaatttaagcagacagctgatgactcgctgtccttaacgagcccaaatactgagagcatctttgtagaggacccgtacaccgcctctctgagaagcgagatcgagtctgatggtcacgagtttgaggctgaatcatggtcgctcgcggtagacgccgcttatgccaagaagcagaaacgggaagtcgtcaagcggcaggacgtgctgtacgaactgatgcagaccgaagttcatcatgtgcggacactcaaaataatgttgaaagtgtacagtcgggcacttcaggaagagctgcagttctcttctaaagccatcgggagattgttcccttgtgctgatgatctgcttgagacccatagccattttctggcacgcctgaaggagagacgtcaagaaagcctggaggagggatcagacaggaactacgttattcagaaaattggcgatctgctcgtgcagcaattctccggcgagaacggggaacggatgaaggagaagtacggggtcttctgcagcggacacaacgaggcagtctcccactacaagctgctgttacagcaaaataaaaagttccagaacctgataaagaagataggcaactttagcattgtgaggagactgggggtacaagaatgtatactgctggtcactcagcgaatcactaagtatcccgtgctcgtggagcgaattatccagaatactgaggcaggaacggaggattacgaggacctgactcaggctctcaatctgatcaaagatatcatttcccaggtcgatgctaaggtcagcgagtgtgaaaaggggcagcggctgagggaaattgcgggaaaaatggatttgaagagtagttccaaacttaaaaatggactgacgttccgaaaagaggatatgctccagagacagctgcacctggaaggcatgctctgctggaaaaccactagtgggagactgaaagacatcctggcaatcttgctgacggatgtgctgctcctactgcaagaaaaagatcagaaatacgtgtttgccagtgtcgactctaagcccccagtcatctctctccagaagctcatcgttagagaggtggcaaacgaggaaaaagcaatgttccttatttccgcatcactccagggacccgagatgtatgaaatctacacatcatccaaggaggatcggaacgcctggatggcgcacatccagcgagcggtagagtcctgccctgacgaggaggaggggccattttcccttcccgaggaagagcgcaaggtagttgaggccagggcgactagactgcgcgacttccaggagaggctgtccatgaaggaccagctaattgcacaatccctcttggaaaaacagcagatctatcttgaaatggcagaaatggggggtctggaagacctcccacagcctcggggtttattcagaggtggagaccctagtgagactcttcagggagagcttattctcaaatctgccatgtctgagattgaggggattcagagcctgatttgcagacaactcgggtcagcaaacggtcaggcagaggatggcggttcctcaactggaccgccaaggcgcgctgagacatttgcgggatacgactgcacaaattctcctactaaaaatgggagctttaagaagaaagtcagctcgacagatcccagaccacgggactggagaggaccccctaacagccccgatctcaagctcagcgactccgacattcctggatctagcgaggaaagtccacaggtggtggaagctccagggacagaatccgatcccaggcttcctactgttttagaatcagaactggtgcagcggattcagactctgtcccaactgctgcttaatctgcaggcagtgatcgctcaccaggactcgtacgtcgagacccagcgggcagccatccaggaacgcgagaaacagtttcggctccagagcacgcgcggaaatctgctgttggagcaggagcgccagagaaacttcgagaagcaacgagaggagagggccgcactggaaaaactgcagtctcagctccgtcacgagcagcagcgctgggagcgcgaacgtcaatggcagcaccaggagctggagagagcgggagcacgcctgcaggaaagggagggtgaagccaggcagctccgcgagagattggagcaggaacgggctgagttggagagacaacgccaggcttaccagcatgacctggagcgcctcagagaggctcaacgggctgttgagagagaacgtgagagactggagctcctgcggaggcttaaaaagcagaacaccgccccaggagcgttaccacctgacaccttagctgaggcacagcctccatcccacccgcctagttttaatggggaggggttggagggacccagggtgtctatgcttcctagcggagtggggccagaatacgccgagaggccagaagtcgctagaagagacagtgcccctacggagaacaggctagccaaatccgatgtgcccatccagctgttatccgcaacgaatcaattccagcgccaggctgccgtccagcagcagatacccaccaagcttgccgcatctacaaaagggggaaaggataagggtggtaaatcccgtggttcgcaacggtgggaatcgtccgcgtcattcgacctgaagcagcagctgctcctgaataaactgatggggaaggacgagtctacctcgaggaacaggcgctctctaagtccaatcttaccaggacgacattctcccgctccgccacctgaccctggatttcctgctccaagtcctccccctgccgattcaccgtccgagggattcagtttgaaggcgggtggcacagcattgctacccggtccacctgccccatcaccactgccagccaccccgctgtccgcgaaagaagatgcgagtaaagaagacgttatcttcttctag

SEQ ID NO: 28574 - DNA, 1674 bp, synthetic construct
  source 1..1674: mol_type = other DNA; note = Synthetic coding sequence
atggacagtaccgtaccttctgctctagaactaccccagcggctagctctgaacccgagggagagccccaggtcacctgaagaggaggagccccacctgctctcgtcactagccgcagtgcagactcttgcttccgtgataagaccttgctatgggccacatggccgacagaaattcctcgtgaccatgaagggcgaaacggtgtgcaccggctgcgctactgcaattctaagagccctggagttggagcacccggctgcttggttgttaagagaagccggtcagacccaggctgagaactccggtgatggaaccgcttttgttgtcctgctgaccgaggctctgctggagcaggctgagcagcttctgaaagctgggctgccacggcctcagttgagagaggcatacgccaccgctactgccgaagtattggctacgttgcccagccttgctatacagtctttgggacctctggaagatccttcttgggccctccactctgttatgaacacccatactctgagccccatggaccacttgacaaaactcgttgcgcacgcatgttgggccatcaaagaactcgacggctccttcaaaccagagcgagtcggcgtttgtgcattgcctggcggaacactcgaggatagctgtctgctgccagggctggccatcagtggaaagctttgcggacagatggcaaccgtgctctccggcgctagggttgctctattcgcatgcccattcggccctgcccaccccaatgccccagccaccgctcggctatcgtcacctgccgatcttgcacagttttctaaaggaagcgaccagttacttgagaaacaagtcggtcagttagccgcagccggaattaatgtcgccgttgttctcggggaggtggacgaggagactctcactttagccgacaaatatggaattgtggtgattcaggcaagaagttggatggagataatttacctatccgaagtcctcgacactccacttctcccacggttgctgccaccccaaagacccggaaagtgccaacgcgtttatagacaggagcttggagacgggctcgccgtagtctttgagtgggagtgcaccggcaccccagccctcaccgtggttctgcgaggcgcaacaactcaaggcctccgcagtgctgagcaagcggtgtaccacggaatcgatgcttatttccaactttgtcaggatcctcgactgattccgggtgctggagccactgagatggcactggccaaaatgctgtccgataagggttctcgcctcgagggtcccagtggtcccgctttccttgcttttgcatgggccctgaaatacctgccgaagacccttgcagagaatgccggacttgctgtctctgacgtaatggccgagatgtctggcgttcaccagggcggaaacctcctgatgggggtcgggaccgaggggattattaacgtggcccaggaaggtgtgtgggacacgttaatcgttaaggcgcagggttttagggctgtggccgaggtcgtgcttcagttggtcacagtcgatgaaatcgtggtggccaagaaatcaccgacccaccaggagatttggaatcctgactctaagaagactaagaaacacccaccccctgtggagactaagaagatcctgggcctcaataattag

SEQ ID NO: 28575 - DNA, 939 bp, synthetic construct
  source 1..939: mol_type = other DNA; note = Synthetic coding sequence
atgactaggtccctatttaaaggaaacttctggtcggccgacattctgtccaccattgggtatgacaatatcatacagcatctgaacaatgggagaaagaactgcaaggagtttgaagacttcctcaaggaaagagcagctatcgaagagagatatggcaaggatctgcttaatttatcgcgcaagaagccatgcggccagtctgaaatcaacactctgaagagggcactggaggtttttaaacaacaggtagataacgttgcccagtgtcatatacagctggcccaatctcttagggaggaagccagaaaaatggaggaattcagagagaaacagaaacttcagagaaagaaaacagagttgataatggacgcaattcacaaacagaaatcattacagtttaaaaagacaatggatgctaaaaagaattacgagcaaaaatgccgggataaagatgaggcagagcaagcagtgagccgtagcgccaatctcgtcaaccctaagcagcaggagaagctgtttgtcaaactggcaaccagcaaaacagccgtggaagactcagataaagcctatatgctccatataggtacccttgataaggtgcgcgaggaatggcagtcagagcacattaaggcctgtgaggccttcgaggcacaggaatgcgagcgtattaatttttttcgaaacgccctctggctgcacgtgaaccagttaagtcagcagtgcgtcacctcagatgaacatccctcatgcatgcgcatctccacaccaccacgtcggatgcagtcacaacaggaacgcctccagggactaacatggcagggggaggaccccagtcaatttctcaaggcacatcaaatgattcccattaccttatggttgatgaccactgtgtgttccatctccaagatcaacgaaactcgagcattctcaggctag

SEQ ID NO: 28576 - DNA, 3693 bp, synthetic construct
  source 1..3693: mol_type = other DNA; note = Synthetic coding sequence
atgcctaggaaaggcacgcaacccagcaccgccagacggcgtgaggagggtccccctcctcccagcccagacggcgcaagctccgatgcagagcccgagcctccgagcggtagaacagagtcccccgcaaccgctgccgaaactgcaagcgaggaacttgacaataggagcctcgaggagattctgaattcaattccccctccccctccgcctgccatgacaaacgaagccggagcacccagactcatgattacacacattgtgaatcagaattttaagagctacgctggtgaaaaaattctcggacctttccataagcggttttcctgcatcattggtcccaatggcagtggcaagagcaacgtgatcgatagcatgctgttcgtttttgggtatagggcacagaaaattagaagtaaaaaactgtccgtcctgatccacaacagcgacgaacataaggatattcaatcctgcacagtggaggtgcattttcagaagattatcgacaaagagggggacgactatgaggttatccccaactcgaacttctacgtctctaggactgcttgcagagataatacatctgtttatcacatatcaggaaagaagaagaccttcaaggatgttgggaatctgctgcggagccatgggattgatttggatcataatcggtttctgatattgcagggggaagtggagcaaattgcaatgatgaagcctaaaggacaaacagagcacgatgaaggcatgctggaatatttagaggatatcatcgggtgcggacggctgaatgaacccatcaaagtcttgtgtaggagagtggagatcctcaacgagcatcgaggagaaaagctgaaccgcgttaagatggtggagaaagaaaaagacgctctggagggagaaaaaaacatagccatagaatttcttaccctggagaatgaaattttccggaaaaagaatcacgtgtgccagtattacatttatgaattgcagaaaaggatagctgaaatggaaacccagaaggagaagatacacgaggacacaaaagagatcaacgagaaatccaacatattatcaaacgaaatgaaggctaagaacaaggacgttaaggacaccgagaaaaagttgaacaaaatcactaagttcatagaagaaaacaaggaaaaattcacacagctagatttagaggatgtacaggttcgcgaaaagctgaaacatgccacctctaaggccaaaaaacttgagaagcagctgcaaaaagacaaggaaaaagtggaggaatttaagagcattccagctaaaagcaataacataatcaatgaaacaaccacaagaaataacgccctggagaaggaaaaagaaaaggaagaaaagaaactgaaagaagttatggattcactgaaacaggagacacagggtctgcaaaaagagaaagagtctcgcgaaaaggagctcatggggttctccaagtctgtgaacgaggctcgatctaaaatggacgtggcgcagtcggaattggatatctatctgtctaggcacaataccgctgtctcgcagctaacaaaggcaaaggaggcactgatcgccgcttccgagacattaaaggagagaaaggctgcgattagagatattgaaggcaagttgccccagaccgaacaggagctgaaggaaaaggagaaagagctgcagaagttgactcaggaagaaactaactttaaatctcttgtccatgacctatttcagaaagtggaagaggcaaagtcaagcctcgccatgaatcggagtaggggaaaagttcttgatgccatcattcaggagaaaaagtcaggcaggatccctggtatctacggcagactaggggatctcggggcaattgatgagaaatacgatgtggcaatttcgagttgttgccatgcgttagattatattgtggtggactctatagatatcgcccaggagtgcgttaatttcctgaaacgacagaacattggcgtggccactttcataggactcgacaagatggcggtgtgggccaaaaaaatgaccgaaatacagacgcctgagaacacacctcggctgtttgatctggttaaagtaaaggatgaaaaaatccgtcaagctttctactttgcgcttagagacaccctggttgctgacaatctggaccaggccacacgggtggcctatcagaaagacaggcggtggcgagtcgtgactctgcagggacagattattgagcaaagcggcaccatgacaggcggagggagcaaagtaatgaagggcagaatggggagctctctggtgattgagatcagcgaagaagaggttaacaagatggagagtcagcttcagaacgattccaagaaggctatgcagatccaagagcagaaagtgcaactggaagagagagttgttaaattacgccacagcgaacgcgagatgcgcaatactctagagaagtttaccgctagtatccaacggctgatcgaacaggaggagtacctgaacgtccaagtgaaagagctggaagctaatgtcctggctactgcacccgacaagaaaaaacagaagttacttgaagagaatgtgagtgccttcaagaccgagtacgacgcggtggcagagaaggcaggaaaagtggaagcggaggtgaagcgcctccataatacaattgtggaaataaataatcataaactgaaggctcagcaggacaagcttgacaagatcaacaaacagctggatgaatgcgcctctgcgattacaaaggcacaggtggcaattaaaaccgctgaccggaatctccaaaaagctcaggactctgtactccggacagaaaaggaaataaaagacacggagaaagaggtggatgacctgacagcagagttaaagagcctggaagataaggctgcggaagtcgtgaagaataccaatgccgcagagatcagcaaaattagtcttcatccaatcgaggacaaccccatcgaagagatctctgttctctcccctgaggacctggaggccatcaagaatcccgacagcatcacaaatcagatcgccctgttggaagcgaggtgtcacgaaatgaagccgaacctcggggctatagcagaatataaaaagaaggaagaactgtatctccaaagagtggccgaactggacaaaattacctacgaacgggactctttcaggcaggcgtacgaagatctgcgaaaacagagactgaacgagttcatggctggtttttacattataaccaacaagttaaaggaaaactaccagatgctgactctgggcggagacgctgaactagagctggtggacagtctggatccattcagcgaaggcattatgttctctgttaggcctcccaaaaagtcctggaaaaaaatctttaatctgagtggtggggagaaaacgttgagcagccttgcgcttgtgtttgcactccaccactacaaacctacccccctctactttatggacgagattgacgccgcactggacttcaagaatgtgagtatcgtggccttctacatttatgagcagaccaaaaacgcccagttcattatcattagtctcaggaacaacatgttcgagatatccgatagacttattggtatatacaagacatataacattacaaaatctgtagccgttaacccgaaggagatcgcctctaaagggctgtgttag

SEQ ID NO: 28577 - DNA, 2661 bp, synthetic construct
  source 1..2661: mol_type = other DNA; note = Synthetic coding sequence
atggaacttaggtgtggaggtctgctgttctcctcccgattcgactccggaaacttggcccatgtggagaaagtagagtctctttcatcagacggagagggcgtgggagggggtgccagcgcgctgacgagcggaatagctagtagtccagactatgagtttaacgtgtggaccagaccagactgcgcagaaactgaattcgaaaatggaaacaggtcttggttctactttagtgttcgaggaggaatgccaggcaagctgattaagatcaacatcatgaatatgaacaaacaaagcaagttgtactcccaaggcatggcaccctttgtaaggaccttgcccacccgtcctagatgggagcgcattcgcgatcgaccaacttttgagatgaccgagacccaatttgtcctcagcttcgtgcatagatttgtggaagggaggggggctaccacatttttcgcattctgttacccattctcgtactctgattgtcaggagctgctgaatcagctagatcaacgcttccctgagaatcacccgacacattcctcccccctcgacacaatttattaccaccgagagcttctgtgctattccctggacggtctgcgtgttgatttactcacaataacctcatgtcacggcttacgcgaggacagagaaccgaggctggagcagctgttcccagatacgtccacacctaggcccttcaggttcgccggtaagaggattttcttcttgtctagtcgcgtgcatcccggagagacgccctcctcttttgtgttcaatggcttcctggacttcatattacggccagacgaccccagggcacagacacttcgcagacttttcgtgttcaaactgatccctatgcttaatccagacggcgtggtgagaggccactacaggactgactcccgcggtgtaaacctgaacagacaatatctaaagccagacgccgtcctgcaccctgcaatatacggcgcaaaggcagtattgctctaccatcatgtgcacagccgactgaactctcagagctcctcagaacatcagccctcttcatgtttgcctcccgatgccccagtctctgatctggaaaaggccaacaacctccaaaacgaagcacagtgcggtcatagcgctgaccgccacaacgccgaagcatggaaacagacagagccagcggagcagaaactcaacagtgtgtggattatgccacaacagagcgccggtttagaagagagtgcaccagataccatacctcctaaggaatctggggttgcttattacgtcgacctccacggtcacgccagcaagaggggttgctttatgtatggcaactccttctcagatgaaagcacacaagtggagaacatgctttacccaaagctgatatcattgaactccgcccacttcgattttcagggctgtaatttttccgagaagaacatgtatgcgagggataggcgagatggacagtccaaggagggaagcggacgggtggccatatacaaggcctcaggcattattcactcttacacactggaatgcaactataacacgggcaggtcagtgaatagtatccccgctgcttgtcacgacaacggacgcgctagcccaccacctcctccagcatttccatccagatacactgtggagcttttcgagcaggttggcagggcaatggccatcgccgctcttgatatggccgaatgtaacccctggccaaggattgtgctcagcgaacactccagcctgactaacctgcgtgcttggatgctcaagcacgtgagaaactctcgtggactgtcttcaaccctgaacgtgggagttaacaaaaaaagagggcttagaacgcctccaaaaagtcacaacggactgcccgtatcgtgctcagaaaatacgctctcccgggcaaggagtttttcgacgggaacaagtgccggaggctcgtcaagctcacaacaaaactctccccagatgaaaaattcccccagttttccgttccacgggtctcggccagcagggctgcccggactgggttcatctactcagaaagtaacacaccgcgttctgggtcccgtcagagagccccgttcccaggataggcgccgacaacagcaaccccttaaccatcggcctgccggatcccttgctccttcacccgcaccgacttcctctgggccagcaagttctcataaactggggtcttgcctacttcctgactccttcaatatccccggttcttcctgttctctgttatcaagcggcgataaacccgaggccgtgatggtgatcggcaaggggcttttaggaaccggagcgagaatgccatgcatcaagaccagactgcaggcaagaccgaggttgggacgcggttcgcccccaacccgcagaggcatgaaggggtcctctggtcccaccagccccacaccaagaactagagaaagctcggaattagagctgggtagttgtagtgccacccccggactgcctcaagccaggcctccacgccctaggagcgcacctgcattttcgcccatctcctgtagtctctctgactctcctagctggaattgctattcgagggggcctcttggtcaacctgaagtatgctttgtgcccaaatctccacctctaactgtttctccaagagtgtag

SEQ ID NO: 28578 - DNA, 4221 bp, synthetic construct
  source 1..4221: mol_type = other DNA; note = Synthetic coding sequence
atgtggtctctcactgcctcagaaggcgagagcacgaccgcccatttcttccttggcgctggggacgaggggctaggtactcggggaattggcatgaggcctgaagaatcagattctgaactgctcgaagacgaggaggacgaggtccctccagagccgcagattatagtaggcatctgcgcgatgaccaaaaagagtaaaagtaagcctatgacccagatattagagcgtctctgcaggtttgactatctcactgttgtgatcctcggagaagacgtcatcttgaacgaacccgttgagaactggccgagttgccattgcctgatctccttccattccaagggattccctctggataaagccgttgcctatagcaaactgagaaacccgttcctcataaacgatcttgccatgcaatactatattcaggatcgaagggaggtctatagaatacttcaggaggaggggatagatttgccacggtatgccgtcctgaatcgggatcctgccagacctgaggagtgcaaccttattgagggagaggaccaggtggaggtgaacggagccgtcttcccgaagccgttcgtagaaaaaccagtgagcgccgaggatcataacgtctatatctactatccatcctcagccggaggtggcagccagcgtctgtttcgtaagatcggctccagatcctccgtttattcccccgaaagctctgtacgcaagacgggttcatacatatacgaggaattcatgcctaccgatggaaccgatgtgaaagtgtacacagtgggaccagattacgcgcacgcagaagcccgaaagtccccagcactcgatggcaaagtggaaagggactctgagggaaaagaaattcggtatcccgtgatgctgacagctatggagaagttggtggccaggaaagtctgtgtggccttcaaacagaccgtgtgcggcttcgacctcctcagagccaacggccacagttttgtgtgcgacgtcaatggcttctcttttgtgaagaactctatgaagtattatgacgattgcgctaagatactgggcaacacaatcatgcgcgagctggctccccagttccagatcccatggagcatcccgactgaggctgaggacataccaattgtgccgactacaagcggaacaatgatggaactaaggtgtgtaattgctattatcagacacggcgacaggacacccaagcagaaaatgaaaatggaggtgaagcaccctagatttttcgcgctctttgagaagcatggaggatacaaaacaggcaagttgaaactgaagcgtcccgaacaacttcaggaggtgttggacatcacgaggctcttgttggcggagcttgaaaaggaacctggcggtgaaatagaggagaagactggtaaactggagcagctaaagagcgtactagagatgtacgggcatttctccgggattaataggaaagtgcagctcacttactatccccatggcgtaaaggcttctaatgaaggtcaggatcctcaaagggaaacactggctcctagcctgttgcttgtcctgaagtggggaggcgagctgacaccagcagggcgagtccaggcagaagaactgggcagggcgttccggtgcatgtacccaggaggtcagggagactatgccggtttccctggttgcggacttctgagactgcatagtacctttcgccatgatctcaaaatctacgctagtgacgagggtagggtgcagatgactgcagcagctttcgcgaagggactactggccctggagggcgagctgacaccgatccttgtgcagatggtgaaatcggctaacatgaatgggctcctggacagcgacggcgattcactgagctcatgtcaacacagagttaaagcccgtctgcatcatatactgcagcaggacgccccttttgggcctgaggactacgaccagctggcccctaccaggtccacaagtctcctgaactctatgactatcatccagaaccctgtgaaggtctgcgatcaggtcttcgccctgattgaaaatcttacccaccaaatcagagaacggatgcaagatccgaggagcgtcgacctgcagctctaccacagtgagacactggaactgatgctgcagcggtggagtaaattagaaagggacttccggcagaaatccggtaggtacgacatatcaaaaattcccgacatctacgactgtgtgaagtacgatgttcagcacaatgggtcgctgggactccaaggaactgccgagctgcttaggttgagtaaggctcttgccgatgttgtgataccccaagaatacggaatctcccgagaagaaaagttggaaatcgcagtgggattctgtttgcctctcctgcgaaaaatcctgcttgatctccagagaacacacgaggacgagtcagttaacaagctccaccccctttactctcgtggagtcctttccccaggaaggcatgtgcggacaaggttgtacttcacaagcgaatcgcacgttcacagtctgcttagcgtttttcgatatggcggactgctggacgaaactcaggatgctcagtggcagagagcactggactacctgagcgccatttcagagctgaattatatgacccagatcgtgattatgctctatgaggacaacactcaagaccccttgtcagaagaacggttccacgtggagctgcatttcagccccggtgttaaaggtgttgaggaggagggctccgcgcctgcaggatgtggctttcgtcccgcatcaagcgaaaatgaagagatgaagactaaccaaggatctatggagaatctgtgcccgggtaaggctagtgatgagcctgacagagctctgcagactagccctcagcctcctgagggtccgggacttccaaggcgttctcccttgattcgcaataggaaggctggcagcatggaggttctaagtgagacatcctcatcaaggcccggagggtataggctcttctcaagctcccggcctcccacggaaatgaaacagagcgggctgggttttgagggatgtagtatggtgccaaccatttaccccttggagacactgcacaatgcattgtccctccgacaggtctctgaatttctctcaagagtgtgtcagagacacaccgacgcgcaagcccaagccagtgccgcattgttcgatagtatgcactctagccaggcgtcagataaccctttctcccctccgaggaccctgcactcgccaccactccagcttcagcagcgctctgagaagcccccttggctcgagacaagattctgccatgtagggcaggccggactggaattgttaacctcctcagatcttccggctagcgcaagtcagtcagctggaatcactggcgtctctcatcgcacacaacccgactcttccggcccttcgtctaccgtcagcagcgccggtccttcctccccgaccaccgtggacggaaacagccaattcggcttttccgatcagccttcccttaactctcatgtggcggaggagcaccagggactggggctcctccaggagactccaggctctggagctcaggaactttccatagaaggggaacaggagctattcgagcccaaccagtcgccacaggtacctcccatggaaactagccagccttatgaggaagtctctcagccctgccaagaggtgccagatatttcacagccctgccaggacatttccgaagccctgagccagccctgtcagaaagtgccggatatcagtcagcagtgccaggaaaatcacgataatggtaaccatacctgccaagaggtgccccacatttctcagccctgtcagaaatcatcccagttgtgccagaaagtcagcgaagaggtgtgtcagctgtgcctggagaacagcgaggaggtctcccagccttgtcagggcgtgagcgtggaggtcggcaagttagtccataaattccatgtcggtgtagggtcattggtgcaggaaacactggtcgaagtggggagcccagcagaggagatcccagaggaagtgatccagccataccaagaattctccgtggaagtgggaaggttagcccaggagacatccgcaattaacttgctgagtcaggggattccggagattgataagccttcccaagagttcccagaggagatcgacctgcaagcgcaagaagtgcccgaggaaatcaactag

SEQ ID NO: 28579 - DNA, 1308 bp, synthetic construct
  source 1..1308: mol_type = other DNA; note = Synthetic coding sequence
atgggggatctagagcttctgctgcctggagaagctgaagtgctagtgcgagggctgcgaagctttcccctgcgggagatgggctctgagggatggaatcagcagcatgagaatctggagaagctaaatatgcaagccattttggacgcaactgtttctcaaggagaacccatccaggaacttctcgtgacgcatgggaaagttccaactctggtggaggagctgatcgccgtcgagatgtggaagcaaaaagttttccccgtgttctgccgcgtagaagactttaaaccacagaatacatttcctatctacatggtagtgcatcacgaggcttcgattattaatttactggagaccgtattttttcacaaggaggtctgcgaatccgcagaggacactgtgctagatctcgtagattactgtcatcgaaagctgacgctcctcgtggctcagagcggttgtgggggtccacccgagggagaaggcagtcaggatagcaacccaatgcaggagctacagaaacaggctgaactaatggagttcgagattgcactcaaagcattgtcagtgttgcgctacattactgactgtgtggaccgccagtggtctgtgtcgcagcccccacaactcgctcatcttaaaagaatccagcggctgcaccccgtctgctggttcctgagtcctgggaaattgcagcagttcgaagggtctaggtggcacactgtcgcaccaagcgaacaacagaaactcagtaaattagacggccaggtctggattgcgctatataacctccttttgtctcccgaagcccaggcacgatattgcttgacttcatttgccaagggccgtctcctgaaattgagggcgttcctgacagatacactgctcgatcagctgcctaatctcgcccatttgcagtccttcctggcccaccttacacttactgagacgcagccacccaaaaaagacctggtgctcgaacaaattccagagatctgggaacggctcgaaagagaaaacaggggtaaatggcaggccatcgctaaacatcagttgcaacatgtgttttcccctagtgagcaagatctgcgccttcaggccaggcgctgggctgagacataccgtctcgacgtgctcgaagccgtggctcccgagaggcccaggtgtgcatattgtagcgccgaggctagtaagcggtgcagccgctgccagaacgagtggtattgctgtcgcgaatgccaggtgaagcactgggaaaaacacgggaagacatgcgttctggccgcacagggggacagagccaagtag

SEQ ID NO: 28580 - DNA, 1377 bp, synthetic construct
  source 1..1377: mol_type = other DNA; note = Synthetic coding sequence
atgaacgaggctatggctacggatagtcctcggaggccttctagatgcaccgggggtgttgtggtcagaccgcaggccgttaccgaacaatcatatatggaatcagtagtgacctttctccaggacgttgtgccgcaagtgtactgttgcggtgacaatatccaatcctacaccgccaccgtcatatccgcggctaagaccctgaaaagtggcctgaccatggtgggaaaagtggtgactcagctcaccgggaccctccctagcggtgtgaccgaagatgacgttgctatccattcaaactcccgcaggagccctttagttcctggaatcatcactgtcatcgatacagaaactgtaggcgagggtcaagttcttgtctctgaagattctgactccgatggcatcgttgcacatttccctgcacatgaaaaacccgtgtgttgcatggcgtttaacacaagcggcatgcttcttgtcactaccgacactctaggtcatgacttccatgtctttcagatcctgactcatccctggagttccagccaatgtgcagttcatcacctttataccttacaccgcggagagaccgaagcaaaagtgcaggacatctgcttttctcatgactgcagatgggtcgtggtgtcgacccttagaggaacatcccatgtctttcccataaatccctatggcggacagccttgcgtgcgcacccacatgtctccgagagtagtcaaccgcatgagtcgatttcagaaatctgctggactagaggaaattgaacaagagctgacctctaagcagggcggaagatgttctcctgtcccaggccttagctcaagcccttccggctcacccttgcacggcaagctaaactcacaggacagttataacaacttcaccaataacaaccccggtaatccgaggctgtcaccactccctagcctgatggttgtaatgcctttggcacagattaagcagcccatgaccctgggaaccattaccaaacgcaccggcaaggtaaagcccccaccacagattagtccgtctaaatctatgggaggagagttctgtgtcgccgctatattcggcaccagtagaagttggttcgctaataatgcaggactgaaacgcgagaaagaccaaagcaaacaggtcgtggtggagtctctttatataattagttgctacggtaccctagttgaacacatgatggagccccagccactaaatgggatgaactgctcgcatagacttatgcaaactacactctgcagtagcctgcaaatgcagtactcaatcattagcagttgtttactggcttggtttcccttggaggttctaggacccctcctagacatgggcctcactactgtgtag

SEQ ID NO: 28581 - DNA, 309 bp, synthetic construct
  source 1..309: mol_type = other DNA; note = Synthetic coding sequence
atgcgggctagcccgtgcatctcccaacctgcggcatcttggcaccccagaccatccgctctgcgtccgaccgccggaagtgggcctgatacccgaactcccggaacagtcgaagacggttccgcaccgtgcccggcttttaggagtccagccgtcagcccctgtggagaggagccatgctgttttcaaatctcccccgctgaagagaccctggagcttggcagattggtctcccccggatgccacaagtccagtgcacctcaagaacgcagattagacccacgagctcgctgtgtggttcacatttag

SEQ ID NO: 28582 - DNA, 4227 bp, synthetic construct
  source 1..4227: mol_type = other DNA; note = Synthetic coding sequence
atgtggagtctgacagcaagcgagggtgagagtactaccgcgcacttcttcctgggagctggggatgaagggctgggcactagggggatcggcatgcgccctgaggagtctgatagcgaactgctggaggacgaggaagacgaggtccctcccgagccccagatcatcgtaggtatttgtgccatgaccaaaaaatccaagagcaaaccaatgacccaaatcttggaacggttgtgccgatttgattacctcaccgtcgtcattctgggggaggatgtgatcctcaatgagccggtggagaactggcccagctgtcactgcctcataagcttccatagcaagggttttccattggataaagccgttgcgtatagcaagctacggaatccttttctaatcaatgatctcgctatgcagtactatatccaggaccggcgagaagtgtatagaattctgcaggaagagggcattgaccttccccgttatgcagtgctaaatagggatccagctcggccagaggagtgtaacttaattgaaggcgaggatcaagtcgaagtcaacggagccgtatttccaaaaccctttgtcgagaaacccgttagtgctgaggaccataatgtgtacatctattatccatcctccgcagggggagggagccagcgcttgttccgaaaaatcggatccagaagctccgtctattcgcctgaatcatcagtgcgcaagaccggttcctacatatatgaagagtttatgcccactgacggcactgatgttaaggtttataccgtcggtccagactatgctcatgcagaggctcggaagagcccagctctggatggaaaggtcgagcgggactccgaagggaaagagatcagataccctgtgatgctcacagcaatggaaaaactggtggctcggaaagtttgtgtggctttcaaacagaccgtttgcggcttcgacttactacgcgctaacggccattctttcgtgtgcgacgtgaatggtttcagcttcgttaaaaactcgatgaagtattacgatgactgcgccaagatcctggggaacactattatgcgggagctggcaccccaattccagatcccttggagtatccctacagaggcggaggatattcctatcgttcccaccacatcaggaacaatgatggagctgcgctgtgttatcgcaatcatccgccacggggatcgcaccccaaaacaaaaaatgaagatggaggtgaaacatccgcgattctttgccctcttcgaaaagcatggcggatataagactggcaaactcaagctcaagcggccagagcagcttcaggaggtgctggatatcacacgccttctgcttgctgagctggagaaagaacccggtggagagattgaagagaagactgggaagttagagcaacttaagtcggtcctagaaatgtatggacacttctctgggattaatcgaaaagtgcagctgacctactatcctcacggtgtgaaggcaagcaatgaggggcaggatccacaacgtgagactttagcaccatccttgctgctcgttctcaagtggggtggagagttgacacctgctgggcgagtgcaggcagaggagcttggaagagcttttaggtgtatgtatcccggtggtcagggggattatgccggattcccaggctgtggcctcctgcgcttgcactccacgttccggcatgacctcaaaatatacgcctctgacgaaggcagagttcagatgacggccgctgcatttgccaaaggacttctcgctttagagggggagctgactccaatcctagtgcagatggtcaagtccgctaacatgaatgggcttctggactccgatggggacagtttgagcagctgtcaacacagggtcaaggcccgtctccaccatattctccaacaggacgccccatttggccctgaagactacgatcagctggcccctacacgatccacttctctattgaattcaatgacaatcatccagaatcctgtaaaggtttgcgaccaggtctttgctcttatcgaaaatcttacccatcaaattagggagcgaatgcaagatccaagatctgtcgatttgcagctctatcactccgagacgttggaactcatgttacagcgctggagcaagttggagcgtgactttcgtcaaaaatctggtaggtatgatataagcaagatccccgatatttacgattgtgtcaagtatgacgtgcagcataacggaagcctgggactccagggcactgccgagctgctgcggctgtccaaagccctggccgatgttgttatcccccaggagtacggaatttctcgtgaagagaagcttgaaattgccgtgggcttttgcctccccctgctccggaaaattctcctggatctgcagcgcacacacgaggatgagagtgtgaataagctgcaccctctatacagtagaggggtactgtcaccaggcaggcacgtccgcactcggctgtacttcacttccgaatcccatgttcattcgttgctgtcagtgtttaggtatgggggtttactcgatgaaacgcaggatgcccaatggcagcgcgcactggactatctgtccgcaattagcgaactcaattacatgacacaaatcgtcatcatgctctatgaagataatacccaggaccccctgagtgaggaacgcttccacgtggaactgcattttagtcctggcgttaagggagtggaggaggagggcagcgcaccagcaggctgtggttttaggcctgcaagtagtgaaaatgaagagatgaaaacaaatcagggcagtatggagaatctctgccctggcaaagctagcgatgagcctgaccgggctctgcaaacgtctccccagccccctgaaggccctggacttccgagaagatctccactgatccggaacagaaaggcaggaagtatggaggttctctcagaaacctccagctccaggcccggtggctatcgcctgttttcatctagccgaccccctactgagatgaaacagtccggcttggggtcccagtgcactgggctgttctcaaccactgtcctgggcggatcctctagtgcaccaaacctacaggactatgccagatcccatggcaagaaattgcccccagcctctctaaagcaccgtgacggatttgagggatgtagtatggtgcccacaatatatcctctcgagacactgcacaatgccctgagcttgaggcaggtgtccgagtttctatctagagtttgtcaacggcatacagacgcccaggcccaagccagcgccgcactgttcgacagcatgcattcctcccaggctagcgacaatcctttctctccacctcgtacgctgcatagtccaccactccagctgcagcaaagatcagagaagcccccttggtactcatccggtccctcttccaccgtgtcaagcgcgggaccttcatcgcctaccaccgtcgacggaaacagccagttcgggttctccgatcagccctctctgaactcgcatgtggctgaggaacaccagggacttgggctactgcaagagaccccaggatctggtgcacaagaattaagtatagaaggcgagcaagagctctttgagccaaaccagagcccgcaggttccaccaatggaaactagtcagccgtatgaagaggtttcacagccttgtcaggaggtcccagacattagccagccatgccaggacatatctgaagccctaagccagccatgccagaaggtaccggacatcagccagcagtgccaggagaaccacgacaatgggaaccacacgtgtcaggaagtcccacatatttcacagccgtgtcagaaaagctcccagctgtgccagaaggttagcgaggaggtttgtcaactgtgcctcgagaactccgaggaagtttctcagccatgtcagggagtgagtgtcgaagtcggaaagctcgttcacaagttccatgtaggcgtgggaagccttgtgcaggagacactggtcgaggtcgggtcacccgctgaagaaattcccgaagaagttatccagccctaccaggaattctcagtagaagttggtaggttagcccaggagaccagtgcaatcaaccttcttagtcagggcatcccagaaatcgataagccctcgcaagagtttcccgaagaaatagatctgcaggcccaggaggttcctgaggagatcaattag

SEQ ID NO: 28583 - DNA, 2994 bp, synthetic construct
  source 1..2994: mol_type = other DNA; note = Synthetic coding sequence
cgtccccctcccgcagggcctcaggccccagagggggcaagggccggaagtcgcccagttcagctgctcgcgctactgtccagctggtgcgaagaattgggcagactcttgctgctgaggcaccagaagtcgcgccagagtgacccccctggtaagctgccaatgcagccacctctgagcagcatgtcatcaatgaagccaacactctctcacagcgacgggtcattcccctatgactctgtgccttggcagcagaatacgaatcagccccctggctctttatccgtcgttacaacagtctggggggtgaccaacacgtcacagtcccaggtattagggaacccaatggccaacgctaataatcctatgaatcctgggggtaaccctatggcctcaggtatgaccacaagcaacccaggactgaactcacctcagttcgcgggtcaacagcagcagtttagcgccaaggcgggtcccgctcagccatacatccagcaatcaatgtatgggaggcctaattaccctggatcaggagggttcggagcgagctaccccggtgggcctaatgcccctgctggcatgggaattcctccccatacgagacctcccgctgatttcacacagccagccgcagctgccgctgctgccgctgtcgctgctgctgccgcaactgccaccgcaaccgctacggctaccgtggctgcattgcaggagacccaaaataaagatataaatcagtacggacccatgggcccaacccaagcttataactcacagttcatgaatcagccagggcctaggggccctgcaagcatggggggaagtatgaatcctgcctctatggctgccggtatgacgccgtcaggaatgtcaggaccacctatgggaatgaatcagcccagaccacctgggatctctccctttggcacacatggccagcgaatgccccaacagacttaccccggacccagacctcagtccttgccaatccagaatattaagcgcccatacccaggggaaccgaactatggtaaccagcagtatggcccaaattcacagtttcctacccagccaggccagtatcctgcaccgaatccacctcggccactgacttcacccaattacccaggccagcgcatgcccagtcagccaagttccggtcagtaccccccaccaacagtgaacatgggccagtactataagccagaacagttcaatggccagaacaacactttttcggggtcttcctatagtaattacagccagggtaatgtgaacagaccaccgcgaccagttcccgtggcgaactatccacactccccagtcccaggcaacccaacaccacctatgacaccagggtcctccatccccccatatttatctccgagccaggacgttaaacctccctttccgcctgatatcaagccgaacatgtcagcgttaccaccacccccagccaatcataacgacgagctgaggctcacatttccggtccgagatggagtggtattggagcccttccgtctggagcacaacttagctgtgtccaaccacgtgttccacttgaggcccacagtccatcagaccctcatgtggcgaagcgatctggaactacagtttaaatgttatcaccatgaagaccggcagatgaatacaaattggcccgcttctgtacaggtgtctgtaaatgcgacccctttaacaatagaacggggagataataagaccagtcataagcccttacacctgaagcatgtgtgccagcctgggagaaacactatacagattacagtcacagcatgttgctgtagccatctatttgtgttgcaactggtacataggcctagtgttagatccgttctgcagggcctgttgaaaaagagacttctccccgctgaacactgcataactaaaatcaaaaggaatttctctagtgttgccgcttcaagcggtaataccacactgaacggtgaggacggagtagaacaaacagccatcaaggtaagcctgaagtgcccaatcacttttcgcagaatccaactacccgcacgtggccacgactgtaagcacgtccaatgcttcgacctcgagtcctacttgcagctcaattgtgagcgcggtacatggcgatgtcctgtctgcaacaagactgcccttctagagggtctagaagttgatcagtacatgtggggaattcttaacgcgattcaacactccgaattcgaagaggtgacaattgatcccacctgttcgtggagaccagtcccaattaaaagcgacctgcacattaaggatgatcctgacggaattccctccaagagattcaaaaccatgagcccttctcaaatgatcatgccaaatgtcatggagatgatcgctgcactgggacccggaccctcgccttaccccctgccgcctcctcccggtggaactaactctaacgactactcttctcaagggaacaactaccagggccatggaaacttcgattttccacacggcaaccctggcggtacatccatgaacgattttatgcacggtcccccacaactgtcccatccccctgacatgcctaacaatatggcagccttagaaaagcccttgagtcaccccatgcaggagaccatgccacacgccggatcctctgatcagccacacccatctatccaacaaggcttgcacgtgccacaccctagcagccagtcagggccaccattgcaccactctggggcaccacctcctccaccatctcagccacctcggcaaccgccacaggccgcacctagcagtcatccgcacagcgatctaacgttcaaccccagctctgcgttagaaggccaggccggtgcgcaaggggctagtgacatgccggaaccttcactggatttactgcccgaactgacaaatcccgatgaattattgagctatttggatccgcctgacttgcccagcaattctaatgatgatctcctgtctcttttcgagaataactag

SEQ ID NO: 28584 - DNA, 3405 bp, synthetic construct
  source 1..3405: mol_type = other DNA; note = Synthetic coding sequence
atggggaaagaacaggaattgctagaggctgctcggaccggacatctgccagcagtggagaagctccttagcggaaaaagactatcaagcggtttcggagggggaggcggtggtggctccggaggcggtggcggaggctccggaggtggtgggggaggcctagggtccagtagtcaccctctctcctcactgctctcaatgtggcgtggcccaaacgtcaattgcgtggacagcaccggatatacacccttgcaccatgcagcccttaacggtcacaaagacgtggtggaagtacttctgcgcaatgacgctctcaccaacgttgcagattctaagggctgctatcctctgcaccttgcggcttggaagggggacgcgcagatcgttcggcttctgatccatcagggcccatcccatacacgagtgaatgagcagaataatgataatgagacggcgcttcattgtgccgctcagtatggccacaccgaggtggtgaaggtgctcttagaagagttgacagatcccacaatgcggaacaacaaatttgagactccgctggacttggcagctctctacggcagactagaagtagtgaaaatgctgctcaatgcccatcccaaccttctgtcatgtaacaccaagaagcacacccctttacaccttgccgcaaggaatggccataaggctgtggtgcaggtgctcctggatgcgggaatggattcaaattatcagaccgaaatgggaagcgcattgcacgaagccgcactgtttggaaaaacagatgttgtgcagattctgcttgccgctgggaccgatgttaatatcaaagataatcacggtttgacagcgttagatacggttcgggaattgccttcccaaaagtcacaacagattgctgcactgattgaagaccatatgacagggaagcggtcaacaaaagaagtggataagacccctcccccacaaccacctttaatctcaagtatggattctattagtcagaagtctcagggagacgtggagaaagctgtgactgagctgatcattgattttgatgccaacgcagaggaagagggaccatatgaggcactttataacgccatcagctgtcattcgctagactctatggcatccggcagatcatccgaccaagactcaactaacaaagaggccgaggccgctggagtgaagcccgcaggggtgagacccagggagagaccaccccctccggcaaagcctcccccagacgaagaggaggaagaccacatcgataagaaatacttccccctgactgcttctgaggtgctctcaatgcggccacgcatccacggatctgcagccagagaagaggatgaacatccatatgaactgctactgactgccgagaccaagaaggtggtgctggtggacggcaagaccaaagaccatcgaagatcctcctcctccaggtcccaagactctgcggagggtcaggacggacaggtgcccgaacagttctctggcctgctccacggctcctccccggtgtgtgaggttggacaggaccccttccaacttctctgcaccgcaggacaaagtcaccctgatggaagccctcagcagggagcatgtcacaaagcatcaatgcagctggaagaaactggcgtacatgcaccaggagccagtcagccatccgctttggaccagagcaaacgcgtgggttatttaaccgggctgccaactaccaatagtagatcccaccctgaaaccttgacccacactgctagtcctcacccgggaggtgccgaggagggtgatagaagcggcgcaaggtccagggcccctcccaccagtaagccgaaggctgagctgaaactttcgcgcagcctgagtaaatccgattcagacctacttacatgctcacccacagaagatgccaccatgggcagccgatccgagagtctcagcaattgctcaattggaaagaagcggctggagaaatccccaagttttgcttctgagtgggatgaaatagagaaaattatgtcctctatcggagaggggattgactttagtcaagagcgccagaaaataagtgggttgaggaccctcgagcagagcgtcggagaatggctagagtctatcggccttcagcaatacgagagcaagctcttgttaaacggttttgacgatgtacatttcctgggtagtaacgtgatggaggaacaggacctcagggatatcggaatcagtgacccacagcatcgtagaaagttgctgcaggccgctagaagtctgccaaaggtgaaggctctgggctacgatggcaatagtcccccttctgttccctcatggctcgacagcctggggctccaggattatgttcatagcttcctatcttcgggctacagttcgattgacaccgtgaaaaacctatgggaattggaactggtcaacgtattgaaggtgcagctgcttggacaccgcaagagaataatagcaagtcttgccgacaggccatacgaggagccccctcagaagccgccacggttctcccaactgcgctgtcaagatcttctgtctcaaacaagcagcccgctctctcaaaacgacagttgtacaggcagatcggccgatctgctcttaccccctggcgacacaggcagacgtcgacatgattccctacatgacccagccgctcccagtagagctgagcgatttagaattcaagaggagcatagggaggcaaagctcaccctacgcccaccctcattggctgccccttatgctcctgtccaaagctggcagcatcagccagaaaagctcattttcgaatcctgcggctatgaggccaattatctgggatcaatgttgatcaaggacctacggggaactgaaagtacgcaggatgcatgcgctaaaatgcgcaagagcacagagcatatgaaaaaaatacccaccatcatcttgagcatcacttacaagggagtcaagtttatcgacgcttctaacaagaacgtgattgcagaacacgagatccggaacatatcttgcgccgctcaggacccggaagatttgtgcacttttgcctatatcactaaggacctccagacatcccaccactactgccacgtcttcagcacagtggacgtaaatttaacatacgagattatcttgacactgggtcaggcctttgaagttgcctatcagctagcccttcaggcccaaaaaagcagggctacgggcgcaagcgctgcagaaatgattgagaccaaatcaagtaaaccagtgcccaaacctcgtgtgggcgtgcgtaaatctgccctggagccccctgatatggaccaggacgcgcagtctcacgcttctgttagctgggtggtcgatcccaagcctgatagcaaaagatccctcagcacaaactag

SEQ ID NO: 28585 - DNA, 3099 bp, synthetic construct
  source 1..3099: mol_type = other DNA; note = Synthetic coding sequence
atggaagccgctgcagcagtggtcgccgcagaagcagaggttgaaaacgaagacggagattcctcctgcggcgatgtctgctttatggacaaggggcttcaatctatcagcgagctcagcctggactcaactctccacgcagttaacctgcattgcaacaacattagcaagattgaagcgatcgaccatatctggaatttgcagcacctcgatttgtcaagcaaccagatcagtcggatagaggggctcaatacactaaccaagctgtgtacactcaatttatcctgcaacctgataacaaaggtagagggcctggaggagctaattaacctgactcggctgaacgtatcatacaaccacattgatgatctcagcggcttaatccctctgcacggtataaaacacaaactaagatacatagacttgcactctaaccggatcgattctatccatcacctacttcagtgcatggtagggctgcattttttgactaatctgatcctagagaaagacggagacgataatccggtctgtcgcctgcccggttacagggccgtgatcctgcagactctcccacagctgagaatacttgattgcaagaatatctttggggaaccagttaacttaaccgagataaactcatcacagttgcagtgtctggagggcctgctggacaatctcgtgagttctgacagtccgctgaacatttccgaagatgaaattatcgacaggatgccggtcatcactgctcctattgatgagttagtgccactggaacagtttgcttctaccccctccgatgccgttctgacaagttttatgtccgtgtgccagagctccgagccagagaaaaacaaccacgaaaacgatttgcaaaacgagataaagctgcagaaactcgacgatcagatcctccagctactgaatgagacttccaattctattgacaatgtgcttgagaaggaccctaggccaaaaagagacacggacatcactagtgaatcggactatggcaaccggaaggagtgtaatagaaaggttccccgaagaagcaagattccatacgatgccaagaccattcaaacaatcaagcatcataacaaaaattacaacagctttgtgtcttgcaaccgtaagatgaaaccaccctacctcaaggagctgtacgtctcatcgtctctggccaactgtcccatgctgcaggagagtgaaaagcccaagactgagatcattaaagtggaccaatcccactctgaagacaacacctatcagtctctcgtcgaacagctcgatcaggagcgcgaaaagagatggcgcgcagaacaggccgaaaataaactcatggactacattgacgagttgcataaacacgcgaatgaaaaagaggacattcacagcctggcactgctcacaaccgaccgcctgaaggaaattattttccgggagcgtaacagcaaagggcagctggaggtgatggtccataagctccagaacgaaatcaaaaagctgacggttgaactaatgaaggcaaaggaccagcaggaggatcacctgaagcacctgcgaactctcgaaaaaactctggagaagatggagcggcaaaagcgtcagcaacaggctgcccaaatcagattaatccaagaagtagagcttaaggcctctgcggctgatcgtgagatctacttgcttcggacctccctgcaccgtgagcgagaacaagctcagcaactccatcaactcctcgcgctgaaggagcaagagcacagaaaggaactggaaacgcgggaattcttcaccgatgcggacttccaggatgccctggcaaaggaaatagccaaagaagaaaagaagcacgagcagatgatcaaggagtaccaagagaagattgacgtactgtctcaacagtacatggatttggagaacgagttcaggattgcactgaccgttgaagcgcgtagatttcaggatgtgaaagacggatttgagaacgtggctacagaactggccaaatctaaacatgcactgatctgggcccaaagaaaagagaatgaatcctccagtctgattaaggacctcacttgcatggttaaggaacaaaagacgaaactagctgaagtcagcaagcttaaacaggaaactgctgcaaacctgcaaaatcagatcaatactctggaaatactgattgaagacgacaaacagaagagcattcaaatcgagctcctcaaacacgagaaagtccagcttatctccgagctggcagcaaaggagagtctgatttttgggctgaggacggaaagaaaagtctgggggcatgaactcgcccaacaaggctcctctctggcccagaatcggggaaaactggaggctcagattgagagccttagccgggagaatgagtgtttacggaaaacgaacgaaagcgactccgatgccctcagaatcaaatgtaaaattattgatgaccaaacagagactattagaaagctcaaggactgcctgcaagaaaaggacgagcacattaagcggttgcaagaaaagataacggaaattgagaagtgtacacaggagcaactggatgagaagtcttcccagctggatgaggtcttggaaaaattggaacgacacaatgaaaggaaggagaagcttaagcaacaacttaagggtaaagaagtagaactagaagagataaggaaagcctattcaacactcaaccgaaaatggcatgataagggtgagctcctctgtcacttagagactcaggttaaagaggtgaaggagaagtttgaaaacaaggagaaaaaattgaaagcggaacgtgacaagagtatagagcttcagaagaacgctatggagaagttgcacagcatggacgatgctttcaagaggcaagtggacgccatcgttgaagctcaccaggccgaaatagcccagcttgccaatgagaagcaaaaatgcatcgacagcgcgaacctgaaggtgcatcagattgaaaaagagatgcgagagctcctggaagagacctgcaagaataagaagacgatggaagccaaaatcaaacagctcgcatttgcattaaacgagatccagcaggatatgtag

SEQ ID NO: 28586 - DNA, 219 bp, synthetic construct
  source 1..219: mol_type = other DNA; note = Synthetic coding sequence
atgtcatatcagcagcagcagtgcaaacaaccttgccagccccctcccgtatgtccgacgcctaagtgtcctgagccctgtcccccacccaaatgccccgagccttgcccgtcccccaaatgtccacaaccatgtcccccacagcaatgtcagcaaaagtatccacccgttacccctagtcctccctgtcagccgaaatgtcctcccaaaagcaagtag

SEQ ID NO: 28587 - DNA, 888 bp, synthetic construct
  source 1..888: mol_type = other DNA; note = Synthetic coding sequence
atggaactgatacaggacacatcgaggcccccactcgagtacgtcaaaggggtccccctaatcaaatactttgccgaggcacttgggccactccagtccttccaggcacgtcctgatgaccttctgatcaatacatacccgaaatcgggcactacctgggtcagccagattctcgatatgatttaccagggaggggatctggaaaagtgcaaccgagcgcctatttatgtccgcgtgccttttctcgaggtgaatgaccccggagagccaagcgggctggagacactaaaggacacccctccacccaggctgattaaaagccaccttcctctcgccttattgccccaaaccctgctcgatcagaaggtgaaggtcgtttacgttgcgaggaaccctaaggatgttgccgtgagctattatcacttccaccgcatggaaaaggctcatcctgaacccggaacgtgggacagttttttggaaaaatttatggcaggcgaggtttcctacgggtcatggtaccagcacgtacaggagtggtgggagctgagcaggacacaccccgtgctgtacctcttttatgaggatatgaaggagaatcccaagagggagattcagaagattctggagtttgttggcaggtccctccctgaggaaacaatggattttatggttcagcatacaagcttcaaggagatgaaaaagaatcctatgacaaactacacaaccgtgccgcaggaactgatggaccattccattagtccctttatgagaaagggtatggccggagattggaaaacgacgttcacagtggcccagaatgagcgcttcgacgcggactacgccgaaaagatggctggatgttctctgagcttccggagcgagttgtag

SEQ ID NO: 28588 - DNA, 1491 bp, synthetic construct
  source 1..1491: mol_type = other DNA; note = Synthetic coding sequence
atgaagctggggaaaaagcccatgtacaagccagttgatccctactccaggatgcagtcgacctataattataacatgcggggaggcgcttaccccccaagatacttctatcccttcccggttccacctttattgtaccaggtcgaactgtcagtaggcggtcaacaatttaacggtaaagggaagaccagacaggctgccaagcatgacgctgctgccaaggctctgcgcatcctgcaaaacgagcctttgcctgagagactggaagtaaacggaagagagtccgaggaggaaaatctgaacaagtctgagatctcgcaggtgttcgagatcgccctgaaacggaatttgcctgtcaattttgaagtggccagagagtctggcccaccgcacatgaaaaattttgtgactaaggtgtccgttggtgagttcgtgggggagggggaggggaagtcaaaaaagatcagtaaaaaaaacgcagcaatcgccgtgctagaagagctcaagaagctccctccactgcctgctgttgagagggtaaagcccaggatcaagaagaaaactaagcctattgtgaagccacagacctccccggaatacggtcagggcattaatcccatctcacggctggctcaaatccagcaagcaaagaaagagaaagagcccgaatatacactcctgaccgagagagggctgccacgtaggcgcgagtttgtgatgcaggtcaaagtgggcaaccacaccgcagagggcactggtacaaacaaaaaggttgcaaaaagaaatgctgctgagaacatgctagagatcctgggattcaaggtaccgcaggcccaaccaaccaaaccagctctgaagagtgaagaaaagacccccatcaagaaacccggtgatgggaggaaagtaacattctttgagcccggttcaggggatgaaaatgggaccagtaataaagaagacgaatttaggatgccgtatttgagccatcaacagctgcctgcaggcatccttcccatggttcctgaggtagcccaggctgtcggtgttagccagggacatcacacgaaagacttcactcgtgctgccccaaacccagccaaagccaccgtgactgccatgattgcgagggagctcctctatggtggcacgagcccaaccgctgagaccatcttaaagaataacattagttcagggcatgtgccacacgggccacttactaggccgagtgagcagctcgattacttgtcaagagtgcaaggattccaagttgagtataaagacttccctaagaacaataagaacgagtttgtgtcactgatcaactgttcttcccagcccccactgattagccacggcattggcaaagacgtggagtcctgtcatgacatggcggcattaaacatcctcaaactactctctgaattggaccaacaatcaaccgagatgccgagaaccggcaacggcccaatgtctgtgtgtggacgctgctag

SEQ ID NO: 28589 - DNA, 1575 bp, synthetic construct
  source 1..1575: mol_type = other DNA; note = Synthetic coding sequence
atgagcagttgcgtgtcaagccaaccctccagcaaccgtgctgccccacaagacgagttgggtggaagaggcagctcaagcattcatctggggatggagtcattcattgtagtaacagaatgtgagccaggttgtgctgtggatctcggccttgcaagggaccgtccattagaggccgatggtcaggaagtgcccttagataccagcgggagccaagccagacctcacctgtccggaagaaaactttccctccaggagcgctcccaggggggactggccgctggcggaagtctggatatgaacggacggtgtatatgcccatccttaccatactcccccgtctcttccccgcagtccagccctagacttccccgacgccctacagtcgaatcccatcacgtgagcattacaggaatgcaggattgtgttcagctgaaccagtacactttaaaggatgagatcggcaagggttcctatggtgtcgtcaagctcgcctataacgaaaatgacaacacctactacgctatgaaagtactgtccaaaaagaaattgattcgtcaggcaggcttccctcggcgacctcctcctagaggcacgcgccctgcccctggagggtgcatccagccacgcggacccatagaacaggtgtatcaggagatagccatccttaaaaagctggatcaccctaacgtggtcaagcttgtcgaagtgcttgacgatcccaatgaggatcatctgtatatggtgtttgagttggtgaaccaggggcctgtgatggaggtccctacgctaaagccgctgtcagaagaccaggctcgcttctatttccaggatctcatcaaaggtattgagtatctccattaccaaaaaattatccacagggatattaaacctagtaacctcctagttggtgaggatggacatattaaaattgcggacttcggagtcagtaacgagttcaagggatctgacgccctcctgtccaataccgtgggaactcctgcctttatggccccagagagtttgtccgaaacccggaagatctttagcgggaaagctctcgacgtatgggccatgggagtaactctgtactgcttcgtcttcggccaatgccccttcatggatgagcggattatgtgcttgcactctaagattaaatcacaagccctggagttccccgaccagccggatatcgccgaggatctcaaggatttgataacccggatgttagataagaacccagagtccaggatcgtcgtgccagagataaagttacacccatgggtgacaaggcatggcgctgagcccctgccctctgaggacgagaattgcaccctagtagaggtaacagaagaagaggtcgagaatagcgtaaaacatattccatccctagcgactgtgattctagtgaaaacgatgattcggaagcggagctttggcaaccctttcgaagggtcccgccgagaggaacgtagcctttccgctcctggcaacctgctgactaaacaggggtccgaagacaacctccaaggtactgatcctccaccagttggcgaggaggaggtgctgctgtag

SEQ ID NO: 28590 - DNA, 1902 bp, synthetic construct
  source 1..1902: mol_type = other DNA; note = Synthetic coding sequence
atgaaagcaattaagaagtctctgacagaagaagaatacctgtacctggactttagtcatcagactgagggctgcattttcccactgcacaccagtgtgaccctgtttcttctgagttattgtgactgtaaaatcttcaagatatgtttggtggtcaccaaagaagtctcccgcgactctagcctgttaagggacgacctgattcaggatgtcgaaatccagatcatcagccggcaggagctgccacctattgtgcagaactgttgcctgccggcagtcgtggaaagatctgataatttttgtcgcgcagggcttgcagtggtgctgcgtcatattatccaaaaaagctacgaggccgaccccctgaaaaaagagcttctagaactgctgggctttaaaaagacctgcctgaaggcctgtgccgaagtgagccagtggactcgcttgtgtgagctgaccattccgttggcaatagagaacttccttagggaaagtagcgaccagccacccaccattcccgtggagatcctgcagctagagaaaaagttgagcgagcctgtgcgggtgcataacgatgacaagctgagaaggcagaagcttaagcaacagaaggcagatggcgtcggcccaccgttaaccaagggcaaagcaaagagcaaagtgcacacacaagaaacttcagaaggccttgattctagttctaagagcttggagttaaaggtggcattctccaagctgactgtgcaggaggagcctgccacaactaatcgggagccaagccatatcagaaaagccaaagcttccgacctgcctcctctcgagcacgtttttgctgaaggactttatttcacgctggctgacattgtcctcctcccttgcatacaccactttctggtcatcattagtaggaaattttcagaaaaactggtggaatttccacttctggcctcttggtaccaacgcattcaggaggtccctggagtgaagacagccgcatccaagtgcggaattcagtttcttcacctgccgaaactcttaactacatcaactgaacagcatcctaatctctgcgaagtcccaggtgtagaagagcagtctgacccgctcttcattgggggtccgaggccaacaatggctaagttgatggagaagggcatagaagtcatgttttccccacacccgtgtcctacatggactctggattggaacgtgcttcccgctgcagttagcccaaaggaagggaagatgagcagcgacagagccctgaggaaacagcagcaactgaataaccttgtgtatgtggtgacgaaccaggctaaacctggggatcggatcgtggatttctgctccgggggtggccatgtcggtattgtcctggctcacatgctcccatcctgccaagtgaccctgatcgagaataaggagctatccctgattcgcgctaaaaagcgatcagacgaacttgggctctccaacatttggtttattcaggccaacatggagtatttcacaggaatgttcaacatcggcgttgcactccacgcttgtggagtcgcaaccgacatggtgatcgagcattgcataaaaactagagcttcctttgtcacctgcccttgctgttacggctttatccagaacacaagtaaatttaattttcctaagtccgaacagtttaaaaaaacactgtcctacaaggaacatatgattctctgtcgcttcgccgaccagaccgcagtacagctgccccctcagaggcggctgatcgggaaacagtgcatgtgcctcgtagacctcgatagggctagagccgcagaagagtgtggctatagcgtgcaggtgatctctatggagcctgagtcatgcagcccgaagaataacatgatcgttggagtgcccatttag

SEQ ID NO: 28591 - DNA, 519 bp, synthetic construct
  source 1..519: mol_type = other DNA; note = Synthetic coding sequence
atgagcagcggtaattatcagcagtctgaagccttatccaaaccaaccttttcagaggaacaagccagcgccctggttgagtccgtcttcgggctgaaagtgtcgaaggtgcggccattgccaagctacgatgaccagaactttcatgtatatgtctccaaaactaaggacggacccaccgagtatgttcttaagatttccaatacaaaagctagtaagaaccccgatctgatcgaggtgcagaaccacatcattatgttcctaaaggcggctggattccctacagctagcgtgtgtcatactaagggagacaacactgccagtcttgtttcagtcgattcaggctctgaaatcaaaagttacctagtccgtttactcacttatttacctggacgccctatcgcggagctgccagtcagccctcagctgctctacgagattggaaagctggccgctaagttggacaaaacactgcaggaagggaagccaagggtgactccattgctagctaagaattag

SEQ ID NO: 28592 - DNA, 2937 bp, synthetic construct
  source 1..2937: mol_type = other DNA; note = Synthetic coding sequence
atgggctggaagcctagcgaggctcggggtcaatcccagagttttcaggctagtggtctccagcccagatcgctgaaagctgcgcgtcgggctaccggacgtcctgacaggtctagggcggcaaggcctacaatggaccctagcgcacatcggagtagagccgctccaccgaatatggatcccgatcctcaagcaggtgtgcaagtgggaatgcgagtagtgagaggggtggactggaaatggggacagcaagatggtggggagggcggagttgggacagtggtggaactcggacgccacggcagcccctctacccccgaccgcaccgtggtagttcagtgggaccaaggaacaaggactaattacagggcaggctaccagggtgcgcacgacctgttactttacgacaacgcccagattggagtcagacatccgaacataatctgcgactgctgtaaaaaacatgggctgcggggaatgcgctggaaatgccgcgtatgcctggactatgacctatgtactcagtgctatatgcacaataagcacgaactggctcatgcattcgatagatacgagaccgcccactcccgccctgtgacgctgtcccccagacaggggctcccacggattccactcaggggcatcttccagggtgcaaaagtggtccggggaccagactgggagtggggctcacaggacgggggagaaggaaaacccggacgcgtggtcgacattagagggtgggatgtggaaacgggacgaagcgtggccagcgtcacatgggcggacggaactacaaacgtgtatcgagtgggccacaaaggaaaggtggatctgaagtgcgtgggggaagccgctggaggtttttactataaagaccacctccctcgactgggcaagccagcggagcttcagcggcgagtcagcgcagacagtcagccgttccagcatggcgacaaagtgaaatgtctgctggacacagatgtcctgcgcgagatgcaggaggggcacggagggtggaaccctcgaatggccgaatttattggacagaccggcaccgtgcacagaatcacggacagaggggacgtgcgcgtgcagtttaaccatgagaccaggtggacattccaccctggagcactgacaaaggctttgggtcgcgtcgggaaggtggtgaaggttttcggtgacggcaatcttagggtcgccgtggccggtcaacgatggacttttagcccctcttgtcttgtggcttacagacctgaggaggacgccaatctggatgtcgccgagagggcacgggagaacaagtcctccctgagcgtggctcttgacaaactcagagcccaaaagtccgacccagagcaccccggtcgcctggttgtcgaggtggctctcggtaatgccgcaagagccctggaccttttaagaagacgacccgaacaggtcgatactaagaatcaaggtcgaacggcactgcaagtcgctgcatacttgggacaggtggaactcataaggctgctccttcaggcgcgagccggagtggatctccccgatgacgagggtaataccgcacttcactatgcagcactggggaatcagccagaagctacccgggtcctccttagtgctggatgccgtgctgacgcaattaatagcactcagtccacagccctgcacgtggccgtgcagagaggattcctggaggtggtcagggctttgtgtgagcgcggttgcgatgttaacctgccagatgcccactctgacacccccctgcatagtgccatatcagcgggaaccggcgcttccggtatcgtggaagtgcttaccgaagtgccaaacatcgacgtcacggctaccaattctcaggggttcacactattgcaccatgcctctttgaagggtcatgcactggccgtgcggaagattctcgccagggccaggcagctggtcgatgctaagaaggaagacgggtttactgcccttcacctggcagctctgaacaaccatcgtgaggtggcacagattttgattcgggaaggcaggtgcgacgtgaacgtcagaaatagaaaactgcagtcccccctgcatctggctgttcagcaggctcacgtgggcctggtaccactgttggttgacgcaggatgttcagtgaatgctgaggatgaggagggcgacaccgctctgcatgtggcactccagaggcatcagctattgccacttgtggccgatggcgctggaggggaccctggtcccctgcagctgctgtcgcggcttcaggcctctggcctcccaggctctgcggagctcacagtcggagctgccgtggcctgttttctcgccttagagggggcagacgtgtcatacaccaatcacagaggacggtcccccctggaccttgctgctgaaggcagggttcttaaggccctgcagggctgcgcacagcgtttcagagaaagacaagcaggcggaggagctgctcccggaccacggcaaacacttggtacgcccaacacagtcacaaatctacatgtgggagccgcacccggaccagaggcagcagagtgccttgtgtgctctgaacttgccctcctcgttctgttttccccttgccagcacagaaccgtctgcgaagagtgtgcccgaaggatgaaaaagtgtattagatgtcaagtggtagtctccaaaaagttacgccctgatggctccgaagttgcaagcgcagctcccgcacctggccctccacgccagctggttgaagagcttcagagccgatatcgccagatggaagaacgtatcacttgccctatctgcatcgattcccatatcagactggtttttcagtgcggtcacggtgcttgcgccccatgcggttcagctctcagtgcctgtcctatttgtagacagccaatcagagacagaattcagatcttcgtgtag

SEQ ID NO: 28593 - DNA, 1074 bp, synthetic construct
  source 1..1074: mol_type = other DNA; note = Synthetic coding sequence
atggggggagctgtgagcgcgggtgaggacaatgatgacctgattgacaaccttaaggaggctcaatacatacgtaccgagagagtcgaacaggcatttcgggctattgatcgcggagattattacctggaaggctaccgggacaacgcttacaaagatttggcttggaagcatggcaacatacatctgtccgccccatgcatctactcagaggtgatggaggccctgaagctgcagccgggtctgtcatttcttaatctggggtccggcactggctatctgtccacaatggtgggcctgatactgggtcccttcggaataaatcacggtatcgaactgcattccgacgtcgttgagtacgcaaaagaaaagctggagagcttcattaaaaactcagatagttttgacaagttcgagttctgcgagccagcatttgttgttggcaattgtttgcagattgcaagcgacagccaccagtacgacagaatttattgtggtgccggtgtccaaaaggatcacgagaactacatgaaaatcctcttaaaggttgggggaatcctggtgatgcctattgaggatcagctcacacagatcatgcggacaggacagaacacatgggaaagcaagaatatcttggcggtctcctttgcaccattggtgcagccaagcaaaaatgataatggcaagccagattccgtcgggctaccaccttgtgcagtgagaaatctccaagacctcgccagaatctacatccgaaggaccctgcggaacttcatcaacgatgaaatgcaggctaaagggatcccccaacgcgcaccccctaagcggaaacggaaaagggtgaagcagcgaattaacacttatgtgtttgtcgggaaccagctgatcccacagcctctggattctgaggaagatgagaagatggaggaggacaataaagaagaggaggaaaaggatcacaacgaagccatgaagcctgaagagccacctcagaacctcctgagagaaaagattatgaagctcccactgcccgagtctcttaaggcctatctgacctattttagagataaatag

SEQ ID NO: 28594 - DNA, 633 bp, synthetic construct
  source 1..633: mol_type = other DNA; note = Synthetic coding sequence
atgtcctgccccaactactgttcagggaactcaaacagtgggtcactgagaacatcacggcacattccgctaacaagtatcgacctgtgtcccacatcagttagttgcggagatgtgctgtatctgcccactagttcccaggatcatacttgggtgacagataactgtcaggagacctgtggcgaaccaacttcatgccagcctgtgcactgtgaaacagggaaccttgagaccagctgtgggtcaagcaccgcatactatgtgcctagaccttgccaaggttccagctttctgccggcttcctttttctcctccagctgtcttcccgtctcctgccgtccacaaagatacgtgagctccgggtgtaggccactcagaccactgttgaatagttaccaaccaattggggattgcgttcccaatgcatatcgtccacagttctgtctgagcaaaagctgtcagccccaaaatctgcttacgtccggctgtcaacccagcagttgcctcgcgtacagaccgcagagtctccatgtggtcagttctagtctcagacctctcggccctctctttagcggatgccaacctctgacgcacgtgttttctacgtgccgacccagctgctccgggctttag

SEQ ID NO: 28595 - DNA, 606 bp, synthetic construct
  source 1..606: mol_type = other DNA; note = Synthetic coding sequence
atggccagcggagatgactcccctatttttgaagatgatgaaagtccaccctactcattggagaagatgacagatctcgtggcagtatgggacgtggccctctctgacggcgtccacaaaattgagtttgagcacggcaccacttcagggaagcgcgttgtgtacgtggacggaaaggaggaaattaggaaagaatggatgtttaagctggtgggcaaagagacattttacgtgggagccgcaaagaccaaggcaacaattaacattgacgccatatcgggcttcgcctacgagtatacacttgagatcaatgggaaaagcttgaagaagtacatggaagatcgaagtaaaaccaccaatacatgggtgttacacatggatggtgaaaacttcagaatagtgctggagaaggatgccatggatgtatggtgcaatggaaagaagttagaaacggcaggggaattcgtcgacgatggcaccgagactcacttctcgattggtaaccatgattgctacataaaggcagttagtagcggaaaacgcaaggagggaattattcacacactcattgtagacaatcgggaaatcccagaaattgcctcttag

SEQ ID NO: 28596 - DNA, 3390 bp, synthetic construct
  source 1..3390: mol_type = other DNA; note = Synthetic coding sequence
atgccggcaacccgcaagccaatgaggtacgggcacaccgaaggccacactgaagtctgcttcgacgacagcgggagcttcatcgtaacgtgcgggagtgatggggacgtgcggatatgggaagacttggatgacgacgaccccaaattcattaatgtgggagaaaaggcgtattcatgcgctctcaaatccggcaaacttgtgaccgcagtcagtaacaacactattcaggttcatacttttcccgaaggcgtgcccgacgggattcttaccagatttactacaaatgccaatcatgtggtgttcaacggcgatgggacaaagatcgccgcaggtagcagcgattttcttgttaaaattgttgacgttatggatagttcccagcaaaagacctttagggggcacgacgcccctgtactgtccttgtcatttgaccccaaggacatttttctggcatccgcaagctgtgacgggagtgtgagggtttggcagatttcagaccagacatgcgccattagctggccactgctgcagaagtgcaacgacgtcataaacgcaaagtctatctgccggctcgcgtggcagcccaagagcggcaagctgctggcaatcccagtcgaaaaaagcgtcaagctgtaccgcagggaaagctggtcgcaccaatttgatttgagcgataactttatatctcagactctgaatatcgtaacttggtccccctgtggccagtatttggctgctgggtcaatcaacggattgattatcgtgtggaacgtcgagacaaaggactgtatggagcgggtcaagcacgaaaagggctatgctatctgcggccttgcctggcatcccacatgtggcagaatttcatacacagacgctgagggtaatctgggcctgctggagaacgtgtgcgacccatccggcaagacatcatcctctaaggtgagctcccgagttgaaaaagattataatgatctgtttgacggcgacgatatgtctaatgctggggatttcttgaacgataacgccgtggaaattccttcctttagcaaggggattatcaatgatgacgaggacgatgaggatctcatgatggcctcaggtaggccacgccagcgtagtcacatcttggaggacgatgaaaattctgtagacatttccatgctcaagactggatcatctcttcttaaagaagaggaggaagacggccaagagggatccatccataacctaccgctcgtcacatctcagcgcccattctatgatggccctatgcccaccccacgccaaaagccatttcagtccggcagcaccccgctgcacctcacgcaccgctttatggtctggaattccattggaatcattaggtgctataatgatgaacaggacaatgccatcgacgttgaattccacgacacgagtatccaccacgccactcacctttcaaatacattgaattataccatagccgacctctcacacgaggccatcctattggcttgcgaatcgactgatgagctggcttcaaaattgcactgtctgcactttagttcatgggactcatccaaggagtggattattgatctcccccagaacgaggatatcgaagccatatgtttggggcaaggttgggctgccgctgctacatccgccttactccttaggttatttaccattggaggggtccagaaggaggttttctcattggcaggccctgttgttagcatggctggccacggagaacagctctttattgtttaccacaggggaactggattcgacggagaccagtgccttggtgtgcaattattggagctcgggaagaaaaaaaaacagattctccacggcgaccccctgcccttgactaggaaaagctatctagcatggatcggattctctgctgaaggaaccccctgctacgtggatagcgagggtatcgttcggatgttgaacagaggcctgggtaacacgtggacaccgatctgtaacacaagggaacactgcaagggcaaatctgaccactactgggtggtcggaatacacgagaatccacaacaactccgatgcatcccttgtaagggatctcgctttccacctaccttacctagacccgcagtggccattcttagtttcaaattgccctactgtcagatagccacagagaaaggtcagatggaggagcaattctggcggtcagttatattccacaatcatctggactatctggccaaaaacggctacgagtacgaggaaagtacaaaaaatcaggcgactaaggaacagcaggaattactgatgaagatgctcgccctgagctgcaagctggagcgcgagtttagatgtgtggaattggctgacttaatgacgcaaaatgccgtcaacttggcaattaaatacgcctcccgcagccgcaagctgatccttgcacaaaagctgtccgagttagccgttgaaaaggctgcggagctgactgctacccaggtggaggaagaggaagaagaggaggactttcgtaaaaagcttaacgccggatattctaacaccgctaccgagtggagtcagccaagatttcgtaatcaggtggaagaagatgctgaagattccggggaagctgacgatgaggaaaaacccgaaatccacaagcctggccagaactctttttccaagagcaccaattcttctgacgtgtctgctaagtcaggagccgtgacattcagctcacagggccgagtcaatccgttcaaagtgtccgctagctccaaggagccagctatgagcatgaactccgcgaggagcacaaatatcttagacaacatgggcaaaagcagtaaaaaaagcaccgccctgagtcgcactactaacaacgagaaaagtccgatcatcaagccactgatccctaaacccaaaccaaaacaagccagtgcagccagttattttcagaagagaaactcacagacaaacaaaactgaagaggttaaagaagaaaatcttaaaaacgtgctcagcgaaactcctgctatttgcccaccccagaacactgagaatcagaggcccaaaaccggctttcagatgtggctggaggagaataggtctaatattctgagcgataatcccgatttttccgacgaggccgatatcatcaaagaaggaatgattcgcttccgggtgctgagcactgaagagcggaaagtgtgggccaataaggccaaaggcgagacagcttctgagggcaccgaggccaagaagcgaaaaagggttgtcgacgaaagcgacgagacggaaaatcaggaggaaaaagccaaggaaaacctgaacctgtctaagaagcagaaacccctcgatttttcaaccaatcagaagctcagcgctttcgccttcaagcaggaatag

SEQ ID NO: 28597 - DNA, 1476 bp, synthetic construct
  source 1..1476: mol_type = other DNA; note = Synthetic coding sequence
agtggcagttcccactcatttcctggctccctcgaagttacagccctgatgaccacatggtctagtctgcagggctcccatgtaagcaagagggccctagcctatgcactggtcgtcactaactgccaggagcgcatccagcactggaaaaaggtggacaacgattataacgctctaagggagcgcttatccacactgcccgataagctgagctacaatattatggttccctttggaccttttgctttcatgcccggaaagctcgttcacactaacgaggttacagtactgctaggcgacaactggttcgccaaatgttccgctaaacaggctgtgggcctggtggaacatcgcaaggagcacgtgcgcaagaccatcgacgacctgaaaaaagtgatgaagaactttgaatcccgggtcgagttcacagaggacttgcaaaaaatgtccgacgcagcgggtgatattgtggacatccgtgaggagatcaaatgcgactttgagtttaaagccaaacataggattgcgcataagccacacagtaagcccaagacttcagacatttttgaggccgatatcgctaatgatgtgaaaagtaaggatcttcttgccgacaaagagctctgggctcgtctagaggagctcgagaggcaagaggagttgttgggagagctggattctaaaccagatacagttatcgccaacggcgaggacactacatctagcgaggaggaaaaagaggatcgaaacacaaacgttaatgccatgcatcaggtaaccgattcccacactccctgccacaaggatgtcgcttctagtgagccattcagcggccaagtgaactcccagctgaattgctcagtgaatggatcctcctcttatcatagtgatgacgatgacgatgatgacgacgacgatgacgacgataacatcgacgatgacgacggcgacaacgaccacgaggcactcggagtgggtgacaactctatcccgactatctacttctcccacacagtcgagcccaagcgagtgcgaatcaatactggcaagaacaccacactgaaattttccgagaaaaaagaagaggccaagagaaagaggaagaacagcacagggagcgggcactcagcacaggagctgcccaccattaggacccccgcagatatctatcgcgcattcgtggatgtggtcaacggagagtacgttcccaggaagtcaattctcaagtctcggtcaagggagaatagcgtgtgttctgatacatccgaatcttccgctgccgaattcgacgaccgcagaggcgtgctgaggtcaataagctgcgaagaggcgacatgcagtgataccagtgagtcgatcctggaggaggagcctcaggaaaatcagaaaaaactattgcctttatcggtgacacctgaggtcctgcgcctggttggatattctagaaacctggcccctttgaatgtcattctatag

SEQ ID NO: 28598 - DNA, 981 bp, synthetic construct
  source 1..981: mol_type = other DNA; note = Synthetic coding sequence
atgctcctctctaaattcggcagcctggctcatctatgcgggccaggtggggttgatcacctgccggtgaagatcctgcagccggcaaaggcagacaaagaaagctttgagaaggcgtatcaggtgggtgccgtcctagggtctgggggattcggtactgtgtacgctggctcgcggattgcggatggactccccgtcgctgtgaagcatgtcgtcaaagagcgtgtaactgagtgggggagtcttgggggagcaacagttccgctggaggtggtactgcttcgcaaggttggagctgcgggtggcgcacgaggtgttattaggctgttggactggtttgaacggccagatggtttccttctcgtcctcgaacgacccgaacctgcccaggacctgtttgatttcattacggagcgaggggctctggatgaaccgctggctagaaggttttttgcccaggtccttgccgcagttcgccattgtcactcttgcggcgtggtccaccgcgacattaaagatgagaatcttctggtagacctgaggtctggtgaattgaagctcatcgactttgggagcggcgctttactgaaggacaccgtttatacagactttgacgggacccgtgtctatagcccgccagagtggattagataccatcgatatcatggcagatctgcaaccgtctggtctttaggcgtcctcttgtatgatatggtctgcggcgatatcccttttgaacaggatgaagagatactacgcggaaggcttttgttccgacggagggtctctcccgagtgtcagcagctgataaggtggtgcttgtctcttagaccatctgaaagacccagcctggatcagatcgctgcccacccatggatgctgggggcagatggcggagtacctgaaagttgtgacctgcgactgtgtacgcttgatcccgatgacgttgccagtaccacctctagttcagagagcctgtag

SEQ ID NO: 28599 - DNA, 2880 bp, synthetic construct
  source 1..2880: mol_type = other DNA; note = Synthetic coding sequence
atggccgctagcacaggatatgtcagactttggggggcagccagatgctgggtgttgcgtcgcccaatgctagccgctgctggtggaagggtgcctaccgcagccggagcatggctactgcggggacagcggacctgtgatgccagcccgccatgggcactgtgggggcgaggccctgctataggcggtcaatggcgcggtttttgggaagcgagttccaggggcggaggtgccttttctggtggggaggacgccagcgaaggcggagccgaagaaggtgccggaggcgcaggaggttccgccggagccggtgaagggcctgtcataaccgcgctcactcccatgaccatacccgatgtgtttccgcacctgcccctcatagcgatcacccggaatccagtgtttcccaggtttatcaaaattattgaggtaaaaaataaaaaacttgtggagctgcttcgaagaaaagtcagattagcccagccttatgttggcgtgtttttaaaacgggacgactccaatgagtctgatgtggtggagtccctcgacgagatttatcacacgggcacattcgcccaaattcacgaaatgcaggacttgggtgataaactgcgcatgatcgtgatgggccatcggagggtacatatctctcggcagctggaggttgagcccgaggagccggaggccgaaaacaagcacaagccaagacgcaaatccaagcggggaaagaaagaggccgaagatgagttgagcgctcgtcatcccgcagagctggcgatggagcccacacccgaactgcccgcagaggttctgatggtggaagtggaaaacgtggtccacgaggatttccaggtgacagaggaggttaaagccctcacagctgagatcgtaaaaaccatccgcgatataatagctctcaacccactgtacagggagtctgtgctgcaaatgatgcaggcaggtcagcgtgtggtggacaatcctatttatcttagtgatatgggggcagcccttacaggggcagaaagccacgaacttcaggatgtgctcgaagagactaacattcccaagaggttatacaaagcattgtccctgttgaagaaggagtttgagctgtccaagctgcaacagcgtctggggagggaagtggaggagaaaatcaagcagacgcatagaaaatacctcttgcaggagcagctgaaaatcataaaaaaggaactggggttagagaaggatgataaggacgccatcgaggagaaattccgggaacggcttaaagagcttgtggtgcccaagcacgtgatggacgtagtcgacgaagagctgagtaaactgggcctgctggacaaccattcgtctgagtttaatgttacgagaaattatttggattggctcacttccattccctggggtaaatattcaaacgaaaaccttgacctcgcaagagctcaagctgtgctggaagaagatcactatggcatggaggatgtgaagaagcgtatacttgagttcatcgcagtttcacagctgaggggctctacacagggcaagatcctttgcttctatgggccaccaggggtgggcaagacttccatcgctcgttccattgccagggcgctgaatcgggaatattttcgatttagtgtggggggaatgacagatgtagcggagatcaaagggcaccggaggacgtacgtcggcgcaatgccgggaaagattatccagtgtctgaagaagactaagacagaaaatcctctaattcttattgacgaagtcgataaaattggcagaggctaccagggtgatccctcgtctgccttactggagcttcttgatcctgagcagaatgccaactttcttgatcactatctagatgtgcctgtggatctcagcaaggtcctttttatctgcacagcgaatgtgacagacacaatccccgagccactccgcgacaggatggagatgatcaatgtatcaggctatgtagcccaggagaaactggccatcgctgaacgctatcttgtgcctcaggccagagccctgtgcggcctggacgagtcaaaggccaaactctcctccgacgttctgacgctcctgatcaagcagtactgcagagaaagtggagtgcggaacttgcaaaagcaggttgaaaaagtgttgagaaagagtgcttataagatcgtgagtggcgaggccgaatctgtcgaggtgactcccgagaatctccaggactttgttggaaagcccgtgttcaccgtggaacgtatgtacgacgtgaccccacccggagtagtcatgggtctcgcatggaccgctatgggcggttccactctcttcgtagaaacatcattgcggcgaccccaggataaagacgctaaaggagataaggatgggtctcttgaggttaccggccagctcggggaggttatgaaagagagcgctcgtatcgcctacacctttgcccgagcgttccttatgcagcatgcccctgctaacgattatctggtaacctcgcatatccatctacatgttcccgagggcgcaacacctaaagatgggccaagtgctgggtgtactatcgtgaccgcccttctgagcttggccatgggccgacctgtgaggcagaacctggccatgacaggggaggtttccctcaccggtaagattctgcctgtcggtggtataaaggagaaaaccatcgccgctaaacgggctggagttacctgtatcgtgctgcctgctgaaaacaagaaagacttttatgaccttgcagcctttattactgagggcctcgaggtgcactttgttgaacactatagagaaatctttgacatcgcctttccagacgaacaggccgaggcccttgccgtggaaagatag

SEQ ID NO: 28600 - DNA, 1203 bp, synthetic construct
  source 1..1203: mol_type = other DNA; note = Synthetic coding sequence
atgaatccagcttccgcccctcctcccctgcccccacctggtcagcaggtgatacacgtaactcaggacttggacacagacctagaagcactcttcaatagcgtgatgaatcctaaaccatcatcttggcgcaagaaaatattgcccgagagcttcttcaaggagccagattctggatctcattctcgacagtcaagcacggatagttcagggggacatcctggcccacggctcgccggtggagctcagcacgttcgtagccattcttctccagcctccctccagctgggtaccggagctggagccgcaggatcccctgcacagcagcacgcccaccttcggcagcagagttacgatgttactgatgagctccccctccctcctgggtgggaaatgacatttaccgctacaggtcaacggtacttcctaaaccacattgaaaagatcacgacatggcaggacccacggaaagccatgaaccagccattgaatcatatgaatctacatcctgcagtcagttccacacctgtcccccagcgctctatggctgtgtcccagcccaatctggtcatgaatcaccaacaccagcagcagatggccccaagcaccctgtcccagcaaaaccatccaacacagaatccacccgcaggcttgatgtccatgcccaacgctctcactactcagcagcagcagcaacaaaaactgcggctgcaacggattcagatggagagggagagaattaggatgcggcaggaggagctcatgcgccaggaagccgctctgtgtcggcagcttcccatggaggcagaaaccctggcgccagttcaggcagccgtgaaccctccgacaatgacccctgatatgcgaagtattaccaacaacagctccgaccctttcctgaatggcggtccttatcacagtcgggagcagagcacggatagcggactcggcctgggctgttactcagttcctactacacctgaagattttctctctaatgttgacgaaatggacaccggggagaatgccggtcagacccccatgaacataaatcctcagcagacgcgatttcccgacttcctcgattgtttgcctggtactaatgtggatctcggaacactggagtctgaggacttgattccgctttttaacgatgtggagtcggctcttaataaaagtgagcccttcctgacatggctatag

SEQ ID NO: 28601 - DNA, 2625 bp, synthetic construct
  source 1..2625: mol_type = other DNA; note = Synthetic coding sequence
atggaagtccttagagagaaggtggaagaagaagaggaggctgaacgggaggaggccgcagagtgggcagagtgggctaggatggaaaaaatgatgaggccagtcgaggtgcgcaaagaagagatcaccctcaagcaggagacccttcgcgacctggaaaaaaagttgtccgagattcagatcaccgtgtctgctgaactcccagcattcactaaggacaccatcgacatctcaaagctcccaatcagttacaagacaaacactccaaaggaggagcacttgctgcaggtggcagacaacttcagccgccaatactcgcacttgtgccccgatcgtgtaccccttttcctgcaccccctgaatgagtgcgaggttccaaagtttgtgagcacaaccctgaggcccaccttgatgccttatccggagctctataactgggatagctgtgcccagttcgtctctgatttcctgaccatggtgccgctacctgaccctctgaaaccaccatcgcacctgtattcgagcacaactgttctgaaataccagaagggcaactgctttgacttctcaactctgctgtgcagtatgctcattggcagcgggtacgatgcctactgcgtgaacggatacggctccttggacttatgccacatggaccttacccgggaggtgtgcccactgactgtgaaacctaaagaaactatcaagaaggaagaaaaagtattaccaaagaaatatacgatcaagcccccacgtgacctttgttcccgtttcgaacaggagcaggaggtaaagaagcaacaagagattcgggcacaggagaaaaaacgattgcgcgaggaggaagagcgccttatggaggccgagaaagccaagccagatgctctgcacgggctgagagtccactcttgggttttggtgttgtccggtaaaagagaggtccccgagaactttttcatcgatccattcaccggacactcatactctacccaggatgaacactttctcggcatcgagtccttgtggaaccacaaaaattattggatcaatatgcaggattgttggaactgctgcaaagacttaatctttgacctgggagatccagtgcggtgggagtatatgctcttgggtaccgataaatcccagctgtccctgacagaggaagatgactctggcattaatgatgaggacgacgtggaaaatctgggcaaagaagacgaagataaatccttcgatatgcctcacagctgggtggagcaaatcgaaatctcgcctgaggcattcgaaacaagatgcccaaacgggaagaaggttatccagtataagagagccaagctggaaaaatgggctccgtacctcaactccaatggccttgtgtctcgtctcaccacgtacgaagatttacagtgcaccaatatactcgagattaaagagtggtaccagaatagggaagatatgctggaactaaagcacatcaataaaacgacagacctcaaaacagattatttcaaacctggacaccctcaagctctgcgtgtacacagttacaaaagcatgcagcctgagatggacagagtgatcgagttctacgagaccgcgagagtggatggcttgatgaagagggaggagactcctagaaccatgacagaatactaccagggcaggccggacttcctgagttatcggcacgcaagcttcggtccaagggtgaagaagctaaccctgagctcagccgagagcaatccacgccctatcgtcaaaattaccgagagattctttcggaaccccgcaaagccggcagaggaagacgtggctgagcgggtctttctcgtcgccgaagagcgcatccaactgagataccactgccgagaagatcatatcaccgcctccaaacgggagttcctcaggagaaccgaggtcgacagtaaggggaacaagattataatgacacccgatatgtgtatatcctttgaggtggagcccatggagcacactaagaagctactttaccagtacgaagcaatgatgcatctaaaaagagaggagaaactctcgaggcaccaggtgtgggaaagcgagctggaggtattagagattcttaagctgagagaagaggaagaggccgcacacactctcactatttcaatttatgacaccaaacgtaatgagaagagcaaagaatacagggaggctatggaacggatgatgcacgaagaacatttgcggcaggtcgagactcaactggactatctggccccattcctggcacaactacctccaggggaaaaattgacatgttggcaggcagtacgcctgaaggatgaatgcctgtcagactttaaacagagactgatcaacaaggcgaacctgattcaggctcgattcgagaaggagacacaggagctccagaaaaaacagcagtggtatcaggaaaaccaggttacacttactccggaagatgaggatctttacctatcgtattgtagccaagcaatgttcagaatcaggattttggaacagaggctgaatcggcacaaggaattggcgcctctcaaatacttggctctggaggaaaagctctacaaagatccgagactcggcgagttacagaaaattttcgcatag

SEQ ID NO: 28602 - DNA, 1851 bp, synthetic construct
  source 1..1851: mol_type = other DNA; note = Synthetic coding sequence
atggatgtgatgcttgagaactattgccatctcatctccgtgggctgtcacatgacgaaacccgatgtgatcctgaagctggaacgcggtgaagagccttggacctcatttgcaggtcatacctgtctcgaggaaaattggaaagccgaggatttccttgtcaaattcaaggagcatcaggagaaatactcgaggtcggtcgtctcgatcaaccacaagaaactggtcaaggaaaagagcaagatctacgagaaaacatttaccttaggaaagaatccagtcaactcaaaaaatcttccacccgaatacgacacacacggaaggatactgaagaacgtgtctgaactaataataagcaatctgaatccggctcgcaagcgcctgtccgaatacaacggctacgggaagagcctgctgagcaccaagcaggaaaccacacaccccgaagtgaagagccacaaccagtctgctcgcgcattctcccacaatgaggtcctcatgcagtatcaaaagactgagaccccagcacagtccttcggttacaacgactgtgaaaagtcgtttctacagagaggaggccttattacccactccaggccctataagggggaaaatccgtctgtttacaacaaaaagagaagagccacgaacattgaaaaaaagcacacctgcaacgagtgtggaaaatcgttctgtaggaaatctgtgttgatactgcatcaaggaatccattccgaagagaaaccctatcaatgccaccagtgcggaaacgcattccggagaaaatcatacctgattgatcatcaacggacccacaccggcgagaagcctttcgtgtgcaacgagtgcgggaaaagctttaggctgaaaacagctctgactgaccatcagcgcactcatacaggggaaaagtcatacgagtgcctgcagtgccggaacgcgttccgcttaaagtcccacctcattcgacaccaacgcacacacactggtgagaaaccctacgagtgtaacgactgtggcaaatctttcagacaaaaaactactctgtccctgcaccaacgcatccatactggcgagaaaccctacatctgcaaagaatgtggcaagtcattccaccaaaaagcgaacctgaccgtccaccagcgcacacacaccggcgagaaaccttacatttgcaatgaatgtggaaagtccttctctcagaagacgacacttgctctgcatgagaaaactcataatgaagagaagccctacatatgcagtgagtgcgggaagtctttccggcagaagaccacattggttgcccatcagaggacacacaccggcgagaagtcctacgagtgcccgcactgtggtaaggcatttagaatgaaatcctatttgatcgaccatcatcgcacacacaccggcgaaaagccttacgagtgtaacgaatgtggtaaatcattcagccagaagaccaacctgaatttgcatcaacgcatccatacaggggaaaagccctacgtttgcaacgaatgcgggaagtcatttcggcagaaggctacccttaccgtccatcagaagattcatactggccagaagagctatgagtgcccacaatgcgggaaggccttctcccgaaaaagctacctcatccatcaccagcgaacacatactggcgaaaagccatataagtgctccgaatgcggcaagtgtttccggcaaaagaccaatctgattgtgcaccaacgaacgcacaccggcgagaagccttatgtctgcaacgagtgcggcaaatctttttcttacaagcgtaacctgatcgtgcaccagcggacccataaaggagaaaatatcgagatgcagtag

SEQ ID NO: 28603 - DNA, 441 bp, synthetic construct
  source 1..441: mol_type = other DNA; note = Synthetic coding sequence
atgtgtcacacgagctgctccagtgggtgccagcctgcatgctgcgccccaagcccctgtcaaccggcttgctgtgtaccatcatcttgtcaggccagttgttgcgtcccagtgggttgccaaagtagcgtgtgcgtaccggtttcattcaagcccgctgtgtgcctccccgtgagctgccagagctctgtgtgcgttcccatgagtttcaaatcagcagtgtgcgtccctgtgagctgccagtcctctgtgtgcgtgcctgtcagttgtcgacctattgtttgtgccgctccgagttgtcagtcgagcctctgcgtaccagtttcgtgccgccctgtcgtctatgccgcaccaagctgccagtcatcggggtgttgtcagcccagctgcacgagcgtgctctgccgcccaatatcttactccataagcagttgttgttag

SEQ ID NO: 28604 - DNA, 1257 bp, synthetic construct
  source 1..1257: mol_type = other DNA; note = Synthetic coding sequence
atgcgagagtgcatcagcatccacgttggacaggcgggagtacagatcggaaacgcctgctgggagctctattgcttggagcacgggatccaaccggatgggcaaatgccctctgacaaaaccattggcggtggggatgactcgttcaacacgttcttttccgagactggtgccggtaagcacgtcccacgcgcagtgtttgtcgatttagaaccaactgtggtggacgaagttcggaccgggacctatcgacagctcttccacccagaacaactgatcacaggcaaggaagatgccgctaataattatgcaagggggcattacactataggcaaagagatcgtggatctggtgttggacagaatccgcaagctcgccgacctatgtaccggcctccaaggcttcttgattttccacagcttcggcggaggaacagggtccggttttgcaagtctgcttatggaaaggctctcggtcgactacggaaagaagtctaagcttgaatttgctatctaccctgcaccccaggtgtcgaccgccgtggtagagccctataactccatactgacgacacacaccacgctggagcattcagactgcgcatttatggtggataatgaggctatttatgacatttgtagaagaaacctcgatattgagcgacctacctatacaaacctgaaccgattaatcggccagatcgtgagctccattacagcttcccttagatttgacggggctctaaatgtggacttaaccgaattccagaccaacttagtcccttaccctaggatccattttcccttggcaacctacgcaccagtcatctcggccgagaaagcctatcacgagcagctatctgtggccgagattacaaacgcgtgcttcgagcctgcaaatcagatggtcaaatgtgatcctcgccacggcaagtatatggcatgctgtatgctgtataggggagatgtggtccctaaggatgtgaacgctgccatcgcaacaattaaaactaagcggaccatccagtttgtggactggtgcccgacgggcttcaaagtgggaatcaattatcagccccctacagtcgtgcctggtggcgacctggcgaaggttcagagagctgtctgcatgctgagtaatacgacagccatcgccgaggcctgggccaggttagacctggcagcgctcgaaaaagattatgaggaagtgggtgtggattcggttgaggccgaggctgaagaaggagaggagtactag

SEQ ID NO: 28605 - DNA, 3351 bp, synthetic construct
  source 1..3351: mol_type = other DNA; note = Synthetic coding sequence
atgtatggttcggcgaggtcagtggggaaagttgagcccagctcccagtcaccaggcagatcccctcgactcccacggagtccgaggcttgggcacaggcggacaaattcaaccggaggttcctctggcagctcagtcggcggtgggtccgggaagacattatcaatggagaatatccagtcccttaacgcggcatacgccaccagtggccctatgtacctgtcagaccacgaaaacgtagggtccgaaacacccaaaagcaccatgacactcggacggtctggtggaagactgccctatggcgtaaggatgaccgctatgggcagtagcccaaatatcgcctcttccggcgttgcctcagataccatagcgttcggagagcatcatctcccacccgtgtctatggcgtccacggtgccccatagcctccgacaagcgagggacaacactataatggatcttcaaacgcagctgaaagaagtcctgcgcgaaaacgatctccttagaaaagacgtcgaggttaaggaatccaagctgagtagtagtatgaactcaatcaagaccttctggagccctgagctcaagaaggagcgagctctacggaaggatgaggcatccaagattaccatctggaaggagcagtaccgagtggtgcaggaagagaaccagcatatgcaaatgacaatacaggcgctccaggacgaattgcgaattcagcgcgatctgaatcagttgttccagcaggattcatctagccggactggggagccttgtgtggccgagcttaccgaggaaaactttcagcgtcttcacgccgagcacgaaagacaagctaaagagctttttttgcttaggaagacccttgaggaaatggaactgaggattgagacccagaagcagaccctcaacgcaagggacgagtctataaagaagctgctggaaatgctgcagagcaaaggactgtcagctaaagccacagaggaggatcacgagcgcactagaagacttgccgaagcggagatgcatgttcatcacctggaatctttactcgaacagaaggagaaggagaacagcatgttgagggaggagatgcacaggcgcttcgaaaacgctccagactccgctaaaacgaaggccctgcagactgtgatagagatgaaagactcaaagattagctccatggagaggggccttcgcgatctggaagaagaaatccagatgctgaagtctaacggcgcactgtctacagaggaaagggaggaggagatgaagcagatggaagtgtaccgatcacacagcaaattcatgaagaacaaagtagaacagcttaaggaggagctttcttcgaaggaagcccagtgggaagagctgaaaaagaaagcagccggactccaggcagagattggtcaggtcaagcaagaactctctcgtaaggatacagaactattagctctgcagacgaagctcgagaccctgacgaatcagttttctgattctaagcagcacatagaggtgctgaaagagagcttaacagcaaaagagcagcgggcagccatcttgcaaacagaggtcgacgcattacggctgagactggaggaaaaagagaccatgctcaacaaaaagactaagcagattcaggacatggctgaggaaaagggaacccaggcaggcgaaatccacgacttgaaagatatgcttgatgtcaaagaaaggaaagtcaacgtgctgcagaaaaagatagaaaatttgcaagaacagttgagggataaggagaagcagatgtcttcacttaaggagcgggtgaagtcactgcaggcagacacaactaataccgatacggccctcacaacgctggaggaggctctggccgaaaaagaaagaacaattgagcgccttaaggagcagcgagatcgggacgaacgcgagaagcaggaagaaatcgacaattataagaaagacctgaaggacttaaaagaaaaggtgagcctcctgcagggcgacctttccgagaaagaagcttctcttctcgatctcaaagagcatgcttcctctctagccagctcgggtctgaagaaggatagtcgccttaagaccctggaaatcgccttagaacagaagaaggaggaatgcctgaaaatggagagtcagctcaaaaaggcccacgaggctgcccttgaagcccgtgcaagccctgagatgtcagaccgcattcagcacttggagcgcgaaataactagatataaggatgaatcttctaaagcccaggctgaggttgacaggctgcttgagattttgaaggaagtggagaatgagaaaaatgacaaggataagaagatcgccgaactcgaaagacaagtgaaagaccagaacaagaaggtcgccaacctcaaacacaaggagcaggtggaaaaaaaaaagtctgcccagatgcttgaagaggcccgaagacgtgaggataacctcaatgattcctctcagcagttacaagattctctccggaagaaggatgacagaattgaggagctggaggaagcgcttagagaatctgttcagatcaccgccgaacgggaaatggtgctcgcccaggaagaaagtgccagaacaaatgctgagaaacaggtcgaagagttactgatggctatggaaaaggtcaaacaagagctggagtccatgaaagcaaaattgagcagtacacagcaaagcctggccgaaaaagaaacgcaccttactaatctccgcgctgaaaggcgcaagcatctggaggaggtgttagaaatgaagcaggaggcccttctggcagccatatctgaaaaggacgcgaatatagctcttttagagctttccagcagcaaaaaaaagactcaggaggaggtagctgcacttaaacgagaaaaagatagattagtccagcaactcaagcagcaaacccagaatcgcatgaaactgatggccgataattatgaggatgaccactttaagtcttcccactcgaaccaaaccaaccacaagccaagcccagaccagattatccagcctctcctcgagttggaccagaatcgatcaaagctcaaactttacattggtcacttgactacactgtgccacgatagggaccccctgattcttcggggacttactcccccagcctcgtataacttggacgatgatcaggccgcttgggagaacgaactgcagaagatgactaggggacaactgcaggacgaactagagaaaggtgagagggataatgccgagctgcaagagtttgctaatgccattttgcagcaaatcgctgatcattgccccgacatacttgaacaggtggtgaatgcccttgaggagagtagttag

SEQ ID NO: 28606 - DNA, 3075 bp, synthetic construct
  source 1..3075: mol_type = other DNA; note = Synthetic coding sequence
atgaattttataaaggataactccagagctctgatccaacgcatggggatgaccgtgatcaagcaaatcaccgacgatttgttcgtctggaacgttctcaatagggaagaggtgaacattatatgttgcgaaaaggttgaacaggatgccgctcggggaattatccatatgatcctgaagaagggcagcgaaagctgtaatttattcctcaaatcactgaaggagtggaactaccctctgtttcaggacctgaatggtcaatcgctgttccaccagaccagtgaaggcgacctggacgacctggcccaggacctcaaagatctttaccacaccccatcgtttttaaacttctatccactgggcgaggacattgatatcattttcaatctcaaatcaaccttcactgaacctgtgctttggagaaaagatcaacaccatcatcgggtagagcagctcactctgaatgggcttcttcaggcactgcagagcccttgtataatcgagggagagtccgggaaaggcaagtccaccctattgcaacgtatcgcgatgctgtggggcagcggcaaatgcaaagcattgactaagttcaagtttgttttctttctgcgcttgtctcgggctcaggggggattgtttgaaaccctctgcgaccagttgctggatattccaggtactatcagaaaacagactttcatggctatgctgctgaaacttagacagagagtgctcttcctcctcgacggctacaatgagtttaagccacagaactgtcccgagatcgaggcactgataaaggaaaaccatcgcttcaaaaatatggtaattgtgaccacaaccacagagtgcctgcgccacatacgacagttcggcgcactgactgccgaggtgggagacatgactgaagattcagctcaggcactgatcagagaagtccttatcaaggaactggccgagggcctcctgctccagattcagaagtcgcgttgcctacgtaacttgatgaagacccctttattcgtagttatcacctgtgccatccagatgggagagagtgagtttcatagtcacactcagacaacgctgttccacacattttatgaccttctgattcaaaagaataagcacaagcacaagggcgtagcggcaagtgatttcatcagatccctcgatcattgtggtgatctggctttagaaggcgttttcagtcataaattcgactttgaactgcaagatgtttctagcgtcaatgaagatgtgctgctcacaactggcctgctgtgtaagtatactgctcagagatttaagccgaaatataaatttttccataagtcctttcaggaatatacggcaggccgacgcctcagctctctgcttaccagccacgagcccgaggaggtcaccaagggtaatggatacctgcaaaagatggtttcaatctctgatatcacctcaacttattctagtctgctgcggtatacttgcggaagtagtgtcgaggccacacgggcagtgatgaagcatctcgccgcagtataccaacatggctgtctgctgggactctccatcgcaaaaagaccactttggagacaagagagcctacaaagcgtcaaaaacaccaccgaacaggagatactgaaggctattaatatcaactcctttgtggaatgcggaatccatctgtatcaagagtcgacctcgaagtcagctctaagtcaagagtttgaggcatttttccagggaaaatccctgtacatcaatagcggcaatatccccgattacctttttgatttctttgagcatttgccgaattgcgcgtctgccctcgatttcattaaactagatttctacggcggtgcaatggctagctgggaaaaggctgcggaggacacagggggaattcacatggaagaggcaccagagacctacatcccttcaagggcggtgtctctgttctttaactggaagcaggaattcagaactctggaagtgacactgcgcgacttctcaaaactgaataaacaagacatccgataccttggcaagatttttagctccgccaccagcttgcggcttcagattaagagatgcgctggagtggcgggtagtctttccctcgtgctgtcgacctgcaagaacatctattcattgatggtggaggctagcccgctgacgattgaagatgagcgtcacatcacaagcgtgactaaccttaagacactctccatccacgatttgcagaaccagcgcctgcctggaggactgaccgatagtcttggtaaccttaaaaatttaacgaaactaattatggataatatcaagatgaacgaagaggacgccatcaagctggctgagggcctgaagaatctaaaaaagatgtgtctgtttcatctgacccatctgtctgacatcggggaaggcatggactatatcgtcaagagtctgtcaagcgagccatgtgacctggaggagatccaactggtgagctgttgccttagcgcaaatgctgtgaagatccttgcccagaaccttcacaacctagtgaaattaagcatcttagatctgtcggagaactatttggagaaagacggaaacgaggccttgcacgaacttattgaccgaatgaacgtcctggaacagttgactgctctcatgctgccctggggatgcgatgtgcagggttctctgtcctctcttctgaaacatcttgaagaagttccccagttggtgaagttagggttgaagaactggcgattgactgatacagaaattaggatcctgggcgctttctttggcaagaatccgttgaaaaattttcagcagttaaacctcgcgggaaaccgagtttcctcagatggatggctcgccttcatgggtgtgtttgagaaccttaaacagcttgtgtttttcgacttttccaccaaggaatttctgcccgaccctgcactcgtgcgtaagctgtctcaggtgttatcaaaactcaccttcctccaggaggcacggctggtggggtggcagtttgatgatgatgatctttctgtcatcactggagccttcaagctggtgaccgcctag

SEQ ID NO: 28607 - DNA, 1065 bp, synthetic construct
  source 1..1065: mol_type = other DNA; note = Synthetic coding sequence
atggctgaaagtccaactgaggaggccgcaacagcaggtgccggtgcggctggtccaggagcaagttctgtagctggtgtagtaggggtgtcggggtcgggcggtggatttggccctccgtttttgccagacgtttgggccgctgccgcagcagccggtggcgctggagggcctggtagcggtctcgctccactgcccggacttcccccttccgctgccgcacacggcgctgctctcctgtcccattgggatcccactctgtcatccgattgggatggagagcggacagccccacagtgcctactgaggattaagcgggacattatgtcaatttacaaagagcctcctcccggaatgtttgtggtgcccgacaccgtagacatgaccaagattcatgccctgattacagggccattcgacacaccttatgagggcggattctttctgtttgtgttccggtgcccaccagactaccctatccatccccctcgagtgaaactaatgaccacagggaataatacagtcaggttcaatcctaacttttaccgaaatggcaaggtttgtcttagcattctggggacatggaccggccctgcatggtctcctgctcagtctatatcaagcgtgttgatctcaatccaatctttaatgaccgaaaatccgtatcacaatgaaccaggcttcgagcaggagcgacatcctggagactccaaaaattacaacgagtgcatcaggcacgaaaccattagggtagcagtctgtgacatgatggagggaaagtgcccttgccccgaacctttacgaggcgtcatggaaaagtctttcttggagtactatgatttctacgaggtggcctgtaaggataggcttcatctgcaagggcagaccatgcaggatcccttcggggagaaaagggggcacttcgactaccagtctttgttgatgcggctgggtttgatccgacagaaagtgctggagcgtctgcataatgagaatgctgagatggactctgacagctcctctagtgggacagaaaccgaccttcatggaagcctgagggtatag

SEQ ID NO: 28608 - DNA, 2487 bp, synthetic construct
  source 1..2487: mol_type = other DNA; note = Synthetic coding sequence
atggatagtgaagcatttcaaagcgctcgcgactttctggatatgaacttccagtccttggcaatgaagcatatggatttgaaacagatggagctcgataccgctgccgctaaggtggacgaactgaccaaacagctggaatctctctggagcgattcacccgcacctccaggccctcaggccggacccccaagcagaccccctcgctattccagctcttccatcccagagccctttggttctcggggaagtcccagaaaagcagctactgacggggctgatactccattcggtagatccgaaagcgcacctacattgcatccttatagcccacttagtcctaaagggcgtccatccagcccccgaacacccctgtatctgcaacctgatgcctacggcagcctggaccgagctacatcaccacgtcccagggccttcgatggagcgggtagcagtctcgggagggcgccaagcccacgcccaggccctgggccattaaggcagcagggcccaccgactcccttcgactttttaggccgtgcaggctcaccacgtggcagtcctcttgccgaggggcctcaagctttctttcctgaacgtggccctagtccgaggcctccagcaaccgcctacgatgccccagccagtgcatttggcagctcattgctgggctcagggggaagtgcgttcgcccctcctcttcgtgcccaagacgatcttaccctgcggcgaaggcctcctaaggcctggaatgagtccgatctcgatgtggcatacgagaagaagccctctcagacagcctcctacgagagactggacgtctttgcccgacccgcaagtccttctctccagctgttgccctggagggagagtagtctggatgggcttgggggaacaggtaaggacaacctgacctctgccactcttcctagaaattacaaagtgagcccactggcatctgacaggcggtctgacgcaggcagttataggaggtccctgggcagtgccggtccgagcggaaccctcccacgcagttggcaacctgtatctcgaattcccatgcccccatcatccccccagccacggggtgcaccgagacagcgacccatacctctgtcgatgatcttcaagctacagaatgcattttgggaacatggggcaagccgcgctatgcttccaggcagccctctgtttactcgcgcacctccgccaaagctgcaaccgcaaccacagccacagccacagccacagtctcagcctcagccacagctaccccctcaacctcagacccagccccagacaccgaccccagctccccagcaccctcagcagacttggcccccagtgaacgaaggccctcccaaacccccaaccgagctcgagcccgagcccgaaatcgaaggcctactgacccccgttttggaggcgggagacgtggacgagggcccagtagcgaggccgttgtcacccacccggcttcagcctgcgctgccacccgaggctcagtcagttccagagctcgaggaagtggctagagttctcgcggaaatacccagacccttaaaaagacgaggtagtatggaacaggctcctgctgtagcgcttcctcctacacataagaagcagtaccagcaaattatcagtcggctgtttcatcgccacggcggtccagggcctggagggccagagcctgaactttcccctataaccgagggcagcgaggctcgcgctggacctccagccccagcccctcccgctccgatacctcccccagctcccagccaatcaagtccacccgaacagccgcagtcgatggagatgagaagcgtgctgcgcaaagccggatcccccaggaaggctcgccgagctcgtctgaaccctcttgtcctccttctcgatgccgctctcacgggcgaactggaagtagtgcagcaagctgtcaaggaaatgaatgacccctctcagcctaacgaagaggggatcaccgctctccacaatgcgatatgtggagctaattacagcatcgtggacttcctaattactgcaggtgctaatgttaactctcctgatagtcacggatggacaccccttcattgcgctgcatcttgcaatgacacagttatctgcatggccctagttcagcacggagcggctatattcgcgacgacgctgagcgacggagcaacggcattcgaaaaatgtgatccctatagggaaggatatgcggattgcgcgacctacctggcagatgtggaacaaagtatgggcctgatgaacagtggcgctgtttatgccctctgggactattccgcggagtttggggacgaattgtcttttcgcgagggcgaaagcgtcacagttttgcggcgagacggcccagaggagactgattggtggtgggccgcactccacggccaggaggggtatgttcccaggaattatttcggtctattcccaagagtcaaacctcaacgatctaaggtatag

SEQ ID NO: 28609 - DNA, 1131 bp, synthetic construct
  source 1..1131: mol_type = other DNA; note = Synthetic coding sequence
atggttgtggaggtagattcaatgcccgcagcctcatccgtgaaaaaacccttcggccttaggtccaaaatggggaagtggtgctgtcgctgcttcccgtgttgcagagaatccgggaagtcaaacgtcggcacgtccggtgatcacgatgattccgccatgaaaacgttgagatcaaagatggggaaatggtgccggcattgctttccctgctgtcgtggctccggtaaaagcaatgttggcgcttcaggtgatcacgacgatagcgcgatgaaaaccttgcgcaataaaatgggcaaatggtgctgtcattgcttcccttgctgccggggatcctctaaaagtaaggtgggagcatggggtgactacgatgatagcgcattcatggaaccccgatatcacgtgcgcggtgaagatctggataagcttcatcgggctgcatggtggggaaaagtgccacgcaaggacctgatagttatgctgagggacaccgacgtcaacaagcaggacaagcaaaagcgcacggctttgcatctggcttcagcgaacggcaacagcgaggtcgtgaagctactgttagaccgtaggtgccagcttaatgtcctagataacaagaagagaacggcactcatcaaagcagttcagtgccaagaagatgagtgtgcattaatgcttttggagcacggcactgatccaaatatccccgatgaatatggaaacaccaccctccattatgcgatatacaacgaagataagctgatggcgaaggccttgctgctctatggtgccgatatagagtcaaaaaataagcatgggttgacgccgttgctcttgggggtgcatgagcagaagcaacaggtggtgaaattcctaattaaaaagaaagcaaatctgaacgcgttagatcggtacgggaggactgcactgatcttggctgtgtgctgtggtagtgcttctatcgtctcattgttgctagaacagaacatcgatgtctccagtcaggacctctccggtcagactgccagagagtacgccgtgtcctcgcaccatcatgtcatctgccagttgctttccgattacaaagaaaagcagatgctgaagatctcgtccgaaaattctaatccaggatag

SEQ ID NO: 28610 - DNA, 765 bp, synthetic construct
  source 1..765: mol_type = other DNA; note = Synthetic coding sequence
atgcccgcttcatttcccatgctcaggtgtgccaggtccccctgctggacagtctgttggtctccttggtgtagagcactgcccgacggtagatgttcctgcctgtcctcacccccaagccctttggggccaacgcgagatccagtcgccacgtttctggaaacgtgcagagaaccaggctcccaacccgcagggcctgcaagtctacgcgctgagtacctcccaccgagcgtagcttcgattaaagtatctgccgaacttctccgtgccgctctcaaggatgggcactctggcgtccccctgtgctgtgcaactcttcaatggttattggccgaaaacgctgccgttgacgtggtgagagccagagccctgagcagtattcagggtgttgcccctgacggtgctaacgtccatttaatcgtaagagaggtcgccatgaccgatctctgcccggctggccctatccaagcagttgagatacaggtcgaatcgtcttccctggcggacatctgccgcgctcatcacgccgtcgtgggcagaatgcagacaatggtaactgagcaagctacgcagggatcaagcgcccctgatttacgggtccaatatctcagacagatccatgctaaccacgaaacactactgcgcgaggtgcagacgttgagggatagactctgtacagaagacgaagcatccagctgcgcaaccgcacagaggctcttacaggtctaccggcagctgagacacccatcactgatcctactctag

SEQ ID NO: 28611 - DNA, 2046 bp, synthetic construct
  source 1..2046: mol_type = other DNA; note = Synthetic coding sequence
atgtgcggaatctttgcctacttaaactaccacgtcccgcgaacccgcagagagatactggaaacccttataaaaggcctacagcggttagaatatagagggtacgattccgcgggagtaggatttgacggaggcaacgataaggactgggaggcaaacgcatgcaagattcaactcatcaagaaaaagggcaaagtcaaggcactcgatgaggaagtgcacaaacagcaagacatggatctggacatcgaatttgacgtgcacctaggcatcgcacatactcgctgggctactcacggagaacccagccctgtgaatagtcacccccagcgttctgacaagaacaacgaatttatcgtgatccacaacgggatcattacaaattacaaggacctgaagaaatttctcgagagcaaaggatatgactttgaaagcgaaacagacacagaaactattgcaaagctcgttaaatatatgtatgataacagggaaagccaggatacatctttcacaactctggtggagagggtcatccagcagttggagggcgcattcgctctcgtgttcaaaagtgtgcatttccctggccaggctgttggcactcggcgtggttcgccattgctcatcggcgtgaggagtgagcacaagctgtctacagaccacatcccaatcctttatcgcacggggaaagataaaaagggctcatgcaacttatccagagtagatagcacaacttgcctgtttcctgtcgaagagaaagcggtggagtactattttgcttctgatgcctctgccgtgatcgagcacaccaaccgggttattttcctcgaggatgacgacgtggcagctgtcgtggacggtcgactgtctattcatagaataaaacgcaccgcgggtgaccatccaggcagagccgtgcagaccctgcagatggagctgcagcagattatgaaaggtaacttctcaagcttcatgcagaaagagattttcgagcagcctgaatccgtggtgaataccatgaggggcagagtgaactttgatgattatacagtcaatctcgggggactgaaagaccacattaaggagattcaacggtgtcgacgcctgatcctgatagcatgtggcacgtcatatcacgctggagtggccaccaggcaggtgctggaagagctaaccgagctcccagtaatggtggagctcgcttccgactttctcgacagaaacacgccagtgtttagagacgatgtgtgtttttttcttagccagtcgggcgaaaccgcagacaccctgatggggttacgctactgcaaggagcgcggagccctgacggtgggtataactaatacggtcggatccagtatcagcagagagactgactgcggggttcatataaatgccggacccgagattggggtcgcgtctactaaggcctacacatctcaatttgttagcctcgttatgtttgcactgatgatgtgcgatgatcgaatcagcatgcaggaacgcagaaaagaaatcatgctcggactcaagcgcctcccagacctgattaaagaagtgctctccatggacgacgagattcagaagctggccactgagctctatcatcaaaaaagcgttctgatcatgggacgcggttaccattatgccacttgccttgagggagctctgaagattaaggaaattacttacatgcatagtgagggcatcttggcaggtgaattaaaacacggccctctggctctggttgacaagttgatgccagtcattatgatcattatgcgggatcatacttatgccaagtgtcagaacgccctgcagcaggtagtcgctcggcagggaaggcctgtggtcatttgtgataaggaagacacagagacgatcaagaataccaaacggactatcaaagttcctcacagcgtagactgccttcaggggatcctcagcgtcatccctctgcaactccttgcgtttcatctggcagtgctcaggggatacgatgtagatttcccacgcaatctggccaaatccgtcacagtcgagtag

SEQ ID NO: 28612 - DNA, 498 bp, synthetic construct
  source 1..498: mol_type = other DNA; note = Synthetic coding sequence
atggaggatctcttcgaaactttccaagacgaaatggggttctccaatatggaggacgacggcccagaagaagaagagagagtggcagaacctcaagcaaacttcaacaccccacaggcactgcgtttcgaagagttgttagcaaatctgcttaacgagcagcatcagattgcgaaagagctgtttgagcaactcaagatgaagaagccgagcgccaaacagcagaaggaagtcgaaaaggtcaaaccacagtgcaaggaggtgcaccagactttgatactagaccccgctcagagaaagagactgcagcaacaaatgcagcagcatgtacagctgctcacccagatccatctcctcgccacgtgtaacccaaatttgaatcctgaggccagcagtacgcgaatatgcctgtcatgggaaccactcctcaaagcacccagtccttttacaatcagtactacaccctctttccgcccatgcagtaaccccgtgacatag

SEQ ID NO: 28613 - DNA, 633 bp, synthetic construct
  source 1..633: mol_type = other DNA; note = Synthetic coding sequence
atggctgctagcgtcgagcaaagggaaggtacaattcaggttcaggggcaggccctgtttttcagggaagcactgccaggatctgggcaggctaggttcagcgtactgttactccacggcattaggtttagtagtgagacatggcaaaatctcgggaccttacaccgcctcgcacaggccggttaccgcgcagtggcaattgatctccctgggctgggacacagcaaggaggccgctgcaccagcccctatcggcgagctggcacccggaagcttcctggccgctgtggtggacgccttggagcttggcccacctgttgtaattagtccatctttatccggaatgtatagtcttccatttcttacggctcccggaagccagctgccgggattcgttcccgtggcccctatatgtacagacaaaataaacgcagctaattacgcttcagttaagacacctgcgcttatagtttacggcgatcaggatcctatggggcagacttctttcgagcacctgaaacagctgcctaatcatcgggtgttgatcatgaaaggagcgggacacccatgctatcttgataaacccgaggagtggcatactggactgctggacttcctgcagggcctccagtag

SEQ ID NO: 28614 - DNA, 1248 bp, synthetic construct
  source 1..1248: mol_type = other DNA; note = Synthetic coding sequence
atgcgcgcagcagactctggatcttgggagcgagtgcgacagctcgctgctcagggcgagccggctccatcttgcggagccggagccggacctgccagacctcccggtccagctgcttgtgaacaatgtgttgatgcagccggtcctggggatagacccagagccggtgttccccgagtcagggccgatggagattgcagccagcctgtactacttagagaagaggtgtcaagattacaggaagaagtgcatttgctgcggcagatgaaagagatgctagccaaagacctggaggaaagtcagggtggcaaatcctcagaagttctgagtgctacagagctccgagtgcagctggctcagaaagaacaggaactagctcgcgcaaaagaagcactgcaagccatgaaggccgataggaaacggctgaagggtgagaagaccgacctggtgtcacaaatgcagcaactatatgcgaccctggagtcacgggaggagcagctcagggacttcattcgtaactatgagcagcacaggaaggaaagtgaagatgctgtgaaggcgttagcaaaggaaaaggacctgttggaaagggagaagtgggaactccgacgtcaggccaaggaggctaccgaccatgctactgcactgcggtcacagctcgacctcaaggacaatcgcatgaaggaattagaagcagaactagctatggccaagcagtctctggccactcttacgaaagatgtgcctaaaaggcattccctggctatgcccggagaaaccgtcctgaacggtaaccaggagtgggtagtgcaggcggatcttccactgaccgcagccatccgccaaagccaacaaacgttataccacagtcaccccccacacccagcggaccgccaggccgtgagggtgtctccttgccattcaaggcagccttcagttatctccgacgcgtcagcagccgagggcgacagatctagcaccccatccgacatcaattcacctaggcatcgaactcactcactgtgtaacggggactccccgggtcctgtccagaaaaacctgcataatcctatcgttcagagtctggaggatcttgaggaccagaagcggaagaaaaaaaaagaaaagatgggctttggctcaatttccagagtgtttgctagaggcaaacagaggaagtctctggatccaggcctcttcgatggaacagccccagattactacattgaggaggacgcagattggtag

SEQ ID NO: 28615 - DNA, 693 bp, synthetic construct
  source 1..693: mol_type = other DNA; note = Synthetic coding sequence
atggaggccgctgagaccgaggccgaagctgctgccctggaggtgctggccgaggtcgccggtattctggagcccgtggggctccaggaagaggcagagctgcccgcaaagattttagttgaatttgttgtggatagtcaaaagaaggacaagctgttatgctcccaacttcaggttgcggattttctacagaatatacttgcccaggaagacaccgccaaggggctggacccacttgcatctgaagacaccagtcgccaaaaggcaattgctgctaaagaacaatggaaagagctgaaggcaacataccgcgagcacgtggaagcaatcaagatcgggctgactaaggcattgacccagatggaggaggcccagagaaaacggacacagctccgtgaggcatttgagcagctgcaagctaagaaacagatggctatggagaaacggcgtgcagtacagaatcagtggcaactacagcaagagaaacatctgcaacatctggcagaagtgagcgcagagggtaagctgctattcccagaagccgaagctgaggccgagaatttgcctgacgacaagccgcagcagcccacaaggccacaggaacagagcacaggggacaccatgggccgagatccaggcgtttcattcaaagctgtcggtctccagccagctggcgacgttaacctgccctag

SEQ ID NO: 28616 - DNA, 2547 bp, synthetic construct
  source 1..2547: mol_type = other DNA; note = Synthetic coding sequence
atgcaggctgaggcagcggattggtttagctctatgccgttccagaaacatgtgtactatcctttggccagtggaccggaaggaccagacgtcgcagttgcagccgctgccgctggtgccgctagtatggcctgcgctccaccaagcgccgctagtggccctctgccatttttccaattccgtcctcgcctcgaatcggtggactggcgcagattgagtgccatagacgtggacaaagtcgccggtgcagtggacgtactcactctccaagaaaacataatgaacatcaccttttgtaagctggaagatgaaaaatgtcctcattgccagtccggggtcgaccccgtcttactcaagcttatccggcttgcacaatttactatcgagtaccttcttcattcacaagaattcctgacgtcccagctccataccctggaggagcgcctgcggcttagccactgtgatggtgagcagtcaaagaaactccttactaagcaggccggtgagattaaaacgcttaaagaggagtgtaaacgacggaaaaagatgatctctacccagcagctgatgattgaggccaaagcaaattactaccaatgccacttctgtgacaaggcgttcatgaatcaggcctttctgcagagccacatccagagacgccatactgaggagaattcccatttcgagtaccagaagaatgctcagatcgagaaactgaggtctgagatcgtcgttctgaaggaagagctgcaactcacccggtccgaactcgaggcggctcaccacgcttccgccgttcgcttctccaaggagtatgagatgcagaaaaccaaggaagaggactttctcaaactctttgaccggtggaaggaggaagaaaaggagaaactggtggatgagatggagaaagttaaagagatgtttatgaaggaatttaaagagttaacatcaaaaaatagcgccctcgagtatcagctgtcagaaattcagaagtctaatatgcagatcaaaagtaacatcggcaccctcaaggatgcacacgaatttaaagaggataggtctccttaccctcaagatttccataatgttatgcagctgctggattcacaagagagcaaatggacagcccgagtccaggcaattcatcaagaacacaaaaaggaaaaagggagattgctgtcccatatcgaaaaactgcgcacatctatgatcgatgatctgaacgcctctaatgtgttctacaaaaagcgtatcgaggaactgggacagagactgcaggagcagaatgagctgatcatcacacaaagacaacagattaaagactttacatgcaaccctctgaattctataagtgaaccgaaggtcaacgcacccgctttgcacactctggaaactaagtcttcactgccaatggtgcatgagcaggcattctcatcacatatactggagcccattgaagagttgagcgaagaagagaaggggagagagaatgagcagaaattaaataacaataaaatgcatctccgaaaagcactgaagtccaattcctctcttactaaggggctccggaccatggttgagcagaaccttatggagaagctcgaaacattggggatcaacgctgatatccgaggtatttcctccgaccagctgcacagggtgctgaagtctgttgaatcggaaagacataagcaagagagagaaatccctaactttcatcagatccgggagttcctcgagcatcaggtatcttgtaagatcgaagagaaggcactgctctcgagcgatcaatgctccgtgtctcaaatggataccctttcaactggggaagtgccgaagatgatccagctcccctcgaaaaaccgacagttgatcaggcagaaggctgtgtcaaccgataggacgtccgtgcctaagattaaaaaaaatgtgatggaggacccctttcccaggaaatcttccactataacaactccaccctttagtagtgaggaggaacaggaagacgatgacctgatccgagcctacgcctcccccggtcccttgcctgtgcctcctccgcaaaacaaaggctcctttggtaagaacaccgtgaagtccgacgctgacggtacagagggctctgaaattgaagataccgacgatagtcctaaaccagcaggcgtcgcagtcaagacccccacggagaaagtcgagaaaatgtttcctcatcgcaagaatgtgaataagcctgtgggaggcaccaatgtacctgagatgttcatcaaaaaagaggagctgcaggaattgaagtgtgctgacgttgaagatgaggattgggacatttctagcctagaggaagagatctccctcgggaagaagtcaggtaaagagcagaaagagccgcctccggcaaagaacgaaccacatttcgcacatgtattgaatgcctggggagcattcaaccccaagggacccaaaggagaaggtctccaggaaaatgagtcatcaaccttgaagtcatctttggtgactgtgacagactggagcgatacgtctgacgtttag

SEQ ID NO: 28617 - DNA, 1185 bp, synthetic construct
  source 1..1185: mol_type = other DNA; note = Synthetic coding sequence
atggttgtggaggtcgattcaatgcctgctgccagttcagtcaagaaacctttcggtctgcggtccaagatgggcaaatggtgctgccggtgcttcccctgctgtagagagagcggaaagtctaatgttgggacctccggcgatcacgacgattccgctatgaagacactgcgatccaagatggggaagtggtgccggcactgcttcccttgctgtcgaggtagtggaaaatcgaacgtcggtgcctccggagaccacgacgattctgccatgaagactctccgaaacaaaatgggcaaatggtgttgtcattgttttccctgctgtagggggagcagtaaatccaaagtaggcgcatggggggactatgacgattctgccttcatggaacccaggtaccacgttcgcggtgaggatctggacaagctacatcgtgccgcttggtggggaaaagtcccccgtaaggatctgatcgtgatgctgcgtgataccgacgtcaataaacaagacaagcagaaaagaaccgccctccatctggccagcgctaatggtaactcggaagtggtcaaactccttctcgatcggaggtgccagctgaatgtcctggataataaaaagcgcaccgctctgatcaaggtgtgcagctcccagctgtaccaacatgaggccgtgcagtgtcaggaggacgagtgcgcccttatgctgctcgaacacgggacagaccccaatattcccgacgagtatggcaatactaccctgcactacgccatctataacgaagacaagctgatggccaaggctttgctattgtacggtgcagatattgaatccaagaacaaacatgggctgacccccctgcttctcggtgtacatgagcagaagcaacaggtggtgaaattcctcatcaagaaaaaagccaacttgaatgccctggacaggtacggcagaactgccttaattttggcagtgtgttgtgggagcgcgtctatcgtgtccctgctactggagcagaatatcgacgtgtcttcccaggatctgtcaggacagacagcgagagagtacgccgtcagttcccatcaccacgtcatctgtcaactcttgagcgactacaaggagaaacaaatgctgaaaatttcctctgagaattctaaccccgagaatgtcagccgcactcggaataagtag

SEQ ID NO: 28618 - DNA, 1308 bp, synthetic construct
  source 1..1308: mol_type = other DNA; note = Synthetic coding sequence
atggctccttttggccgtaacttgctcaaaacgaggcataaaaatcggagtcctacgaaagacatggattctgaggaaaaggagatcgtggtatgggtatgtcaggaggagaagttggtgtgcgggctgactaaacggactacttcagcagatgttattcaagctctccttgaggagcatgaagcaaccttcggcgagaagcggttcctcctcgggaagcccagcgattattgcataatcgagaaatggcgaggtagtgaacgcgtcctgccccctttaaccaggattttgaagctatggaaagcctggggagacgaacagccgaatatgcagttcgtattagtgaaagccgatgctttcctgcccgtgcccctgtggagaactgcagaagccaagctcgtacagaacacagagaagctttgggagttgagccctgccaattatatgaaaaccctgcctcctgacaagcagaaacggatcgtgcgtaagactttcagaaaactcgcaaaaattaagcaagatacggtctcccatgacagagataacatggagacactggtgcatttgatcataagccaggatcatacgattcaccaacaggtgaaacggatgaaggagctggatctggagatcgagaaatgcgaggctaaatttcacctggatagagtagaaaatgacggggaaaactatgtacaggacgcttatcttatgccttcctttagcgaggtggagcagaacctcgatctgcagtacgaagagaatcagacactcgaagacctttcagaaagcgatgggatcgaacagctggaagagagactgaaatactacagaatcctcatcgacaagctttccgctgaaattgaaaaagaagtgaaatcagtgtgtatcgacatcaatgaggacgccgagggagaagcagcttctgagttggaatccagtaacctcgagtctgtgaaatgcgatctggaaaagtctatgaaagcaggcctgaaaattcacagtcatctcagtgggatccagaaggagataaaatatagcgattcactgctccagatgaaggcaaaagagtatgagcttctcgccaaagaattcaattcgctgcacatcagcaataaggacggttgtcagctgaaagaaaacagagcgaaagagagtgaggtcccatcatcaaatggcgaaatccccccatttacacagcgggtattctctaactataccaacgacactgattcagatacaggaatcagctcaaaccactctcaggactccgagacgaccgtcggagatgtcgtgctgttaagcacatag

SEQ ID NO: 28619 - DNA, 1644 bp, synthetic construct
  source 1..1644: mol_type = other DNA; note = Synthetic coding sequence
atggccggaactaagaataaaacacgcgcacaggcaaagactgaaaaaaaggctgctatacaggctaaagctggcgcagagagggaagccaccggagtggtacggcctgtcgcaaaaacccgcgctaaggctaaggctaaaacaggctccaaaaccgatgccgttgccgaaatgaaggccgtttcaaagaataaggtggttgcggaaacaaaggaaggagccttgagcgagcctaaaacacttggtaaggctatgggcgatttcacgcccaaggccggaaatgagagcaccagttccacttgcaagaatgaggcgggaacagacgcatggttttgggctggagaggaggccaccataaattcctggttttggaatggagaggaggccggtaatagtttctccacgaagaacgataaaccagaaatcggggctcaggtgtgtgctgaggagttggagccagccgctggcgctgactgcaagcctcggtccggcgcagaggaagaggaggaggagaatgtgatagggaactggttttgggaaggggacgatacctccttcgaccctaaccccaagccagtttccaggattgtgaagccacagcccgtttacgagatcaacgaaaagaaccgccctaaggattggtctgaggttactatatggccgaatgccccagccgtgacccccgctgtactgggattccgcagccaggcgccatccgaggccagccccccatcctatattgtcctagcctccgccgaagaaaacgcctgttctcttcctgttgcaacggcttgccgcccttccagaaatacgcggagttgcagtcagcctatccctgaatgccgattcgattcagacccctgtatccaaactatcgatgagatacgtcggcaaattcgaatccgcgaagtgaacggtatcaagcccttcgcctgtccctgcaagatggagtgttacatggattccgaggagttcgaaaaactcgtgtctttattaaagtcaactactgatccactgattcataagatcgcaaggatcgccatgggagttcataacgttcatccgttcgctcaggaattcattaatgaagtaggagtggtcactctgattgaaagtttgctttcctttccaagtcctgagatgaggaagaagacggtgatcaccttgaacccaccctcgggggatgaacgccagcgtaaaatagaattacacgtaaaacatatgtgtaaggagaccatgagcttccctctgaactccccaggtcagcagtcaggactcaagattttagggcagctgactaccgacttcgtgcatcattatatcgtagccaactacttctctgaattattccatttgctctcatctggcaactgtaagactcggaacctagtactcaagctcttactcaacatgagtgaaaaccccactgcagcccgtgacatgatcaacatgaaggcactcgccgcactgaagcttatctttaaccaaaaggaagcaaaggccaatctggtcagcggagttgccatttttatcaacatcaaggagcatattcggaagggctctatcgtggtggtggaccatttgtcctataacacactgatggcaattttcagagaagtgaaggagattattgaaacaatgtag

SEQ ID NO: 28620 - DNA, 1362 bp, synthetic construct
  source 1..1362: mol_type = other DNA; note = Synthetic coding sequence
atggccaggaaagttgtgagtaggaaacgtaaggcaccagcatcccctggcgcaggatctgacgcccagggcccacaattcggctgggaccatagcctccataagaggaagcgtctacctccggttaaaaggtcccttgtgtattacctgaagaacagggaggtccgcctgcaaaatgaaacgtcatattcccgcgtgctgcacggctacgcagcccagcagttgccttctcttttgaaagagagggaattccacttgggcaccctcaacaaggtgtttgcttcgcagtggttaaaccacaggcaggtagtatgtggcaccaagtgtaacaccctttttgtggtggacgtgcaaacatcgcagataacgaagattccaatcctgaaagatcgagagcccggaggcgttacacagcagggatgcgggatccacgcaattgagctgaacccaagccggaccttgctggcaacaggcggtgataatcccaacagcctggctatctatcgacttcccactctggatcctgtgtgcgtgggggatgacggacacaaggattggatcttcagcatcgcttggattagtgacaccatggctgtctccggctctagagacggaagcatgggcctctgggaggttacagatgatgtcctcactaaatctgatgctcggcacaacgtgagccgggtgccggtgtacgcccacattactcacaaagctctcaaggacattccgaaagaagatacgaaccctgacaattgtaaggtgcgtgccctcgctttcaacaataagaacaaagagctcggagccgtgagcctggacggatacttccacctgtggaaggctgagaacacattgtcaaaactgctctccacaaagctgccttactgcagagagaatgtgtgtctcgcctacggcagcgaatggtccgtgtacgcagtcggttcccaggcccatgtcagcttcctggacccacggcagccctcgtacaacgtaaagtctgtctgctcccgagaacggggtagcgggatcaggtcggtgagcttctacgagcacattattacagtaggaacgggccagggatccctgctgttttacgatatccgagcccagcgattccttgaggaaagattgtctgcctgttacggctccaagccacgtctggccggtgaaaatttaaagctgaccacggggaaggggtggctaaatcatgatgagacttggcgcaattacttctccgacatcgactttttcccaaatgcggtttatactcattgttatgatagctctggaactaagctttttgtcgccggaggcccattgccgtccgggctgcacggaaattatgctgggctatggtcctag

SEQ ID NO: 28621 - DNA, 2439 bp, synthetic construct
  source 1..2439: mol_type = other DNA; note = Synthetic coding sequence
atggaagccttccaggaacttagaaagccaagtgccagactggagtgtgatcattgctcattcagaggcactgattatgagaacgtccaaattcacatgggaaccatccatccagaattctgcgatgaaatggatgcaggaggcctggggaaaatgattttctaccagaaaagcgcgaaactcttccattgccataagtgtttttttacatcgaaaatgtattccaacgtctattaccacatcaccagtaaacacgccagcccggataagtggaacgataagcccaagaaccagcttaacaaggagacagatccagtcaagagcccccctctgcctgaacatcagaagatcccttgcaactctgccgagcctaaatcaattcctgcactgtccatggaaacgcaaaaactgggctccgtcctgagcccggaaagccccaagcccactccactgaccccccttgagccccaaaaacctgggtccgtcgtgtcacccgagctacagaccccgcttcccagccccgagcctagcaaacccgcttcagtgtctagccctgagcctcctaagtctgtgcctgtctgcgagtcacagaagcttgcacccgtaccatctccggaaccccagaagcccgcaccagttagtcctgaaagcgtcaaggctacactaagtaaccctaagccacagaagcaatcccactttcccgagaccctgggccctccgagcgcctcctctccagagtctccggtgctcgctgcatccccagagccttggggacctagccccgctgcaagcccagagtccaggaaaagtgcccgtacaaccagcccggagccaaggaaaccttcacccagtgaatctcctgagccttggaagcccttccccgcagtgagcccagaaccacgcaggccagcacctgccgtgtcccctggtagctggaagcctggccctcctggctcacccaggccttggaagtccaacccttcagcaagctcgggaccttggaagccagccaaacctgccccatccgtctctccgggaccttggaagcccattcctagcgtctcacccggtccctggaagccaaccccctctgtctcctcagcgtcctggaaatcttctagcgtcagtccttcctcgtggaaatcacccccagcctcacccgagtcctggaagtctggacctcccgaattacgcaagactgcacctactctgtcacctgaacactggaaagccgtgccccctgttagccctgaactgcgtaagcctggacctcccctttcacctgagatcagatcacccgctgggtcacctgagctgagaaagccaagtggatctcctgatctgtggaagctgagtcctgaccagcgcaagacgagcccggcatccctagactttcctgagagccaaaagagctcaagaggtggctcaccggatctgtggaagagttccttttttatcgagccgcagaagccagtatttcccgaaactcgtaagcctggtccaagcggcccatcggaatccccgaaggctgccagcgacatatggaagcccgtgctcagtatagatactgagccaaggaagcccgctttgtttcccgagccagcgaaaactgcacccccagcaagccctgaagctcggaagagagcactcttcccagaacctcgaaagcacgccctgtttcccgagctgcctaaatccgctctttttagtgagagtcagaaggccgtggagttaggggatgaactgcagatagacgctattgacgaccagaaatgcgacatcttggtccaagaggagctgcttgccagtccgaaaaaactgctcgaagacaccctctttccatcaagcaagaagctgaaaaaggacaaccaagaatcatccgacgcagagctgtcctcttcagagtacatcaagactgacctcgatgcaatggacatcaagggccaggagtcctccagtgatcaggagcaagtggatgtcgaatccatagatttctcaaaggaaaataagatggacatgacgagtcccgagcagtcgcgaaatgtattgcagttcactgaagagaaggaggcatttatcagcgaagaggagatcgccaaatatatgaagaggggaaaaggcaaatactactgtaagatatgctgctgccgcgctatgaaaaaaggagccgtgctgcatcacctcgtgaacaagcacaacgtacactctccttacaagtgcaccatttgcgggaaagcctttcttctagaaagcctcctgaagaatcacgtagccgctcacggacagagcttgctgaagtgccctaggtgcaatttcgaaagcaatttccccagaggattcaaaaaacaccttacgcattgccagagccggcataacgaagaggcgaataagaaactcatggaagcacttgaacccccattagaagaacagcaaatttag

SEQ ID NO: 28622 - DNA, 1974 bp, synthetic construct
  source 1..1974: mol_type = other DNA; note = Synthetic coding sequence
atggatgaacaggaagctctcaactcaatcatgaatgacctggtggccctacagatgaatcggaggcaccgcatgcccggatacgaaactatgaagaataaagacacaggacattcaaaccgccagaagaagcataatagtagctcatctgctctgctgaatagcccaaccgtcacaacttcatcttgtgctggcgctagcgagaagaaaaaatttctgagtgatgtccgaatcaagttcgaacacaacggcgagcggaggatcattgccttcagtaggcctgtgaaatacgaggacgtggaacataaggtaacaacagttttcggacaacctcttgatctgcattacatgaacaatgagctgtccatcctgttgaaaaaccaagacgatttagacaaggctatagatatcctcgaccgatcatcctcaatgaaatccctgcggattctgctgctctctcaggacaggaatcataattcttcttcaccccattctggtgtcagcaggcaggtcaggattaaggcatcccaaagtgccggtgacatcaataccatctaccagcccccagaacccagatcacgacacctaagcgtctcctcccagaaccccggtcgaagttctcctccgccaggttacgttccagagagacaacagcacattgcgaggcaagggagctacacctcgataaactcagagggggagtttatacctgagacctcggagcagtgtatgctggacccattgagctctgcagaaaattcactctccggttcttgtcagtcactggacaggtccgcggatagtcctagcttccgcaaatcacgcatgtcacgcgctcagtcctttccagacaaccgccaggaatattccgatcgagaaacccagctctacgataagggagtgaaagggggaacctacccacgtcgataccatgtgtctgtgcaccacaaagactactcagacggccgtcgcacgttcccaagaattcgacggcaccagggaaacctctttacactggtgccctcatcaagaagcctgagtactaatggagagaatatgggacttgccgtccagtaccttgatcccagagggaggcttcgctcggccgatagcgagaacgccctttctgtacaggagcgaaatgtacctaccaagagtccctccgcgcctattaactggaggcggggaaagcttctaggccagggcgcttttggcagagtgtacctctgctatgacgtggacacaggtagggaactcgcctccaagcaggtacaattcgaccctgattcccccgaaacatctaaagaggtgtctgctctggagtgtgaaattcagctgctgaaaaatttgcagcacgaacgtatcgtccaatattacggctgtctgcgggatagggctgagaaaactttgactatttttatggagtacatgcctggaggctcagtgaaagatcagcttaaagcctacggagcactgaccgaatcagttactcgtaagtacacccgccagatactggagggaatgagttatctgcactcaaacatgatagtgcaccgcgacataaagggggctaatatactccgggactctgccggaaacgtcaagctcggcgatttcggagctagcaaaagactccaaactatctgtatgtccggcaccggcatgagaagcgtcaccggaacgccctattggatgtccccagaagtgatctctggggagggctacggtcggaaagcggacgtctggagcctaggatgcaccgtagtggagatgttaacggaaaagccgccatgggctgagtatgaggccatggccgctattttcaaaatagcgacccagccaaccaaccctcagctgccctcgcacatcagcgagcacggcagagacttcctgagacggatattcgtggaggcaagacagcggcctagtgccgaggagcttctgactcaccatttcgcccagttgatgtattag

SEQ ID NO: 28623 - DNA, 2547 bp, synthetic construct
  source 1..2547: mol_type = other DNA; note = Synthetic coding sequence
atgcaagccgaagctgcagattggtttagctccatgccttttcaaaaacatgtttactaccctttggcctccggaccagagggaccagacgtggctgtggcagcagctgcggcaggagctgcttccatggcatgtgcaccacctagtgctgcttctggtcctcttccattctttcagttccgacccagactggagtcagtggactggcgtcgcttgagtgctattgatgttgataaagtggccggagccgtcgatgtcctgactctacaggaaaatattatgaatataacattctgcaaacttgaggatgagaaatgcccacactgtcagtccggagtcgacccagtcctgcttaaactgattcgtctcgcccaattcactatagagtacctcctgcacagtcaggagttcctgacatctcaactgcacactctggaagaaaggctccggttaagccattgcgacggtgagcaatcgaaaaaacttctcaccaagcaagccggtgaaatcaagacccttaaagaagagtgcaaacgtcgtaaaaaaatgatatcgacccagcaactgatgattgaggctaaagcaaactattaccagtgtcacttttgcgataaagcgttcatgaatcaggccttcctacagagtcacattcagcggaggcacactgaggagaacagtcatttcgagtaccagaagaacgcacagattgaaaaactgagatcggaaatcgtcgtgctcaaggaagagttgcaactcacgaggtccgagctggaggccgctcatcatgcaagcgccgtgcgcttttcaaaggagtatgaaatgcaaaagacaaaggaggaagattttctgaagctgttcgatagatggaaagaggaggagaaagagaaactagttgacgagatggaaaaagttaaagagatgtttatgaaagagttcaaagaactgactagtaaaaactcagcactggaatatcagctcagcgaaatccaaaagagcaacatgcagatcaagtctaacatcgggacactcaaggacgctcatgagtttaaggaagaccgcagcccctacccacaggactttcataatgtgatgcagctactggacagtcaggagtccaaatggaccgctcgtgtacaggctatccaccaggagcataaaaaagaaaaagggagacttttgtcacacatcgagaagcttaggacctctatgatcgatgacttgaacgcctctaatgtgttttataagaagagaattgaagagcttgggcagcgcttgcaagagcagaacgaacttataattacacagcggcagcagattaaagattttacttgcaacccattaaattccatctcggagccaaaggtgaatgcgcctgcgcttcacactctggaaactaaaagcagtctccccatggttcatgaacaggcattcagtagccatatactcgagccgatcgaagagctgtctgaggaagagaaagggagagagaatgaacagaaactgaacaacaataagatgcatctgaggaaggccctgaagtcaaacagtagtcttaccaagggattgcgcacaatggtcgaacagaacttgatggaaaagttggagaccctaggcatcaacgcagacattcgaggtattagtagtgatcagctccacagagtcctgaaaagcgtggaaagcgagcgccataagcaggagagagagatccctaactttcaccagatccgggaattcttggagcaccaggtgtcgtgtaagattgaggagaaagctttactgtcttctgatcagtgcagcgtgtcacagatggacacattaagcacaggtgaggtcccaaagatgatccagctgcctagcaagaatagacagctcatacggcagaaggcagtttctactgaccgcacgagcgtccctaagatcaaaaaaaatgtcatggaggatccttttccaaggaaatcttctacaatcactacccctccctttagctcggaagaggagcaggaggatgacgatctgattcgcgcttatgcttcccctggccctttacctgtgccacccccacagaacaaggggtcctttgggaagaatacagtaaagagcgacgccgatggaactgagggcagcgagatcgaggataccgatgactcccctaaacctgctggggtggctgtcaagactccaactgagaaagttgaaaaaatgttccctcaccgtaaaaatgttaataaacccgtcgggggtacaaacgttcccgaaatgttcatcaaaaaggaggagttgcaggaactgaagtgtgccgacgtcgaggatgaggattgggatatatcaagtctggaggaagaaataagtcttggcaaaaaaagtggaaaagaacagaaagagccgcctccagccaaaaacgagccacatttcgcccacgtcctgaacgcctggggagccttcaatccaaaggggcctaagggtgaagggctccaggaaaacgaaagcagcacactcaagagcagccttgtgaccgttacagactggagtgatacgagcgacgtgtag

SEQ ID NO: 28624 - DNA, 4074 bp, synthetic construct
  source 1..4074: mol_type = other DNA; note = Synthetic coding sequence
atggcagacacagatctcttcatggaatgcgaggaggaagaacttgagccttggcagaaaatcagtgatgttattgaggatagcgttgtagaagattataacagtgtagataagacgacaacagcgggaaatcctcttgtacaacagggcggacaacctctgattttaacccaaaaccccgctcccggtctggggacgatggtcacacagcctgtccttagacctgtccaggttatgcagaatgcaaaccacgtaacttcaagtcccgttgctagtcagccgatttttattaccacccagggcttccctgtgcggaatgtgaggcctgtgcaaaacgccatgaaccaggtgggcattgtgctgaatgtgcagcaggggcagaccgtgcgcccaatcacactagtcccggcaccgggaactcagttcgtgaagcctaccgttggtgtcccacaagtgttctctcagatgactccagtgcggcctggatccacaatgccagtaagaccaaccacaaacacatttacgaccgtgattcccgctacccttactattcggtctacggtgcctcagagtcagtctcaacagaccaaatccacaccttccacgagtacaactcccactgctacccagccgacctccctcggccagctagcagtccagagcccaggccaatccaatcagaccaccaatcccaaactggcgcctagcttcccatccccccctgcagtaagtattgcctcttttgtgacagtgaaacgtcccggtgtcacgggggaaaattcaaatgaggtggcaaagctggtcaacaccctcaatacgattccaagccttggccagtcaccagggccagtcgtggtgagcaataactcatccgcgcacggcagtcagcggacaagcggccctgagagcagcatgaaagtcacctcttcaattcctgtgtttgacctgcaggacggaggccgaaagatctgtccacggtgtaatgcccagttccgggtgacagaggctctgcggggacacatgtgttactgttgccctgagatggtggaataccagaagaagggcaagtccctggattcagagccttccgtgccttcggcagcgaaacccccaagccctgagaagacagctcccgtggcgtcaacccctagttctaccccaatccctgcattaagcccccctacaaaggtgcccgagccgaatgagaatgtgggagatgctgttcagaccaaattgatcatgctggttgatgacttctattacggacgcgacgggggtaaagtcgctcagctcacaaacttccctaaggtcgctacatccttccgatgccctcattgcaccaagagactgaagaataatattcgcttcatgaatcacatgaagcaccacgtggagctcgaccagcagaatggcgaggtggatggacacaccatttgtcagcattgctaccggcagttttctactccatttcagctgcagtgtcatctagagaacgtccactccccctatgaaagcacgacgaagtgtaaaatctgtgaatgggcattcgaaagtgagccactgtttctgcagcacatgaaggatacgcacaaaccaggtgagatgccgtacgtatgccaggtatgccaataccgctccagtctttattccgaagtagacgtccactttcgaatgatccacgaggataccaggcacctcctgtgtccatattgtcttaaagtcttcaagaacggcaatgcatttcagcaacattacatgaggcaccaaaaacggaacgtatatcattgcaataagtgtaggctgcagtttctttttgcaaaggataagatcgagcacaaactgcagcaccataagacttttcgaaagcccaagcaacttgaagggctgaagcccggtacaaaggtgacaattagggcctcaagagggcagcccaggaccgtccccgtttcctccaacgacacaccgccatccgctctgcaggaggccgcaccattgacaagcagtatggatccgctccccgtctttctgtatcccccagttcaacgttcaattcagaaaagagcagttcgaaaaatgtccgttatggggcgtcaaacctgtctggaatgcagtttcgagattcccgacttccctaaccacttccctacctatgttcactgctctctttgccgctactctacgtgctgcagcagagcttacgctaatcatatgattaataatcatgtgcccaggaaatccccaaaatacctggcattgttcaaaaattcagtgtcaggaattaagctggcctgtacctcctgcaccttcgtcacatcggtgggtgacgcaatggccaagcatctcgtgttcaatccgtcccataggtcctcctcaatcctgccccgagggctcacttggattgctcatagtcgccatgggcagactcgcgatcgagtccacgacaggaatgtgaagaacatgtaccctcctccatcatttcccactaataaggcggctacagtaaaaagtgcaggggctacgccagccgagccagaggagttgctcaccccactggccccagctttgccttcgcctgctagcacagccacgcctccgccaactcccacgcacccacaagcgcttgctttaccacccttggccaccgaaggcgctgaatgtctcaacgttgacgaccaagacgaaggctcccccgtaacccaagagccagagctggcttctggcggtggtgggtctggaggcgtcggcaagaaagaacagctttccgtaaagaaactaagagtagtgctcttcgcgctgtgctgcaataccgagcaggcggcagaacacttcaggaatccacaacgcagaatacgccgttggctgaggcggttccaggcatcacagggagagaacctggaaggtaagtatctatcgttcgaagctgaagaaaaattagcagagtgggttttgacccagagagaacagcagttgcccgtgaacgaagagaccctctttcaaaaagctacaaagattgggcgaagcctggaaggagggtttaagatttcatacgagtgggccgtgcggtttatgcttcggcaccacttaacgccccatgccagaagggccgtcgcccatacattgcccaaggacgtggcggagaatgctggcttgtttatcgattttgtgcagaggcaaattcataaccaggatctgccactgtcaatgatagtggccatagacgagatatccttgttcttggatacggaggtcctcagttccgatgacaggaaggaaaacgccctccaaacggttggcactggcgagccctggtgtgatgtagtgctggccatcttagcagacgggacagtactgcccactctggtattttaccgcggtcagatggatcagccagctaatatgcccgactcgattctcttggaagcgaaagagtctgggtactcagacgatgaaattatggagctgtggtccacaagggtgtggcagaagcacaccgcatgtcagaggtccaaggggatgttggtcatggattgtcaccgcacacatctgtccgaagaggtccttgccatgctctccgcctcttctactctccccgctgtggttccagctggatgctcatcaaaaatccaacccttggacgtgtgcattaagcgcactgtcaaaaacttcctccacaagaagtggaaagagcaggcaagggagatggccgacactgcatgcgatagcgatgtgctgctacaactggttctggtgtggcttggcgaagttctgggcgtgattggggactgccctgagctggtgcagagatccttccttgtagcaagtgtactgcccggtccagatggaaatatcaactccccaacgcgcaatgcagacatgcaggaggagctgattgccagcctggaggagcaactcaagttgagtggagagcattctgagagctccactcctcggcctagatcttcacccgaagagaccattgaacctgagtcactccaccaactattcgagggggagtccgagacagaatcgttctacggctttgaggaggctgatttggatctgatggaaatatag

SEQ ID NO: 28625 - DNA, 2904 bp, synthetic construct
  source 1..2904: mol_type = other DNA; note = Synthetic coding sequence
atgggccctgggcaacccgcaagcacatgtgtgcatttggcccctcgcacgcagctagatggacgttccgatccgaaggtacttcagactcagaaccagcttcagtttaaccgtaatgtcccgactcattcatctaacttggcaatcagatactcctgtccccatgctatcaggatcgagaagctcaagcattcatataacgaatcatatcactgtaaagacgccgactgcagagtgggacctgatcttggatcctcagtctctttcagtgtgatctcccaagaacggctctcatacgctgtgcatctggccaggagagatgttaaaagaagacaattcgagaagcatatcaaggagcatcacctgcgctcacaaccccagtcctcgcagaagtgtggccatacaaagtataagattccagaccacagagtggagcggaaagaatcaaagtcgcaggccgcttgtcagtgctctcaccagccatctaaagtggagatctccagctctggcgcaaaggtgtacctctacagctcccaccctggtcagagcgacctgacagtcccaaattctccacctacacacgatccaggactgcagccacatcccaggatcggggatcataagaacatttctgagcagaaatccctgctcgaagtgcagaggctgcagaaggaactgtcctcttgcattcataaaatagaggaggtaactaagaaggataggctagaagaggccctggaccccgatgaagagcgacgcattagaatacggcgacaggaacaggctgctcgctcagccagaatgctctatgtgctccaacagcaggtgaaagaaatacaagaggagctggacaaactgagtccccataaaataaagcacaccaaaaagagctgggccatgagtaagctggccgcagcacacagaggcgctattagagctctgcagatgtttgttacccagtttaccgaccgaggcgagcaccccctccccgctagatgcaaggagctaggaagcctgatccgtcagctgtctctatgcagtgttaagctggatgcagacccaagcgtgcccgacgtagttattgatatacttcagcagattgaagcccttgaatccctccttgaaaaaaagctttcccccaaaaaagttaaaaagtgtttttccgaaatccgatctaggttccctattgggagccagaaggccctagaaagatggccatccacaagtccgaagggcgagaggagacctcttacagccaaagacaccttcccccaggaaacctcccgcccaagtgtggccaaacagctgctggccgataagtatcagcctgatacagaacttccagaaacgcaacggcttcagtctgagttggacgtgctggacgccgacatcgtgttggaggagggacccttcatcctcgaccagagcgccagctttaaggacgaggtgctggccgtagccaaaacaaaggctgggaagaagaaacccgtaacagaaaacgtgccgttcaggaaaaaagataccttggcgccagctaggcagcaaggactcaggaaggctgagcgcggacgacaatctcaacctcactctaaatcaagggtgcagcagacaacagttagctctagactgaagatgaatagacagcccgttaaggatcgtaaggctccctggattccacccaaccccacttccccaccagcaagtcccaaatgcgcggcatggctgaaggtgaagacctcccccagggacgccactaaggagcctctgcagcaggaagatccgcaggaggaaagtcacctgactggggctgtcgagcacgaggccgcaaggctagcgtggctggacgccgagacttccaaaaggctaaaggagctggaggaactaaaggcaaaagagattgacagcatgcagaagcagcgactggactggctggatgcagagacgtcccgaagaaccaaggagctcaacgaactaaaggcggaagaaatgtaccggctgcagcagttgtccgtgagtgccacacaccttgccgacaaggtggaggaggcggtactggacagactgaagcccctcctggtgaaggcacaacgggtgaactcgacaaccgaggccaatatacacctaaaagacgggtcttccgtgaatacagcgaaggcccagcctgctcaagaagtcgcggctgtggattttgaatccaacaatatccgtcagttggatgacttcctggaggactgtgcatccgaactgtgggccgtgacccatgctaagatcctgggcagcgagacccttgccacagtggaggactctaaagattcacccgaccttgagatcatgatgcgaagaatggaggaaatggagaaataccaggaatcggttcgccagagatataataaaattgcttacgcagaccctaggctgtggatgcaggaagagaataatgaccagaaaatctctgcaatcagtgagaaaccgctgagtccacaccccattcgcataactaaaacggtcgaccgtaaggacccagcagtgaatatcatgcttgagcgcccatgtaatggtaactctctggacgaaagtgtcggaacagaagaggggtcggagaaacgagaagctcccctcctgagcttggccgaagactcacagcagaaagagggtagggcacccctgttcgtcccaccaggaatgcagcactctattggcgactactgttccaggttcgagcagtacctccgcattatctcccacgaggccgtgggatccttcaacccatggctcatcgctgaaagcttctctgaagagcttgtggacgaggcccttggcgctgtggccgcagaactacaggacatgtgcgaggactatgcggaggccgtcttcacatccgagttccttgaagcagctacatag

SEQ ID NO: 28626 - DNA, 6839 bp, synthetic construct
  source 1..6839: mol_type = other DNA; note = Synthetic coding sequence
atgtatagatcgagcgcccgatccagcgtttccagccataggccaaaggatgatggcggtgggggaccaaggtctggacgtagctctggctccagctctggccctgctcgtagatctagcccacccccacctccttccggctcatcttcacggacacctgcaaggcggcctcgcagcccaagtggtcatcgcggtcgaagagcttcccccagcccgccaaggggcaggagggtgagccccagcccaccacgggcacggcgtgggtcaccttccccaccccgagggcgacgcttgtttcctccaggacccgcagggttccgaggaagctctcgtggggaaagtagggccgattacgccagagatggcagaggcgaccatcccggtgattctggttcacgcagaagatcacccggtctttgtagcgattccctggaaaaatcactcagaatcacagtgggcaacgatcacttttgtgtctccacacccgaaagaaggagattgtccgataggttaggctcacccgtggacaatctcgaggatatggacagagacgatttgaccgacgattccgtatttacacgatcaagccagtgttccaggggcctggaacggtacataagccaggaagaggggccactgagccccttcctgggccagcttgatgaggattacagaaccaaagaaacgtttctacacaggtccgactattctcctcatatctcatgtcatgacgagctgctgagaggcaccgagcggaatcgcgaaaagctgaaaggatactcaattaggtcagaggagcgctcccgtgaagccaagaggcccaggtatgacgatactgtgaaaatcaactcaatgggtggcgatcacccctcttttacctccggcacccggaactatcgccagaggaggcggtctccatccccgaggtttttagatccagagtttcgtgagctggacctggctcgcaggaagcgggaggaagaggaggaaagaagccgatcgctgtctcaggagcttgtaggggttgatggcggaggcacaggctgttctattcccggattatctggtgtcctaacggcttcagaacctggctatagtctgcacagaccagaggaagtttccgtcatgcctaagaaaagcattttgaaaaagcggattgaggtcgacataatggaaccttccatgcagttagagtctttttcctcctccacgtcctccagccaagaccaccccctgtactccggccatccttccctccctctcagtggcgcaatcgctgccttcgcatccgagatcgaaaacaaggggactatggtggagacagcactcaaggagccacagggtaacctgtaccagtggggacctctcccaggcattcctaaagacaacagccctctgcgtgagaagtttggttctttcctttgccacaaggacaacttagacctgaaggctgagggcccagagcggcatactgactttctgctgccacatgaacgggcttcacaggatggaagcggtttctcccgtatcctgtctatgcttgcagatagcaccagtactcaggagaaaagacgccgatcctttcctgatatagaggatgaggaaaaatttctgtatggcgatgaagaggaggacctcaaagctgaatctgttccaaaaccacttggttcaagcgagtcagaagtcatgaggcaaaaagcaagctccttgccttcatcagctcctgccgttaagctggaatcactggaagagactaatccagaatatgcaaagatccatgatctgctgaagaccatcggactggacattggcgtcgcagagatctcacagctagcggcaagaactcaggagaggttgcacggaaagaagccctccctcagatcatccgctgatcgaagaagtagcgtggatagatacttctctgcggaccattgctcgtctgtggaccatcgattcagcgccgacagatgcagctctgtggatcattgtttttccgccgaccgaaggtccagcgatcctcaccgtttggagtcccgcgaggctcatcatagtaacacacactcacctgaagtcagccacccccaccctccatcccccgtggatccatacttgctcaccaagaattctccacctttcttaaagtctgaccatcccgtgggccatatttctggaccagaagtggtcggcagtgggtttcagtcctcagtcgctgtgcgctgtatgctcccctctgcgccaagtgctcctatcaggcttccccacacagcggcactcagtcagttccatatgccaagagcctctcagtttgctgcagctaggatccctcctaattaccaggggcctgctatcccacccgcttcatttgacgcataccgccactacatggcttacgcagcctctcggtggccgatgtatcccacatcacaacctagcaaccatcccgtgcctgagccccacagaatcatgcctatcactaagcaggcaactcggtcccgtcccaacctacgtgtaatcccaactgtgacgcccgataagccgaagcaaaaggaatctttgcggggaagtataccagcagcccaggtgccagttcaggtgtctatcccttcattgataaggtataatcccgagaagataagcgacgagaagaatcgggcaagtcaaaaacaaaaggtcatagaggagagggaaaaactgaaaaacgaccgcgaggctcgtcaaaagaagatgtactatcttcgcactgagctggaacgcctccacaagcaacagggagaaatgttgaggaaaaaaaggcgcgaaaaggatggacataaggacccattgctagtcgaagttagtcgcctgcaggataatataatgaaggacattgccgagcttcgccaggaggccgaagaagcagagaagaaacagagtgagctggataaagtcgctcaaattcttgggattaacatctttgacaagtctcaaaaatccctgtccgactcacgggagccaactgagaaacccggtaaagctgaaaaatcgaaatctcctgagaaggtctcatcattcagcaacagctctagcaataaagagagcaaagtaaacaacgaaaagtttagaactaagtccccaaaacccgctgagagcccccagtcagctactaagcagctggaccagccgacggctgcatatgagtattacgacgcaggaaatcattggtgtaaagactgcaataccatttgcgggactatgttcgacttcttcacacacatgcataataagaaacacacacaaactcttgatccctacaatcgaccttgggcctccaagacgcagagcgaagctaaacaggacgcaattaagagaaccgataagatcaccgtccctgccaaagggtccgaattcctcgtgccaataagtggattttactgccagctctgcgaggagtttctgggagacccaatctccggggaacagcatgtcaaggggcatcagcacaacgaaaaatacaagaaatatgttgacgagaaccctctttacgaagagcgccgaaatttggaccgtcaggccggactggcagtcgttctcgagaccgaacggagacgacagtctgagctaaagcgaaagctcagcgaaaaacctaaagaggaaaaaaaggagaagaaagcgaaagctgtgaaagaggtgaaggaggatgacaaggtctctgagaagctggaggaccaactgagcgaaggtcggaacagtcccgaaaaggccgaaaacaagcgcaacacaggaataaagctacagcttaaggaagaggttaaaaaggagtcaccaacatcctccagcttcggaaagtttagctggaagaaacccgagaaggaggaagagaagagttcactcgtgactccttcaattagcaaggaggaaatactcgaaagctctaaggacaaggaggatggaaaaacggaagcaggtaaagccaaaccaataaagatcaaactgagcggaaagactgttgtggctcacacttctccgtggatgcctgtggtgactacgagtactcagaccaagattcgcccaaacctgccgatccctagcaccgtgctgcgaaagtcatgctctgctaccatgagtaaaccagctcccctaaacacttttctgagcatcaaatcaagcgggacaactgccaaaccccttccagtggtaaaggaatcctccgccgatctactcttgccgccagatatcatttctaaggccttcgggggagaagaagtcatactgaagggctccccggaggagaaagttgtattggccgaaaaaagtgagccatctcacctcccggaacagatcctgcccccaccccctccgccacccccacctcctccacctcctcctcccgtgatcccacaccccgcagcgcctagcgcagcacaggcgaatgcaatattggctcctgttaagtcaaatcctgtcgtgagccaaaccctcagcccgggttttgttgggcctaacatactaaatcccgtgcttcccgtggccattatggcttctgcccagcctgcagcaatcccttctgatgagacggccccaggagtctctgagagcgaccgcgaccagaccctgttctcagtgctcgtccgaccacccccaccactatcttctgtgttctcagaacaggcgaaaaagctggaaaaacggaacagctgcttagccaccgccaatgccaaagatctctatgacatcttttactcttccggcggaaagggagcaccagagacaaagggagcccctgaaacaaaactctccgggggaccccttgccaacggagaaaacagtaacttatcacggaccaagtcttcggatactagtagcaccagtccactgaattcgtcggctagccaggaagaactgcaccaggacgaaggcctggtagcagctccgatagtctctaactccgaaaagccaatcgcaaagacactggttgcgctgggcaaatggagtgtcgtggagcatgtgggcccaaaatcgacagggagcacctatggcttcctccagccattgacaaggctttgccaaagccggccttacgaaaccattacgccaaaaaccgacactttagccatttggacgtcgtcctcttttcaatcagacaccagccgggacatctcccccgagaaaagcgaactggacctgggtgagcccggacctccaggggtggaacccccaccccaacttctggacattcaatgtaaagagtcccagaaacttgtggaaatacatctgagggagagtgtgaatcaagacaaagaaagtcaggaactgagaaaatctgaagactgtagagagtcagaaattgagaccaacacagagctgaaagagagggtgaaagagctttccgaagggattgtggacgagggcgtctcaacatcaattggaccccactcaatcgacgacagcaacctgaatcacggcaacagatatatgtgggaaggagaagtgaagcagcctaacctgctcatgatcgacaaggaggccgaacagtctaataagctcatgaccggctcggaaacgccatcaaaagtcgtgatcaagctgtcgcctcaagcctgctcttttacgaaagccaagctcgacagttttcttagcgaggccaggtcactacttaacccccaggacacgccagtcaagatttctgctcctgaactgctgttgcacagccctgcgagatccgccatgtgtctcactggatcaccacaggagcagggtgtgtctgtagtatcagaagagggcttggaaaattcggcgcctgaatcagccagcaggactagcaggtatcgcagccttaagttgaaaagagagcggtccaaggatttccaagtaaaaaagatctacgaactcgcagtgtgggatgagaataaaaagagacccgagacatgggagagcccagagaaacccaagaccgaggcactggagttgcaggacgtccacccagaactcaccgttaccatagagagcaaggccctggaggacttcgaagcaacggatctcaaggtagaggaactgacagccctcggcaacctgggtgatatgcctgtggatttctgtacgactcgggtgagcccagctcacaggtcacctacagtgctctgtcagaaagtgtgtgaggaaaactccgttagcccgatcggttgcaactcctctgaccccgcagactttgagcccatcccctctttctctggatttcccctggatagtcccaaaactttggtgttggacttcgaaaccgagggggagaggaattcacctaatccgcgaagcgtaaggataccatctcctaatatcctgaagaccggactcacggaaaacgtcgacagaggtctgggcggtttggagggcacccatcaggcgctagatctgctggccggtggcatgatgcccgaggaggtaaaagagtctagtcagctcgataagcaggagtcattggggctcgaactcaagacgatcaattccgctgggctgggtccctccccttgtctgccagatcttgtggattttgtgacacgcacgagcggcgtgcaaaaggacaaactctgcagccctctgagcgaaccaggagatccaagcaagtgtagttcactggaacttggaccacttcagcttgagattagcaatgcctcaactaccgaagtcgccatcctccaggtggacgacgatagcggtgacccactaaatctggtgaaggcgcctgtgtcgaggagcccacccagggaacaggttattgaagataacatggttccacaggggatgcccgagcaagagactaccgtaggcgcaatccaagaccatactgaatcttctgtgcacaatta

SEQ ID NO: 28627 - DNA, 1932 bp, synthetic construct
  source 1..1932: mol_type = other DNA; note = Synthetic coding sequence
atggggcaggagtccagtaaaccagtatggccaaatccgacagggggatatcaaagtaatacgggaaggagatacggcaggcggcacgcatacgtatcgtttagaccgccaacaagccagagagaacgaatcgcatctcagcggaaaactaattcagaggtgcctatgcaccggtcggcaccctcacaaactacgaaacggagtcggtcgcccttctcaacgacccggcgtagttgggatgacagcgagagtagcgggacgaacttgaacatcgataatgaggattactcacgctacccaccccgagaatacagagcatctggatcaagaaggggcatggcttatgggcatatcgattcgtatggtgctgatgatagcgaagaggagggggctggccctgtggaaagaccgcctgtaagaggaaagaccggtaaatttaaggatgacaagctctatgatcccgagaaaggggctagatctcttgccggtcctcctccacattttagttcgttttcgagagatgttagggaggaaagggacaagctggatcccgtgccggcagcccgttgctccgcttcaagagcagactttctccctcagtcctccgtcgcttcacaatcgagctcggaaggcaaactcgctaccaaaggggatagctcagaaagagagaggcgcgagcagaatctccccgcacgtcctagtcgcgctcctgtaagtatttgcgggggaggagagaacacatctaagtcagccgaggagcccgtcgttcgccctaagattaggaatctggcatcgccgaattgcgtcaagcctaagatctttttcgatacagacgacgacgacgacatgccgcattcaacatcccggtggagggacaccgccaatgataatgaagggcactctgatggcctggctaggcgtggtcgaggcgaatcttcctccgggtatcccgaacccaagtatcccgaggataagcgggaggctcgcagtgaccaagtgaagcccgagaaggtaccacggaggcgcagaacgatggcagatcccgatttttggacccatagcgacgactactacaaatactgcgatgaagactccgacagtgacaaggagtggatagctgccttacgcagaaagtatagatctcgcgaacagacgctgtcttcatccggcgaatcctgggagaccctgcctggcaaggaggagagggagccaccgcaggcaaaagtttcagcttccacaggcaccagccccggacccggagcgtcagctagcgcgggagcaggggctggagcaagcgcgggatccaatggtagtaactacctggaggaggtacgagagccgagcttgcaagaagagcaggccagcctcgaagaaggcgaaattccctggctgcagtaccacgagaatgacagtagcagtgagggtgataatgactctgggcatgagctcatgcaacctggggtatttatgctggacggcaataataatttggaagatgactcaagtgtgagcgaagaccttgaagtagactggtctctgttcgacggattcgctgatggtttaggagtggcagaggcaatcagttacgttgacccacaatttctcacctacatggctttggaggagcgtctggcacaggccatggaaacggccctcgcccatctcgaatcactagcagtggatgttgaggtcgctaatccacctgcaagcaaagagtccatcgatgcactgccagagattctggtgacagaggaccatggggcagtcggccaggagatgtgttgcccaatttgctgctccgaatacgtgaagggcgaagtggctacagaactgccatgccaccattatttccacaagccatgcgtgagtatctggctgcagaagtctggtacatgcccagtctgcaggtgcatgttcccccctccactgtag

SEQ ID NO: 28628 - DNA, 1113 bp, synthetic construct
  source 1..1113: mol_type = other DNA; note = Synthetic coding sequence
atgcccacagaaaccttgcagaccggctccatggttaagcctgtgagtccggctggtacatttacctctgccgtgcctctgcggatcctgaataagggtccagattacttccgacgtcaggcagagccgaaccctaaaagactgtcagccgtggaaaggcttgaagccgacaaagccaaatacgtcaagtcacaggaggtcattaacgctaaacaggaacctgtgaagcccgctgtgctggcaaaaccaccagtctgtccagctgcaaaacgggcactggggtctcccaccctgaaggtctttggtaaccacgccaaaaccgaaagcggtgtccagagggaaaatctgaagctggagatcctgaaaaatatcatcaactcgtccgagggatccagttccggcagcggacataaacatagttctagaaattggccccctcaccgaagtgaggccacggacctgcacagacatagcttcgctgagagcttgaaagtctaccctactcagggcaggcggtccccgcaggagggcggaagccatgtcgggcgaaggctcctggagcagtccgccgagagcttcctgcacgtttcccactcatcaagcgacattaggaaagttacctccgtgaaaccactaaaagccattccatgctcttcctccgccccacctttaccgccaaagccaaaaatcgcggcaatcgcttccatgaaaagtcccgaggccgatccagtggaacctgcctgtggggtctccaggcgccctagtctccagcgttccaagtctgacctatctgaccggtatttccgcgtggacgccgacgtcgagcgtttttttaactactgcggtctggatccggaagaactggagaaccttggcatggaaaatttcgctagagccaactcggacatcattagtctgaacttcagatccgcatccatgataagctcagactgtgagcaatcccaggactcaaactcggatcttcgaaatgatgattcagcaaacgatagagtgccttacggcatctcagccatcgagaggaatgccaggattattaaatggctgtactcaataaaacaggcccgagagagtcagaaagtatcccatgtgtag

SEQ ID NO: 28629 - DNA, 3126 bp, synthetic construct
  source 1..3126: mol_type = other DNA; note = Synthetic coding sequence
atggctgccgctgccgctgcgggagccgcatcgggactacccggtcctgtagcccaagggctcaaagaagctctcgtcgatacactgacagggatcctatctcctgtccaggaggttcgtgctgctgcagaggagcagattaaggtcctggaggtgactgaagagttcggggtgcacctggctgagctgaccgtggacccacaaggggcactcgctatcaggcagttggccagtgtcatactgaagcagtacgtcgagacgcattggtgcgcccaatctgaaaaattccgaccccctgagacaacagaaagagccaagattgtgataagagagttgctgccaaacggcctgcgcgagtctatctctaaagtgcggagttccgtggcctacgcagtcagcgctatcgcccactgggattggccagaggcttggccccaactgtttaaccttctgatggagatgctggtcagcggtgatttgaacgccgtgcacggcgctatgcgggtcctgacagaattcaccagggaggttactgatacccaaatgccgctggtggctcccgtcatcttgcccgagatgtataagatcttcactatggccgaggtgtatggaattcggacgaggtcccgcgctgttgagatcttcactacttgcgctcacatgatatgcaacatggaagagctcgagaaaggtgctgccaaggtgcttatcttccctgttgtccagcaattcactgaagcctttgtgcaggctctccagattcccgatggccctacctcagattccggtttcaagatggaggtgcttaaggccgtgaccgcactggtgaaaaacttcccaaaacatatggtatcatctatgcagcaaatactcccaattgtttggaataccctcacagagtcagcagccttctatgtccggactgaggtaaattacactgaggaagtggaggaccccgtagatagcgatggtgaggtcctcggattcgaaaatctagtgttctccatttttgaatttgtgcatgcacttctggaaaatagtaaattcaaaagtacagttaaaaaagctttaccggagcttatctattatatcatcttgtatatgcagattaccgaggagcaaataaaggtgtggaccgccaaccctcagcagtttgtcgaggatgaagatgacgacacttttagctacaccgtcagaatagcagcccaggaccttttgttagccgtggccacagatttccagaacgagagtgctgctgccctggcagcagcagcaacacggcacctgcaagaagctgaacagacgaaaaattccggaacggagcactggtggaagatccacgaagcctgtatgttggctttgggcagcgtgaaggccataattactgattctgtcaaaaacggtaggatccactttgacatgcatggttttctgactaacgtcattcttgcggacctgaacctgtcagtgagtccctttctcctcggcagagctttgtgggctgccagccgcttcacggtcgcgatgagcccagaactcatccaacagtttcttcaggcgaccgtcagtggcctccatgaaactcagccaccaagcgtgcgcattagtgctgtgagggccatctggggatactgcgatcagctcaaagtcagcgaatccacccacgtcctccaacccttcctgccgtcgatcctggacggcctgatacatctggctgctcagttctcctccgaggttctcaacttggtcatggagacgttgtgtatcgtgtgtacagtcgaccccgagttcacagctagcatggaatctaagatctgcccatttacgatcgcaattttcctgaagtactctaatgaccctgtggtggccagcttagcccaggacatattcaaagagctttcgcaaatcgaagcatgccaaggacctatgcagatgaggcttattccaactttagtgagcataatgcaagcgccagccgataaaatacctgcgggattgtgcgctacggccatagatatactgacaacagttgtgcggaataccaagccgcctctgagtcagctccttatatgtcaagcgttcccagcagtcgctcagtgcacactgcatactgatgataacgccacaatgcagaatggtggagagtgccttcgggcttacgtgagtgtgacgctcgagcaagttgctcagtggcacgacgaacagggacacaatgggctgtggtacgtcatgcaggtcgtgagccagctccttgaccctcgaacctcagagttcaccgctgcatttgtgggacgcctcgtaagcaccctgatctccaaagcgggtcgtgagctcggagagaatcttgatcagatcctgagagcaatcttgagcaagatgcaacaggctgaaaccctctctgtcatgcagagtttgataatggtgttcgcacacctggttcatacacagttggaacccttgctggaatttctttgctctctccctgggccaaccggcaaacccgctctggaattcgtcatggctgagtggacaagccggcagcacctgttttatggccagtatgagggcaaagtctcttctgtggcgctgtgtaagcttttacaacacggcataaacgccgatgataaacggttgcaggacattcgcgtgaaaggcgaggagatttattcaatggacgaaggtatcaggactcggtcgaagtccgccaaaaacccagagcggtggacaaatattccacttctcgttaagatccttaagctgatcatcaatgagctctctaacgtcatggaagccaacgctgctcggcaagccactcctgctgagtggtcacaagacgactccaatgatatgtgggaggatcaagaggaagaggaggaagaggaagaagacgggctggcagggcagctcctgagcgacatcttagcgacaagcaaatacgaggaagactattacgaggacgacgaggaggatgatccagatgcactgaaggaccccctgtaccaaatcgacttacaggcgtatcttaccgattttctgtgccagttcgcacagcaaccatgctatatcatgttcagtggacatctgaacgataacgaacggagggtcctgcagaccattggtatttag

SEQ ID NO: 28630 - DNA, 156 bp, synthetic construct
  source 1..156: mol_type = other DNA; note = Synthetic coding sequence
atgagttctcacaaaacatttcggattaaacgattcctggcaaaaaaacagaagcaaaaccgtcctattccccaatggattcgcatgaaaacagggaataaaattaggtacaacagtaagcgacgtcactggcgacggaccaagttaggtctctag

SEQ ID NO: 28631 - DNA, 3627 bp, synthetic construct
  source 1..3627: mol_type = other DNA; note = Synthetic coding sequence
atggacagcctccccgacgagtttttcgttcggcacccagccgtcgaggatcaaaggaaggaggagacagagaataagctggagaagtcaagcggtcagctgaataaacaggagaacgacatacctacagacctggttcccgtgaacctgctcttggaagtgaaaaagctcctgaacgcaatcaacacgctcccaaagggagtcgtcccacacataaaaaagttcctgcaggaggacttcagtttccagactatgcagcgggaagttgccgctaattcccagaacggagaagagatagtgcccgctctcacactgagatttttgatcacacagctcgaagccgcacttcgcaacatacaggctggaaactacactgctcatcagataaacatcgggtactatctgactctgctcttcctgtacggcgtagccctgacagaacgagggaagaaagaggactatacagaggctgagaataaatttttagtgatgaaaatgatgatccaggagaatgaaatctgcgaaaattttatgtcactcgtttactttggacgcggattattacggtgtgcccagaaaagatacaacggagggttactggagttccataaatccctccaggagattggtgacaaaaatgaccattggtttgacattgaccccaccgaagacgaagacctccctacaactttcaaggacttactgaacaattttataaaaaccactgagtctaacatcatgaaacaaaccatatgtagctacttagactgtgagagaagctgcgaggcagatattctgaaaaatacgtcttataaagggtttttccaactcatgtgtagtaagagctgttgtgtgtactttcacaagatctgttggaaaaaatttaaaaacttaaaatatccgggagaaaatgatcagtccttttccggtaaaaagtgcctcaaggagggttgcaccggcgacatggttcggatgctgcagtgtgacgtgcccggtattgttaaaatactgttcgaagtggtaaggaaagacgaatatattactattgaaaacctcggagcatcttatagaaagttaatcagtctcaagataactgataccgacatcagacccaaaatctcgttgaagttcaatacaaaggatgagatgccaattttcaagctggactacaattatttctaccaccttctccacattatcatcataagtggaaccgatattgtaagacaaatattcgacgaggctatgcccccaccactccttaagaaggagttactcatccacaagaacgtgctagagtcatactataaccacctctggactaatcacccactgggcggttcatggcatctgctgtatcccccaaataaagagctcccacagagtaaacagttcgacctgtgcttattactcgccctgatcaagcacctgaacgtattccccgcaccaaaaaaaggatggaacatggagccacctagcagcgatatctccaaaagcgcagacatcctcagattatgtaaataccgggacatcttgttatccgaaatccttatgaacggacttactgagtcacagttcaacagcatctggaagaaggtgagcgatatcctcctgaggttgggcatgatgcaggaggacatcgacaaggtaaaggaaaaccctatcgagaatatctctctggactatcaccagctttctgtctatctcgggatcccagtgccagagattatccaaaggatgctctcctgttatcagcagggtatagcccttcaatcaatcaccggctcacagcgcattgagatcgaagaactgcagaatgaggaagaggagctgtcgccaccactaatggagtacaacatcaatgtgaaatcacatcctgaaattcagttcgccgaaatcaataaggatggtacctccatccccagcgaatcctccacggaaagcctcaaggatctgcaagaagtgaagtctaaacaacgcaaaaagaagaaaaccaagaacaagaagaataaagactctaaggaagaccaggtgccttatgtggtggagaaagaagagcagctccgcaaagagcaggccaatccccactccgtctcaaggctgatcaaggatgatgcttctgatgttcaagaggattcggccatggaggataaattttacagccttgatgaactgcacatcctcgatatgatagagcagggttctgcaggtaaagtgaccaccgattatggcgagacagaaaaggaaagactggcacggcaacggcagctgtacaagcttcactatcaatgtgaggattttaaacgacaactgcgtacggtaacatttcggtggcaggagaaccagatgcagatcaagaaaaaagacaagatcattgcgtccctgaatcagcaggtggcattcggcattaacaaggtgagcaagctgcagcgacaaatccacgccaaggacaatgagatcaagaatctaaaagagcagctatccatgaagaggtcgcagtgggagatggagaagcacaatctggagtccacaatgaaaacttatgtaagtaagctgaatgcggaaacgtcacgcgctctgaccgccgaagtctacttccttcagtgcagacgggactttggcctactgcacttggaacagacagagaaggagtgcttgaaccaactggcgagggtgacacacatggctgcatcaaaccttgaaagtctgcagctaaaagcagccgtggatagctggaatgcgattgtcgccgatgtgagaaacaagatagcctttttgaggacccagtacaacgagcagatcaacaaagtgaagcaggggtttgctctttcaaccttgccccctgtccagcttcctccacctcccccatcaccggagatccttatgcaacagttcctgggccgtcccctcgtcaaagagtcgttcttccggccaatactgaccgtaccccagatgccggctgtatgccccggtgtcgttagcgcaacggggcagccacgagcgcctctgatgactggcattgcctgggctctgcctgctccagtgggagacgccgtcccccctagtgctgggttgcggtcagatccatctattatgaactgggaaaggattaccgatcggctgaagaccgcttttccacaacagacccgcaaagaactgactgatttccttagaaaactcaaagatgcctatggcaagagtctgagtgagctcacattcgacgagattgtctgtaaaattagccagttcatcgaccccaagaagtcccagagtcagggaaagtccgtgagcaatgtaaactgtgtctcaccctcacactctcccagccagcctgatgccgctcagccacccaaaccagcctggcggcctctcacatctcaggggccagccacttgggaaggggcttccaacccagacgaggaggaagaggaggaggaaccctgtgtgatatgtcacgagaacctgtctcccgaaaatctgtcggtgcttccatgcgcgcacaagttccatgcccagtgtataagaccttggttgatgcaacaaggaacctgtcccacatgtagattacacgttctgttgcccgaagagttccccggtcacccatctagacagctccctaagatctag

SEQ ID NO: 28632 - DNA, 996 bp, synthetic construct
  source 1..996: mol_type = other DNA; note = Synthetic coding sequence
atgtcacgccagctgagccgcgctcgccctgccactgtgttgggtgcaatggagatgggacgccgtatggacgcccctaccagcgctgccgttacgcgcgcattcctggaacgcggacacacagaaattgacacagcatttgtgtactctgagggccaatcagaaacaatcctggggggactcggactacgccttggcggaagtgactgccgtgttaagatagatacgaaggccatccctctctttggtaactctctcaaaccagattccctgcgcttccaactagaaacctctctgaaacggttgcagtgcccaagggttgatctgttttacctgcacatgccagatcactctaccccagtggaagagacactacgagcatgccaccagctccatcaggagggaaaattcgtggaacttggattaagtaactacgctgcatgggaagtagctgagatttgcactttgtgcaaatcaaacggctggatcctgcctacagtatatcagggtatgtacaatgcgatcactcgccaagttgagaccgagctcttcccatgcctgcgtcattttggcctgcgtttttacgcttttaaccccctagccggagggctcttgaccggaaaatacaagtacgaagacaagaatggaaaacagcctgtcggcagattctttggaaatacttgggccgaaatgtaccgcaatcgctactggaaagaacaccattttgagggaatcgcacttgtggagaaagcgctgcaggctgcttatggagcttctgctccctcaatgacaagtgcaaccctgaggtggatgtaccaccactcacagctccaaggcgctcacggcgatgccgtcattctcggcatgagttctctggagcagctagagcagaacctggcagctgcagaggaaggcccactcgagcccgctgtcgtggatgcatttaaccaggcatggcatctcgtaacacacgaatgccctaattactttcggtag

SEQ ID NO: 28633 - DNA, 1131 bp, synthetic construct
  source 1..1131: mol_type = other DNA; note = Synthetic coding sequence
atgtcccctgaggtggccctgaaccgaatttcaccaatgctcagccctttcattagctccgtcgtcaggaacggtaaggtcggactcgacgcaactaattgccttcggatcaccgatctgaagagtgggtgcacttccctcaccccaggcccaaactgcgatcgattcaaattgcatatcccctatgcaggtgaaactcttaagtgggatataatctttaatgcccagtatcctgagctgccgccagactttattttcggtgaggatgcagaatttctaccagatccaagtgcccttcagaatctcgcctcctggaatcctagcaaccctgagtgtcttttgctcgtcgtgaaggagcttgttcagcagtaccaccagtttcagtgttcgcgtctaagagagtccagccgcttaatgttcgagtaccagacacttcttgaggaaccgcagtatggcgaaaatatggagatctatgccggaaagaagaataattggaccggggagttctctgccagattcttactgaagcttcccgtggacttttcaaacatacctacctacttgctgaaggatgtcaacgaggaccctggagaggatgtggcgcttttgtcagtcagttttgaggatactgaagccactcaggtttatcccaagttgtacctgtcaccccgtatcgagcatgccttgggcggaagtagcgccctccatattccagccttcccagggggtggctgcttgattgattacgtcccccaggtgtgccacctcttgaccaacaaagtccagtacgttatccagggataccataaacggagggaatatattgcagctttcctgtctcatttcggcactggcgtagtcgaatacgatgcagaagggttcacgaagctcacactcctgttaatgtggaaagacttttgtttccttgtgcacattgatttacccctgtttttcccgagagatcagccaacactgacttttcaaagcgtgtaccacttcaccaatagtggacagttgtattcacaggcccagaaaaattatccttattctccccgttgggatggtaacgagatggctaagcgagcaaaaagggagagcaacagagatggcgaagaaagctcatcggcctag

SEQ ID NO: 28634 - DNA, 1881 bp, synthetic construct
  source 1..1881: mol_type = other DNA; note = Synthetic coding sequence
atggacgagcaggaggcccttaacagtattatgaacgacctggtggcactgcaaatgaacaggcgacacagaatgcctggctacgagactatgaagaataaggacactggacacagcaacaggcagtccgatgtccgaattaaattcgaacacaacggcgagcgcaggattattgcattcagccgccctgtgaagtacgaggatgtcgagcacaaagtaacgacagtctttggacaacctctggatttgcattacatgaataatgagctgagtatcctactcaaaaaccaggatgatctcgataaggcaatagacattctagatcgctcgagctctatgaagtctctcagaatactgctattatcccaggataggaaccacaatagtagcagtccccattctggagtctcccgccaggtgcgcatcaaggcaagccaatctgccggagatataaataccatctaccagccacctgagcccagaagtagacatttgtccgtttcctcccagaaccccggtcggtcatccccccctcctggatacgtgcccgagaggcagcaacacattgccagacaggggtcatatacctctatcaactctgaaggtgaatttattcctgaaacttcagagcaatgcatgttagatcctctctcgagcgcagaaaactctcttagtgggtcctgtcagtccctggatagatcagccgactctccctcattccgcaagagccgtatgagcagggcccaatctttccccgacaacagacaagaatacagtgaccgcgaaacccagctctacgacaagggtgtgaaaggcggtacctatccccgtcgttaccacgtgtctgtgcatcacaaggactattctgacggccgaaggacctttccacggatacgtcgacaccagggcaacctgtttacgttagttccatcttcccgctccctgtctacaaatggcgaaaacatggggctcgcagtgcagtacctggaccctcgcggtagattacggtctgcagactcagaaaacgctctctccgtgcaagagcggaacgtcccgacaaagtccccatcagcacccattaattggaggcgtggcaagcttctcggccagggagcctttggacgcgtgtacttatgttacgatgttgacactggaagggaactcgcctcaaagcaggtccagttcgatccagactcccctgaaacctcaaaagaggtctcagcactcgagtgcgagatccagttgctgaaaaacttgcagcacgaaaggattgtacagtactacggctgtctcagggaccgggctgagaaaacactgactatcttcatggaatacatgcctggaggttcagtcaaagatcagctgaaagcttacggcgcactcactgagtccgtgaccaggaaatatacaaggcagattctggagggaatgtcctatctgcactcgaacatgatagtccaccgggatatcaagggggcaaacattctgcgcgactctgcgggaaatgtaaagctgggggatttcggcgctagcaagaggttacagactatctgcatgtctgggaccggaatgcggagtgtgacagggacaccttattggatgtcgccagaagtaatttcaggtgaggggtatgggaggaaagcagacgtctggagcttgggttgtactgttgtggaaatgctgaccgaaaaaccaccctgggccgaatatgaagctatggctgccatcttcaagatcgcaacccaaccgaccaaccctcaactgcctagccatattagcgaacatggcagggacttcctccgccgaattttcgtggaggcaagacagcgtccatccgccgaagaactgctgacacatcacttcgcgcagctgatgtattag

SEQ ID NO: 28635 - DNA, 1701 bp, synthetic construct
  source 1..1701: mol_type = other DNA; note = Synthetic coding sequence
atggatctgcaccgagcagcctttaaaatggagaactcttcatatttaccaaatcccctggccagtccagccctgatggtgctggcctcaaccgcggaagctagtcgggatgctagcatcccctgccaacaacctcggcctttcggcgtcccagtgagtgtagacaaagacgtgcacataccttttaccaacggatcctatactttcgcttccatgtaccacaggcaggggggagtcccaggtacgttcgcaaatcgagattttccaccatctctgctccacctgcatccacagttcgcgcctcccaatttagactgcaccccaatctccatgctgaaccacagtggcgttggagcatttcggcctttcgcctctacagaggaccgggagtcgtatcagagcgcctttacgcccgcaaagaggcttaagaattgtcacgatacagaatccccgcacctgaggtttagcgatgctgatggaaaagagtatgattttgggacccagcttccgagcagctccccaggcagtttgaaggtggatgacaccggaaagaaaatattcgctgtgtcaggcctgatcagcgatagggaggcaagctcaagtccggaggatcggaatgaccgatgtaaaaagaaggctgcggcactctttgactcgcaagcacccatctgccccatctgccaggtgctgcttcggccatctgaactgcaagaacacatggagcaggagctcgagcagctggcccagctgccttcctctaagaactccctgttaaaggatgccatggcacccggaacgcctaagtcactgctgctctccgcctctattaagcgggagggggagagccctaccgcgtcacctcatagttcggctactgatgacctgcatcattctgacaggtaccagaccttcttaagagtgcgcgcaaacaggcagacgaggctaaatgcgcgaatcggcaaaatgaagcgtaggaagcaggatgaaggtcaaagagagggatcttgcatggctgaggatgatgccgtcgacatagagcacgagaataataataggttcgaggagtacgaatggtgcggccaaaaacgtatcagggccacaaccttgctggaaggaggctttcggggaagtggcttcataatgtgttccggtaaagaaaaccctgattcagatgctgatctggacgtagacggcgatgacaccttggaatatggaaagccacagtatacggaagccgacgtgattccttgcaccggcgaagagcccggtgaagccaaagaaagggaggcgttgcgcggagctgtgctgaacgggggaccaccctcgacccgcattacccccgagttttccaaatgggctagcgacgagatgccatctactagtaacggggaaagttcgaaacaggaggcgatgcagaagacctgtaagaattctgacatcgagaagattacagaagactccgccgtaactacgtttgaggccctcaaagcacgagtgcgagagctcgagcggcagctctcgcggggagaccgttacaagtgcctgatttgtatggatagctactcgatgccgctgacaagcatccagtgctggcacgtccattgtgaggaatgttggctgcgtaccctgggagctaaaaaactttgtcctcagtgtaataccatcactgcccctggagatttgaggcgcatctacctgtag

SEQ ID NO: 28636 - DNA, 456 bp, synthetic construct
  source 1..456: mol_type = other DNA; note = Synthetic coding sequence
atggagggatgcgtcagcaacctgatggtctgtaatctcgcgtacagcggcaaactcgaggagctgaaagaatcaatcctggcagataagtctctcgcaactagaacagaccaagatagtaggaccgcgctccactgggcctgttcagcgggacatactgagatcgtggaatttctgctgcaattgggggtcccagtgaacgataaagatgacgcaggatggagcccattgcatattgctgcctccgcgggaagggacgaaatcgtgaaggcgctgctggggaagggcgcacaggttaacgctgtcaaccagaatggatgtaccccattacactacgctgcttctaaaaaccggcacgagatcgccgtgatgttattagaggggggtgctaaccctgacgcaaaagaccattacgaagccaccgccatgcatagggcagctgccaaagacacatag

SEQ ID NO: 28637 - DNA, 2220 bp, synthetic construct
  source 1..2220: mol_type = other DNA; note = Synthetic coding sequence
atgggctttagcaacatggaggacgacggcccagaggaggaggaaagggttgccgagccacaggccaactttaacacgccacaagcgctgcgcttcgaagaattactggccaacctcctgaacgaacagcatcaaattgcaaaagagttgtttgaacagctcaaaatgaaaaagccctcggcaaaacagcaaaaggaggttgagaaggttaaacctcagtgtaaggaagtccaccagacactcatcctggaccctgcccagcgtaagcggctgcagcagcagatgcagcagcacgtgcagctcttgactcaaatccatctcctggctacttgtaatccaaatctgaatccggaagcctcgtctactagaatctgtctcaaggaactgggaacatttgcacaatcatcaatcgccctccatcaccaatacaatcccaaatttcaaaccctcttccagccatgtaatctgatgggagctatgcaacttatcgaggacttctctactcacgtgtcgatcgactgcagccctcacaagacagtgaaaaaaaccgccaatgagttcccctgtttgccgaaacaagtagcttggatactggctacatctaaggttttcatgtaccctgaactgctccccgtctgcagcctgaaggccaagaacccccaagataagatcctgttcaccaaagcagaggacaatctgttagcactgggactgaaacacttcgagggtactgagttcctgaatccattgatctccaagtacctgctgacctgtaagaccgcgaggcagcttaccgttaggataaagaacctgaatatgaaccgagctcctgataatattatcaagttttataagaaaacaaaacagctgcccgttctgggaaaatgttgcgaggagatccagccccaccagtggaagcctcctatcgagcgggaggagcatcgattgccattttggctgaaggcaagccttccctctatccaggaagagctgaggcacatggcagacggagcacgagaagtaggcaacatgacagggaccactgaaatcaactctgatcagggcctggagaaggataactcagaactgggatccgaaactcgatatccgcttttgctgccgaaaggcgttgtgctcaaactgaaaccagttgctgatcgctttcccaaaaaggcatggcggcagaaacggagtagtgttctaaagccattactgatccagccctccccgagcttacagccatccttcaatcccggtaagactcctgcgcagtctacacatagcgaagctcctcctagtaaaatggtgttgcgcataccccaccctatacagccagcaaccgttctccagaccgtgccaggtgtgcctccgctaggggtttcaggcggtgaatctttcgagagccccgctgccttacctgctatgcccccagaagccagaaccagttttcccctctctgagtcccagacccttttatcatcagcccctgtccctaaggtaatgatgccttctcccgcttctagtatgttccgcaagccatacgtgcggagacgccctagtaaacgtagaggagcgcgtgcattcaggtgtatcaagcctgccccagtgatccatcccgcaagcgtgatcttcaccgtacccgcaaccacagtaaaaatagtctcccttggaggcggatgcaatatgatacagcccgtgaatgcagccgtggcccagtcccctcagacaatccctattgctacactcctggtcaatcctacaagtttcccttgtcccctgaatcaacctctagtggccagctccgtttccccactgatcgtgtcaggcaacagtgttaatctccccattccctccacacccgaggataaggcccatatgaacgttgatatcgcgtgtgccgtggctgacggggaaaatgccttccagggtctggagcctaaacttgagccacaggaacttagtcccctcagtgccaccgtcttcccaaaagttgagcacagccccggacccccacctgttgacaaacagtgccaggagggattgagtgaaaactcagcttacaggtggaccgtcgtgaaaaccgaagagggtcgacaggcgctggaaccgctaccacagggaatccaggagagtctgaataattcaagtcccggtgatctggaagaggtggtcaaaatggaacccgaggatgcaactgaagagataagcggattcctgtag

SEQ ID NO: 28638 - DNA, 1692 bp, synthetic construct
  source 1..1692: mol_type = other DNA; note = Synthetic coding sequence
atgagccgtccatcctctagggccatttacctccatagaaaggagtatagccagaacctgactagtgagccgaccctgctgcagcaccgcgttgagcacctgatgacctgcaaacagggatcacagcgcgtacagggacctgaggacgccctccagaaactgttcgagatggatgcccagggcagggtctggtcacaggatcttatcctgcaggttcgagatggttggctgcagctgctcgatatagaaacaaaggaggagctggactcataccggctcgattctatccaggccatgaatgtagcacttaatacatgcagctataatagcatcctgtccatcacggtgcaggagcccggactcccagggacttcaacacttctgtttcagtgtcaagaggtgggagccgaaaggttgaaaaccagtctacaaaaagcacttgaggaggagctggaacagaggccgaggctgggagggctgcagcccggacaggatcgttggcgcggacccgctatggagcggccactgcccatggagcaggcccgatatctggaacccggtatcccgccagagcagccacatcagaggactttggaacactctcttccaccttccccacgccctcttcccagacatacgagcgcgagggagccatctgcatttactctgcctcctccccgacgtagctctagccctgaggatcccgaaagagacgaggaagtgcttaatcatgtgcttagagatatcgagctgtttatgggcaagcttgagaaggcccaggctaagaccagcaggaaaaaaaaattcgggaagaaaaataaagaccagggagggcttacacaagcccaatatattgattgttttcagaagataaagcactcctttaaccttctcggtagattggctacgtggctcaaggagacctccgcccctgagctcgtacacatcttatttaagtccctaaattttatacttgcacggtgtcccgaagccggactcgctgcccaggttattagtccccttctcactccgaaggcaatcaatctgctccagagttgtttgtctccaccagaatccaacctatggatggggttaggcccagcctggactacgagtagagcggactggaccggtgatgagcccctcccttatcagcccacatttagcgacgactggcagctgcctgaacctagttcacaggcccctctggggtaccaagacccggtctcccttaggccgagtagtcccaaacccgctcagccagccctgaaaatgcaagtcctgtatgagttcgaggcgcgtaaccccagagaactcaccgtggtccagggggaaaagctggaagttctggaccacagtaaacgctggtggctggtgaagaatgaagccggacgctcgggctatatcccatccaatatcctggaacccctccagcctggaacacctgggacgcagggacagagcccctccagagtgcctatgctaaggttaagctctcggccagaggaggttaccgattggctgcaggctgaaaacttctccaccgcgactgtccgaactctaggctctctaaccggcagccaactacttcgtattcggccaggagaactgcagatgctgtgtccccaagaggcacctcggatcctttctcgtctggaagctgtacggaggatgctgggaatttctccatag

SEQ ID NO: 28639 - DNA, 525 bp, synthetic construct
  source 1..525: mol_type = other DNA; note = Synthetic coding sequence
atgacttgttgtcagacatccttctgtggctatcctagctttagcatcagcggcacctgtggctcttcatgttgtcaaccctcatgttgtgaaacctcttgttgtcaacccagaagctgccagaccagcttctgcggtttcccatccttttcaacgtccggcacttgctcttcctcatgttgtcagccctcatgttgcgagacatcttgctgccagccttcatgctgtgagactagctgttgtcaaccttcctgttgccagatctcttcctgcggaacaggctgtgggataggtggagggataagctacgggcaggaggggtcatctggggcagtgtccacaagaatcagatggtgcaggcccgactcccgagttgagggaacatatctgcccccttgttgcgtcgtgagctgcacaccgccttcctgctgccagttacaccacgctcaggccagctgctgtagaccaagctactgtggacagtcatgctgcaggcccgtgtgttgttgcgagcctacctgctag

SEQ ID NO: 28640 - DNA, 1173 bp, synthetic construct
  source 1..1173: mol_type = other DNA; note = Synthetic coding sequence
atgagaggagacagggggagagggaggggagggaggttcggctcgaggggtggtcctggcggagggtttcgtccatttgttccacatatcccgttcgatttctatctgtgtgagatggcgtttcctagagtaaagcccgcaccggatgaaaccagcttctctgaagcactgctgaaacgcaaccaggatctcgcccctaattccgccgagcaggcatccatactgagcctggtgactaaaattaacaacgtcattgataatcttatagtggctccaggcaccttcgaggtacagatcgaggaagtccgacaagtgggctcttacaaaaaggggaccatgacgacagggcacaatgtcgccgatctcgttgtgatcctgaagattctgccaaccctcgaagcggtcgcagctttgggcaacaaagtggtcgagagcttacgggcacaggatccaagcgaggtattgacaatgctaaccaatgagaccggctttgaaatttctagcagcgacgccaccgtcaagatcctcatcacaactgttcctcccaacctgcgcaaactggaccccgagctgcatttggacatcaaggtgctacagtccgcactggccgcaatccgacatgccaggtggtttgaggagaatgccagccagagcacggttaaggttctgatccgactccttaaggatcttaggatacggttccccggattcgaaccgctcacaccatggattttggacctgttggggcactatgctgtgatgaacaacccaacgcgccagcccctcgcccttaacgttgcctatcggcgatgcctgcagatccttgccgcaggtctgtttctgcccggttctgttggaatcactgatccatgtgaatccggtaacttcagagtacatactgtaatgacactcgaacagcaagatatggtatgctatacagcgcagaccctagtgcgcatcctgagccacggtggttttaggaagatactcggtcaggaaggcgatgcatcttacctcgcctctgagattagtacctgggacggtgtcatcgtgacgccttcagaaaaggcgtatgagaaacccccagagaaaaaagagggcgaggaggaggaagagaacaccgaggaaccaccacagggtgaggaggaggagagcatggagactcaggaatag

SEQ ID NO: 28641 - DNA, 3606 bp, synthetic construct
  source 1..3606: mol_type = other DNA; note = Synthetic coding sequence
atgcccagaggcgaagccccagggcctggacgcaggggcgctaaggacgaagctctcggtgaagaaagcggcgaaagatggagcccggaattccatttacagaggaaactggctgactcaagccatagtgagcagcaagacagaaaccgggtatcagaggaactgattatggtggtacaggaaatgaaaaagtatttcccatctgaacgtaggaataagccctccacactggacgcgttgaactatgcccttcgatgcgtgcactcggtgcaagcgaactccgagttttttcaaatcctatcacaaaacggagcccctcaggcagatgtgagcatgtacagtctggaggagctggccaccattgcatctgagcatactagcaaaaacaccgatacgttcgttgctgttttcagcttcctgtctggaaggttggtgcacatttctgagcaggccgctctgatcctgaaccgcaagaaggatgtactcgcaagctctcactttgtggatctactcgcccctcaagacatgcgcgtcttttacgcccacacagcacgagcgcagctccccttttggaataactggacacagcgggctgctagatacgaatgcgccccagtaaaaccctttttttgccgaataaggggcggagaagatagaaagcaagagaaatgccatagtccctttcggataatcccttacttaatccatgttcaccacccggctcagcctgaactcgaaagcgaaccatgctgcctgaccgtagttgagaagattcattccggctacgaggccccaaggatccccgttaacaagagaatattcacgacgacacatacaccgggttgtgtcttcctggaagtcgacgaaaaagctgtacctctcctggggtatctgccccaggacctcattggaacaagcatccttagttatctccaccctgaggatcgaagcttgatggtggctattcaccaaaaagtgttaaaatacgctggccacccaccctttgaacatagcccgatccgattttgcacgcagaatggcgattatattatcctggatagctcttggagttcattcgtgaacccatggagcaggaaaataagctttatcattggacggcacaaggtgaggacaagccctctcaacgaggacgtcttcgcaaccaagatcaaaaagatgaatgacaacgacaaagatattaccgaactgcaggaacaaatttataagctcttactgcaaccagtgcatgtatcggtgtcgtcgggatacgggtcactcgggtctagcgggtcccaggaacagctcgtcagtatcgcctcatcttccgaggccagcggccaccgggtggaggagacaaaggctgaacagatgaccctacagcaggtttatgcctctgtcaataaaattaagaacctcggccagcaattgtacatcgagtccatgactaaatctagcttcaagcctgttacaggtacaagaaccgaacccaatggaggaggagaatgcaaaaccttcacatccttccaccaaacactcaaaaataactccgtgtacactgagccctgcgaagatttaaggaatgacgagcacagtccatcctaccaacaaataaactgtatcgatagcgtaatcaggtacctcaagtcctacaacatccctgccctaaaaaggaaatgtatctcctgtacaaacacaactagcagttcaagcgaggaagataagcaaaatcacaaagcagacgacgtgcaggcactacaggccggactgcaaatacccgcaatcccaaagtcggagatgccaaccaacggcaggtcgatcgataccggtgggggagccccacagattctcagcaccgctatgttaagcctggggtccgggatcagtcagtgcggatacagcagcaccatcgtgcatgtaccacccccagaaacggctcgtgacgctacactgttctgcgagccttggaccctcaatatgcagccagcaccactaacatccgaggagttcaaacatgtgggcctcactgccgctgttctgtctgctcacactcaaaaagaggaacagaactacgtcgataaattccgagaaaagatcctgagctcaccttactcatcctacttacagcaagaaagcaggagcaaagccaagtatagctattttcagggtgactctacttccaagcagactaggtccgcgggttgtaggaagggaaagcataagagaaagaagctgcctgagcctcccgatagctccagttcgaacacaggctccggaccaaggcggggagcacatcagaacgcacagccctgttgcccatctgctgcgagtagccctcataccagtagcccaactttccctcctgcagcgatggtgcctagtcaagcaccatacctcgttccagcattcccactgcctgccgctacttcccctggccgtgaatatgctgccccaggaaccgctcctgagggactgcatggcctgcccctcagcgaggggctccaaccgtatccggcttttccctttccgtacctggacacattcatgacagtttttttgcctgacccacctgtttgcccactgttatcgcctagctttctgccctgtcccttcctcggagccaccgcatcctccgccatcagccctagcatgtctagcgccatgtcccctactcttgatcctcctccgtctgtgacttctcagagaagagaagaggagaagtgggaggctcagtccgagggacaccccttcattacctcaaggtccagcagtccgctgcagctgaacttgctacaagaagagatgcccaggccatcggagagcccagaccaaatgagacggaacacatgtccacagacggagtattgtgtaaccggaaacaacggcagcgaatcatcacctgcaactacaggagctttgtcaaccggcagtccccctagggagaacccgagccatcccacagcctctgctttgtcgaccggatctccacctatgaagaacccaagccaccctaccgcctctgccctgagtacaggcagccccccaatgaagaacccttctcatcccaccgctagcaccctatcaatgggcctgcccccatctcgtactcccagccacccaaccgctacagtgctgagtaccggatctcccccaagcgaatcccctagcagaaccggaagcgcagcttccgggagtagtgattctagcatctacctcacctcctctgtctactcaagcaaaatcagtcagaatggtcagcagtctcaggacgtacaaaagaaagaaacattccctaatgtggccgaggagcctatctggcgaatgatcaggcaaactccagaacgcatcctgatgacctaccaggtgccagagagagtcaaggaggtcgtgcttaaagaggacctagagaagctcgaatccatgagacaacagcagccccagttcagtcacggccagaaggaagaactcgccaaagtttacaattggattcagtcacagacggtaacccaagaaatcgatatacaggcctgcgtgacctgcgagaatgaagactccgccgacggagcggctactagctgcggtcaggtcctggtggaggactcgtgctag

SEQ ID NO: 28642 - DNA, 1296 bp, synthetic construct
  source 1..1296: mol_type = other DNA; note = Synthetic coding sequence
atgtccgatcagattaagtttattatggattccttgaataaagaacctttcagaaagaattacaatctgatcacttttgactctttggagccgatgcagttgttgcaagtgctgtccgatgtcctggcggaaatagaccctaagcagttggtggatatccgcgaggaaatgccagagcagactgctaaaaggatgctgtccctcctgggtatcctgaaatacaagccaagcggtaacgcaactgacatgagtacctttagacaaggactcgtgattgggagcaagccggtgatttaccctgtgttgcattggttgctgcagcgtacaaacgagcttaagaagcgagcctaccttgcaaggttcctgattaaactcgaggtcccatcagaattcttgcaggacgagacggtggcagacaccaataagcagtacgaagagctcatggaggcattcaagaccctccataaggagtacgagcaactgaagattagcggcttttcaaccgctgaaatacgtaaggacatatcggctatggaggaggagaaggaccaactgatcaaaagagtcgaacacctcaaaaagcgggttgagactgcacagaatcaccagtggatgttgaagatcgcccgacagctgagagtggaaaaagagcgggaagagtaccttgcacagcagaagcaggaacagaagaatcaactcttccatgctgttcagcggctgcaaagagtgcaaaaccagctcaaatctatgcgacaggccgcagcagacgctaagcccgaaagtctcatgaaacgcctggaggaagagataaagtttaatctatatatggtaactgagaagttcccaaaggagctcgagaacaaaaaaaaagaactacactttttgcagaaagtcgtatctgagccagcaatgggacactcagatttactcgagctggagagtaagatcaacgaaattaacaccgaaataaaccaactgatcgaaaaaaagatgatgcgaaacgagcccattgaaggaaaactgagcctttatcgacagcaagcatccataatatcccggaaaaaggaagctaaagccgaggaactacaggaggcaaaggagaaactggcctccctggaacgggaagcctcggtgaagagaaaccagacaagggagtttgacgggacggaggtccttaagggagacgagaggcaggacctgacactctcgccacggctggagtgtggcggagtaatcatggcttactgtagcctgaagcttcttggctctagcgacccgcctaccagcgcctcttag

SEQ ID NO: 28643 - DNA, 1119 bp, synthetic construct
  source 1..1119: mol_type = other DNA; note = Synthetic coding sequence
atggccagtagtgcatccgctcgcactccagccggaaaacgggtcatcaaccaagaggagctccgaaggcttatgaaagagaagcagcggctgagcaccagccgcaagaggatagaaagtccgtttgccaaatataataggcttggccagctttcctgcgccctgtgcaatacgccagtaaaatctgaactcctctggcaaacccacgtccttgggaaacagcatcgggaaaaggtggctgaactgaaaggcgctaaagaggcatcccagggatcctcagcctcgtccgcccctcactctgtgaagcggaaggcgccagacgccgatgaccaggacgtgaagcgagctaaagcgacattggtacctcaagtccagccgtccacctccgcctggaccacgaacttcgacaaaatcgggaaggaatttatccgagcgaccccgtcaaaaccctctgggctctccttgttacctgattacgaggatgaggaggaggaagaagaagaagaggaaggagatggcgagagaaagcggggagacgcttccaaacctctaagtgacgcccagggcaaggaacatagcgtgtcctcgagcagagaggtgacttcaagtgttctacctaacgattttttttccacaaaccccccaaaggcaccaataattccacattcagggagcattgaaaaagcggaaattcacgagaaggtcgtggaacgacgagagaacacagcagaggcgctgcctgaagggttttttgatgaccccgaggtggacgcaagagtgaggaaagtagatgcccctaaggaccagatggacaaagagtgggacgagtttcagaaagcaatgaggcaggtgaacacaatatccgaagctattgtagcagaggaagatgaggaaggcaggctcgatcgacagatcggtgaaattgatgagcagatcgaatgctacagacgagttgaaaagttgcgaaatagacaggatgagataaaaaacaagctcaaagaaatactgacaatcaaggaactgcagaagaaagaagaggagaatgcggattcagatgatgaaggtgaacttcaggatctgctgtcccaagattggcgggttaaaggggctctcctgtag

SEQ ID NO: 28644 - DNA, 1782 bp, synthetic construct
  source 1..1782: mol_type = other DNA; note = Synthetic coding sequence
atgtctcggcctagttctcgcgctatatacctccatcgcaaggagtactcccagaacctgaccagcgagccaaccctgttgcaacatcgcgtggagcatctgatgacatgcaaacaaggctctcagagagtgcagggaccagaagatgccctgcagaagctgttcgagatggacgcccagggccgtgtttggagtcaggacttaatcctccaggtacgggatgggtggctacagctcctcgacattgaaacgaaagaggagcttgattcataccgacttgatagcattcaggccatgaacgtggcactgaatacatgttcctacaattcgattctttcgattaccgtgcaggagcctggccttccaggaacctccacactactttttcagtgccaggaggtgggtgccgaacgcctcaaaaccagcctccaaaaggcgctggaagaagaactggagcagcgcccacggttgggtggtcttcagcccggtcaggacagatggaggggccctgccatggaaaggcccctgcctatggaacaggctcggtatctggaacctggtatacctcctgagcagccacaccagcgcacccttgagcactccttaccccctagtccccgacctcttccaagacacacgtccgcacgtgagccctccgccttcaccctccctccaccgaggagaagcagctctcctgaggaccccgaaagagatgaagaggtcttgaaccacgtcctacgggacatcgagctgttcatgggaaaactggagaaagcgcaagcaaaaactagccggaagaagaaattcggcaagaagaacaaggatcagggcggacttactcaagctcaatatatagattgctttcagaagattaaacattcatttaatctgctggggaggctggccacgtggctgaaagagaccagtgccccagaactggtgcacatcttgtttaagagcctgaattttatcttggcacggtgtcctgaggccggactggccgcacaggttattagcccgcttctgacacccaaagcaattaatcttctccagagttgcctgtctccacctgagagcaacctgtggatggggctgggacctgcttggactacatcccgcgctgactggaccggcgatgagccattaccctatcagcccacctttagcgacgactggcagttacctgaaccctcctcccaggcacccttaggatatcaggatcctgtatccctgaggcggggaagccatcggttaggctcaacgagccactttcctcaggaaaagacccacaatcacgaccctcagccaggcgacccaaactcccgtccttcttcccccaaacctgcgcagcctgccctaaaaatgcaggtcctctatgaatttgaggctagaaatcctagagagctgactgttgttcaaggggagaaactggaggtcctggaccacagcaaaaggtggtggcttgttaagaatgaagccggaagaagtgggtatattccttctaatattcttgagcctctccagcctggaacccccggtactcagggtcaatctccgagtagagtaccaatgcttagacttagttcccggccagaggaggtcacagattggttgcaggccgaaaactttagtaccgccaccgtccggacccttgggtcattgactggatctcagctcctgcgcatcaggccaggggagttgcagatgctctgccctcaggaagcccctcggatcctctcccggcttgaagccgtgcgacgcatgttgggaatatcaccgtag

SEQ ID NO: 28645 - DNA, 1050 bp, synthetic construct
  source 1..1050: mol_type = other DNA; note = Synthetic coding sequence
atgaagttgacttctgagaagttaccaaagaatccattctacgcctctgtgtcccagtacgccgcaaagaaccaaaagttctttcaatggaagaaggagaaaaccgagtcagactacactcatgctaacctcgtggataaggccctccaactgctgaaggagaggatcctgaagggcgacactcttgcttactttctccgcggacagctgtacttcgaagagggctggtacgaagaagcccttgagcagtttgaggagattaaggagaaggaccaccaggcaacctaccagctcggtgtcatgtactatgatggactggggacgacgctggacgctgaaaagggggtggattatatgaagaagatactggactcaccctgtcccaaagcacgccacctaaagttcgccgcagcatacaacctgggtagggcctattacgaaggaaagggggtcaagcgttccaacgaggaggcggagcggctatggctgatcgccgctgataacgggaacccaaaggcctcagtaaaggcacagagcatgctgggtctctattactctactaaggaaccgaaggagcttgagaaggccttctattggcattcggaggcgtgcggaaatggcaatctggagtctcagggagccttgggcttgatgtacctctacggacaaggcataagacaagacaccgaagcagcactgcagtgcctgcgggaggcagcagaacgcggtaacgtttacgcccagggtaatctcgtcgaatattattacaagatgaagtttttcaccaaatgtgtggccttttcgaagaggattgccgattacgatgaggttcacgacatccccatgatcgcgcaggtgacggattgcctgccagaatttattggacgtggaatggccatggcctccttctaccacgcccgttgcctacagctgggactgggcattactcgcgacgagacgaccgccaagcattactattccaaagcctgtaggttgaatcccgcacttgccgatgagctgcatagtcttttaattcgtcagcgtatttag

SEQ ID NO: 28646 - DNA, 1236 bp, synthetic construct
  source 1..1236: mol_type = other DNA; note = Synthetic coding sequence
atgggactgaagaagatgaaagggctatcttacgatgaagcttttgctatggccaatgatccactggaaggttttcatgaagtgaacctggcttcacccacgtcccctgatctcctgggtgtatatgagtccggcacgcaagagcagaccacctctcctagcgtcatctatcgcccacatccttcagctctgtctagcgtaccaatacaggcaaatgccttagatgtgtcagaactccctacacaacctgtctactcttctccgaggaggcttaattgcgcggagatcagcagcatttccttccacgtgaccgatcctgctccatgcagcacaagcggggttactgcgggactaacaaagctgactacacggaaggacaattacaacgctgaaagagagttccttcaaggggcaacaattactgaagcgtgtgacggatcggatgatatctttggactttcaacagattccctgtcacggttgcggtctccctccgtgctcgaagtcagggagaaggggtatgagcggctgaaagaggaactggccaaggcccagcgcgagttgaagttgaaagacgaagaatgtgagaggctctcaaaagtccgagatcaactcggacaggagctggaagaactcaccgcctcattgttcgaagaagcccacaagatggtgcgcgaagcgaacattaagcaggccacagccgaaaagcagttgaaagaagcccagggaaagattgacgttctgcaggctgaggtggcagccctaaaaactctggtgctgtccagctcccccacttcacctacgcaggagccccttcctggaggcaagactcccttcaaaaaagggcacacacgaaacaaaagtacttctagcgccatgtccggaagtcatcaagaccttagtgtgattcagcctattgtgaaggactgcaaggaggccgacctaagcctttacaacgaattccgcctgtggaaggatgagcccacaatggaccgaacctgcccttttttagacaaaatttatcaagaggacatatttccgtgcctgaccttctcaaagtcagagctggcttctgccgtgcttgaagcagtagaaaataataccctttcaatcgagcccgtcgggctgcagcccatccggtttgtaaaggcttctgccgtggagtgcggaggaccaaaatcgctgctgtacgtaacatttctgcacaccttcgatacctttagtagggattcctag

SEQ ID NO: 28647 - DNA, 2148 bp, synthetic construct
  source 1..2148: mol_type = other DNA; note = Synthetic coding sequence
atgttcgggcgaaagagaagtgttagcttcggcggttttggctggatcgacaaaaccatgctagccagtctgaaggtgaagaaacaggagctcgctaacagttccgatgctacacttcctgacaggccattgtcaccaccactcacagctccgcctaccatgaaatcttcggagttttttgaaatgctcgagaagatgcaagatgactacattccgtacccatctattgatgaagtcgtggagaaaggtgggccttatccccaggtgatccttccccagttcggagggtactggattgaggacccagagaacgtaggtactcctacctcccttggatccagtatctgcgaggaagaggaggaggacaacctttcacctaatacatttggctacaagttagagtgcaaaggcgaggccagagcctatcgcagacatttcttgggcaaggatcatctgaacttttactgcacaggatccagtctgggcaacctgatactaagcgtgaaatgtgaggaggccgaaggcatagaatacctccgggtaattttacgaagtaaacttaaaacagtccatgaaagaatcccgttagccggtctcagcaagctgccctccgtgccccagatcgccaaagccttctgcgacgacgccgtcggtctacgcttcaatccagtgctctatcccaaagccagccaaatgatcgtctcctacgacgaacatgaggttaacaacacctttaaattcggggtgatctatcagaaagcacggcaaacattggaagaagaactgttcggaaacaatgaggaatccccggcattcaaggagttcctggacttgctgggcgatacaatcaccctccaggactttaaggggtttagaggcggattggacgtcacccatggccaaacgggtgtggagagcgtctataccacctttcgcgacagggagatcatgtttcatgtcagcacaaaattgcccttcaccgatggtgacgcccagcagctgcagaggaaaagacatattggcaacgacatagtcgctattatctttcaggaggagaacacccccttcgtgccagatatgatagcatcaaactttttacatgcatatatagtcgtgcaggttgaaacccccggtaccgagacaccgtcttataaggtttcggtcactgcccgagaggacgtgccaacattcggtccccctctgccttctcccccagtgtttcagaaagggcctgagtttagagagttcttgctgacaaagctgaccaacgccgagaacgcttgttgtaagtccgacaagtttgccaagcttgaggatagaaccagggccgcactgctggataacctgcacgatgaactccacgctcacactcaagcaatgcttggactggggccagaggaggataaattcgagaatggcggtcatggtggctttctcgagtctttcaagcgcgcaatccgggtacggtcccactcgatggaaaccatggtggggggtcaaaagaagtcccatagcgggggtattcccggtagtctgtcgggcggaatctcccataattctatggaagtgactaagactacgttctctccaccagtggtcgccgctacagttaaaaatcagagccgtagccctattaaaaggaggtcagggctttttcccagactgcataccggtagcgagggacaaggggactcccgcgctagatgcgactccacatcctctacccccaaaacacccgacggcggtcactccagtcaggaaattaaatctgaaaccagctctaacccaagttcaccagagatctgccccaataaggagaaaccttttatgaaactgaaagaaaatggacgcgctatctcccgatcttccagttcaacctcttccgtgtcttctaccgctggggaaggcgaagccatggaagaaggggactctggtggctctcaaccttccaccacatccccgtttaagcaggaagtgtttgtttactccccaagtccaagtagtgagagtccctcactgggggctgccgcaacgcctataataatgagccgctcaccgacagatgcaaagagcagaaattctccacggagtaatctgaagtttagatttgacaagttgtcccatgcgagctccggcgctggtcattag

SEQ ID NO: 28648 - DNA, 2271 bp, synthetic construct
  source 1..2271: mol_type = other DNA; note = Synthetic coding sequence
atggaggaggagctgaaatgccccgtgtgcgggagtctatttcgggaacctattattttaccttgctctcacaacgtttgcctgccatgtgcccgaaccatagcagtgcagactcctgatggcgagcagcacctgccacagccgttactgctcagccgcggtagtggcctccaagcgggagcagctgctgccgcatctctggaacatgacgccgctgctggacccgcttgcggaggggctgggggttctgcggcaggtgggctgggcggaggcgctgggggtggcggtgaccacgcagataaacttagcctttatagcgagacagattccggctacggtagctatacaccatctctgaaaagccccaacggagtcagggttttacccatggtccctgcaccgccaggatcgtctgcagccgctgctcgaggagctgcttgttcatcattgagtagtagctcaagctcaattacttgtccacagtgtcacaggagcgcttcattagaccaccggggtctgcgcggatttcagaggaatagactcctcgaggctatcgttcagaggtaccagcaagggaggggcgctgtgcctggaacttcggccgctgcggctgtggcgatttgtcaactgtgtgaccgcaccccacccgagcccgcagccactctttgtgagcagtgcgacgtcctttattgttccgcctgccagttaaaatgccaccccagcagaggcccttttgctaagcacagactggtacagccccctccaccccctcctccacctgccgaggccgcttctggtccaaccggcactgctcaaggggcaccgagtggcggtggcggatgtaagagcccaggtggggcaggagctggtgctacaggcggaagcacagcacggaaatttccaacctgccccgaacacgagatggagaactactccatgtactgtgtgagttgtagaactccagtgtgctacctttgcctcgaggagggccgacatgcaaaacacgaagtgaaaccactgggagccatgtggaaacagcataaggcccaactctcccaggccctaaatggagttagcgacaaggctaaggaggccaaggaatttttagtgcagctgaagaatatattacagcagatccaagagaacggtttagactatgaggcctgtctggttgcccagtgcgatgcactggtggacgcgctgacacgacaaaaggcaaaactcctgacgaaggtgaccaaagaacgggagcacaaattaaaaatggtatgggatcaaatcaatcactgcacactgaaactgcggcaaagcaccggcctgatggagtattgtctggaggtgattaaagagaatgatccttcgggcttccttcagatctccgacgcgttgattaagcgcgttcaggtgtctcaagagcagtgggtgaaaggggcattagagcctaaagtttcggctgaatttgatctcacactcgattctgagcccctgctgcaagcaatccaccagctagacttcatccagatgaaatgcagggtcccccctgtgcccctcctgcagctcgaaaagtgctgtacaagaaacaacagcgtgactctggcctggcggatgcccccattcacgcactcacctgtggacggatatatacttgagctggacgacggcgcaggcggtcagttcagagaagtgtatgtcgggaaggagaccctgtgtaccattgacggcctgcatttcaactctacgtacaacgccagggtgaaagcttttaactcttccggcgtgggaccatatagcaagacggtggttctacagacatcagacgtcgcctggtttaccttcgaccccaacagtggccatcgggatatcattctgagcaatgataaccagacggctacctgctcatcctatgacgatcgcgtcgtcctcggcaccgccgctttctccaaaggtgtccactactgggagctacatgttgacagatacgataatcaccccgaccccgcatttggagtggcacgggcatccgtggtgaaggacatgatgttgggcaaggatgataaggcctgggcaatgtatgtagacaataataggagttggtttatgcattgcaactcccacactaatagaaccgagggtggcgtttgcaaaggggctaccgtgggagtcttactggaccttaataaacacactcttacatttttcatcaacgggcagcaacagggtccaaccgctttcagccatgaggttcagcctagcgtgacaagcctgttttag

SEQ ID NO: 28649 - DNA, 2352 bp, synthetic construct
  source 1..2352: mol_type = other DNA; note = Synthetic coding sequence
atggaggaggaactgaagtgtcccgtgtgcggttcactgttcagggagccaattattctgccctgcagtcataacgtatgcctcccttgcgctagaaccattgccgtgcagaccccagatggggaacagcaccttccacagcccctgctcctttctcgcggttcaggactacaggccggtgccgcagcagccgcaagcttggaacatgacgcggcagcaggcccagcctgcggcggagctgggggttccgctgcgggaggtttggggggaggcgcaggcggaggcggtgaccacgcagataaactgtcactctatagcgagacagattcaggttacgggtcctacacgccttcactgaagtctcctaatggggtgagagtccttccgatggtcccagccccaccaggttcttctgccgctgccgctcgcggtgccgcatgctccagcctgtctagcagtagctcatctatcacctgcccgcagtgccaccgaagcgccagtcttgaccaccgcggactgaggggcttccagcgcaataggctgcttgaagccatcgtacagcgctatcaacagggtcgcggagcagtaccaggtacatccgccgctgccgctgtcgctatttgccagctgtgcgacagaacaccaccagagcctgccgctacactctgtgagcaatgtgatgtgctgtactgtagcgcttgtcaactgaagtgccatccgagccgcggacctttcgctaagcaccggctggtgcagcctcccccacctccacctccacccgctgaggccgcatccgggccaactggcactgctcaaggtgccccatcaggcggaggcggatgcaaaagcccaggcggagccggagcaggcgctaccggaggttctactgccagaaaattccctacgtgtcctgaacacgaaatggagaactactccatgtactgtgtgtcatgccgcacgccagtatgttatctgtgcctggaagaagggcgacatgctaaacacgaagtgaagcccttgggggctatgtggaagcagcataaggcccaactgagccaggcgctgaacggggtatccgacaaggctaaagaggccaaagaattcctcgtacaactaaagaatatcctccaacagatccaggaaaatggacttgactacgaggcctgtctcgtggctcagtgcgacgctcttgtggatgcactgacacgacagaaggctaaactgcttacaaaagttacaaaggagagggagcacaagctaaagatggtatgggaccagatcaatcattgtactttgaaactgcggcaaagcacaggcctgatggagtattgcttagaggtaattaaggaaaacgatccctctgggtttctgcaaatcagcgacgccctgatcaagcgagtccaggtgagccaggagcagtgggttaagggcgcactggagccgaaggtgtcagccgaattcgaccttactctggattctgagccactccttcaagccattcatcaattagattttatccaaatgaaatgtagagtgccacctgtgcccctgttacagctggagaaatgctgcaccaggaacaatagtgtgactctggcctggaggatgccccctttcacacatagccccgtcgacggttacattctggaactcgatgacggtgccggtggccagtttcgagaagtttatgttggcaaggaaaccttatgtactatcgatggcctgcattttaattccacttataatgcccgtgttaaggcctttaattcatccggtgtggggccttactcaaaaacggtggtccttcagacttccgacgtcgcgtggttcacttttgatcctaatagtggccaccgcgacatcatcctgtctaacgataaccagaccgccacctgttctagttacgatgacagggttgttctggggacagcggctttctccaaaggggtacattattgggaactgcatgttgaccgctatgataatcaccccgaccccgcatttggcgtcgccagagcctctgtggtcaaagatatgatgcttggtaaagatgataaagcctgggccatgtacgtggacaataatcgttcttggtttatgcactgtaacagccataccaaccgtaccgagggcggtgtgtgcaagggggctacagtcggcgtacttctggaccttaataagcacactctgaccttctttatcaatggacagcagcaggggcctaccgccttttcgcatgtggacggagtttttatgccagctttgtcattgaaccgaaacgttcaggtcacattacatactgggcttgaggtgcctaccaatctcggacggccaaaactgtctggcaattag

SEQ ID NO: 28650 - DNA, 471 bp, synthetic construct
  source 1..471: mol_type = other DNA; note = Synthetic coding sequence
atggtaccggtcttcacatcctcagcgctgcccgtgaaggacgttgaggataagccggaacagcagacacggacacgggaaaccgacaagagtcccacaagtaccgagcccagacaacaacccagcgccctcttcgctcggggaaataggaaggccgttaagtcacctcagagatcctcctcaaaaattaaagagaataaacatccttttgccctgtatggatggggagagaagcagactgacaccggcagtcaaaaaacacacaacgtgtgcgcctctgcacccgtccacgaaatccacgagtccgccctccgcgctaaaaatcggcgtcaagttgaaaagaggaaactggtagctcagcgccagcgcgcacactctgttgatgtcgaaaagaatcgcaaaatgaaagcttcatcctcagagaatccttggatgactgagtacatgaggtgctacagtgccagggcttag

SEQ ID NO: 28651 - DNA, 813 bp, synthetic construct
  source 1..813: mol_type = other DNA; note = Synthetic coding sequence
atgtcaccgggatccggagttaagagcgaatacatgaagcgataccaggagccacgctgggaggagtatggcccatgctatcgtgaactgctgcactaccgcttggggcgaagactcttggaacaggctcacgccccttggctctgggatgactggggcccagccggttctagcgaggacagtgctagtagcgaatccagcggggcaggtggacctgcgcctaggtgcgcgcctccttctccgcctccacccgtggagcccgcaactcaagaggaagctgagaggagggcccgtggcgcacccgaagagcaagacgcagaggccggagatgccgaggcagaagatgccgaagatgcagccttaccggctctacctgtcaaggatgtggaggacaaacctgagcagcagaccagaaccagagaaacggacaaatctccaacttctaccgaacccaggcagcagccctccgcattgtttgctcggggtaaccgcaaggcagtgaaatcaccacaacgttctagttccaagattaaagagaataaacatcctttcgctctctatgggtggggagagaaacagacagacactggctctcaaaagactcacaacgtttgtgcctccgctccagttcacgaaattcacgagagcgccctgagagccaaaaaccggcgacaggtggaaaaaaggaaattggtagctcagcgccaacgggctcatagtgtcgacgtggaaaaaaacaggaagatgaaagcgtcatcttccgaaaatccttggatgactgaatacatgcggtgctattcggcgagggcatag

SEQ ID NO: 28652 - DNA, 1158 bp, synthetic construct
  source 1..1158: mol_type = other DNA; note = Synthetic coding sequence
atggcagctcccgatctctcaactaacctccaggaggaggccacttgtgcaatttgccttgattattttacagacccggtgatgaccgactgtgggcacaacttttgcagggagtgtattcgaagatgctgggggcagccggagggtccctatgcttgtcccgaatgccgagagctgtccccacaacggaacctgagacctaaccgcccactcgctaagatggcggagatggccagacgactacatccgccttcacccgtcccacaaggcgtttgtccagctcatcgcgaaccacttgcggctttttgcggtgatgagctgaggcttttatgcgccgcttgcgagcgatcgggagaacactgggctcacagagtgaggcctttgcaggatgctgcagaggatctgaaagcaaagctggagaaatctctggagcatcttcgtaaacagatgcaagatgccttactgtttcaggcccaagctgatgagacctgcgtactctggcagaaaatggtggaaagccaacggcagaacgtactcggtgaatttgagaggctgcgtcgccttttggctgaggaggagcagcagcttctgcaacgattggaggaggaggaattagaagttctgcccaggctgcgtgaaggagcggctcacttaggccagcaaagcgctcacctcgctgagttgatagctgaattggagggccgttgccagctaccagcactcgggctgttacaggacatcaaggatgcactgaggcgggtccaggacgtcaaattgcaacctcctgaggtagttcccatggaactcagaactgtatgccgagtgcccggactggttgaaacactgcgccgttttcgcggacggtgcggaggccctaggtggggcgatgattctagacgcggacccgctaaagaccttgggtcccagcccagagtgctctgtccagccacggcatcttcaaaattgacagtgtcctggtggtgggtggtcggtaaaaccagctctgcacatacaagcgatatcagctgcgtgggcatctttacccctaataatagctctacttccggcaatgagttgggcattcagggttttcatagcgcattgaaccgcatcgcatcagcagacacaaccggggtctctacagacccgacagattag

SEQ ID NO: 28653 - DNA, 1251 bp, synthetic construct
  source 1..1251: mol_type = other DNA; note = Synthetic coding sequence
atgcccctgtataatgatagttttcacgaaatctcccacaaaggccgtcgccacactctggtgctgaagtccatccagcgagctgatgcgggaattgtgcgcgcttctagcctgaaagtgtccaccagcgcaaggttagaggtacgtgtaaagccagtggtctttctaaaagccttggacgacctgtctgccgaagagaggggcactctcgctttacagtgtgaggtgagcgaccccgaggctcatgttgtttggcggaaagacggagtgcagctgggaccttctgataagtatgactttctgcacacagcagggacaaggggcttggtggtacatgatgtgagcccagaagatgcaggtttgtacacttgccatgtaggttctgaggagacccgcgcaagggtcagagtgcacgatctccacgtcggcattacaaaaaggctcaaaacaatggaggtgctcgaaggagagtcttgttcattcgaatgcgtcctgtctcacgagtccgccagcgacccagcaatgtggacagttggaggaaaaaccgtgggctcgtcctctaggttccaggccacaaggcagggcagaaagtacattctggtagtgagagaggctgctccgagcgacgctggagaagtggtcttcagcgtcaggggccttacatcgaaggcttctctcatcgtcagagaacggccagcagcaatcatcaagccactggaggatcagtgggtagctcccggagaggacgtcgagctcagatgtgagctgtctagggccggaactccggttcactggcttaaagatcgcaaggcgattagaaaaagtcagaaatatgacgtcgtctgtgaggggaccatggcaatgctggtcatccggggagctagtctaaaagatgccggagagtacacatgcgaggtagaagcctccaagtctacagccagcctgcacgtggaagagaaagccaattgctttacagaagaactcactaatcttcaggtagaggaaaagggtaccgccgtgtttacatgcaaaacagaacatcctgccgcaaccgtgacatggagaaaaggcctactggagttacgcgcaagcggaaagcatcagccatcccaggagggcctgactttgcggctcacaattagtgccttggagaaggccgactcggacacctacacctgcgatattgggcaagcacagtccagggcccaactgctggtccagggagaggcggcaaagtgcgccagagcgtag

SEQ ID NO: 28654 - DNA, 2130 bp, synthetic construct
  source 1..2130: mol_type = other DNA; note = Synthetic coding sequence
atggagaaacaccggggagtcctggaatgtcaggtcagccgtgccagcgcccaggtaagatggttcaaaggctcccaagaacttcagcccggtcccaagtacgagttggtgtctgatggcctctataggaaactgatcatatctgatgttcacgccgaggatgaggacacctatacttgtgatgctggtgacgtcaaaacatcagctcagttcttcgtggaggagcaatctatcaccatcgtaagagggctgcaggacgtcaccgtgatggagcccgctcctgcctggttcgaatgtgaaaccagcatcccaagcgtgcgaccacccaaatggttgctcggcaaaacagtgctgcaggcgggaggcaatgtgggcctcgaacaggaaggaactgttcaccgcctgatgctgcgcagaacctgcagtaccatgactggtccggtgcacttcaccgtgggtaagagtcgctcctcagccagactggttgtaagcgatattcccgtggtactgactaggcccttagagcccaagaccggtcgagaactgcagtccgtcgtgctaagctgcgactttcggcctgctcctaaagccgttcaatggtataaggacgacacaccacttagccctagcgagaaatttaagatgtcacttgaggggcagatggcagagctgcggattctcaggctgatgcccgcagacgctggcgtctatcggtgtcaggcagggagtgcgcactcttctaccgaggtgactgtcgaggcaagggaggtgaccgtgaccggtccccttcaggacgccgaggccacggaagagggttgggctagcttttcctgtgaactgagccatgaagacgaagaggtagagtggagtcttaacggaatgcccctatataatgactcttttcacgagatttcccacaaaggtcgaaggcatactctggttttgaagagcattcagagggcagatgctggtattgtgcgcgctagcagcttgaaagtgagcaccagcgccaggctggaagtacgcgttaagccagtcgtgttcctgaaagccctggacgacctgagcgccgaggagagggggaccttggcattacagtgcgaagtgagtgatcccgaggcacacgtcgtgtggcgcaaggatggggttcagctggggccttctgataaatatgattttctacataccgctgggactcgcggactggtggtgcacgatgtaagtcccgaggatgctgggttatatacatgtcatgtaggctccgaggaaactagggccagggttagggtacacgacttacatgtggggatcaccaaaagactgaagactatggaggtactagagggcgagagctgctcgttcgagtgtgttctttcacacgaaagtgctagcgacccagcaatgtggaccgtagggggaaaaaccgtcgggtcgtcaagtcgcttccaggccacccggcaaggacggaaatatattctcgtcgtgcgagaagccgcaccttcagacgcaggtgaggtcgtgttctccgtgagaggcctcacatccaaggcatctctaatcgttcgagagcgacccgcagccattataaagcctttggaggatcaatgggtcgcccctggtgaagacgtggaactgcggtgcgaactctctcgagccggtacacctgtacattggttgaaagaccggaaggcaatcaggaaaagccagaagtacgatgtggtgtgtgaagggaccatggcgatgctcgtgattcgtggggcaagtcttaaggatgcaggtgagtacacctgcgaggtggaggccagtaagtccaccgcatctctgcacgtagaggagaaggcaaactgctttaccgaagagctgaccaacctgcaggttgaggaaaagggaaccgcagtttttacctgcaagactgagcacccagccgcaacagtgacttggcgcaaggggctgctcgagctgagagcctcaggtaaacaccagccctcacaggagggcttgaccctgcggctcacgatcagtgccctggaaaaggccgatagtgatacctatacatgcgatattgggcaagcccagagtcgagcccagctgcttgttcaaggggaggctgccaaatgcgcaagagcttag

SEQ ID NO: 28655 - DNA, 16809 bp, synthetic construct
  source 1..16809: mol_type = other DNA; note = Synthetic coding sequence
atgctggtgattagaggagcttctctcaaagacgcaggagagtatacatgcgaggtggaagcaagtaagtccaccgcgtctcttcacgtggaggagaaggccaattgcttcaccgaggagctcaccaatttgcaggtggaggaaaaaggcacagcagtattcacgtgcaagactgagcaccctgcggcaaccgtcacttggaggaaaggcttgcttgagctcagagcatccggaaagcaccagccgagccaagaaggcctgacccttaggcttacaatcagcgcccttgagaaggccgattctgatacctatacttgtgacatcggccaggcccagagtcgagcacaacttctggtccagggcagacgggtgcatattatcgaggatctggaggatgtagacgtgcaagagggaagctcagcaaccttccgctgccgtatctcccccgcaaactacgaacccgtacactggtttctggataagacacctctgcacgcaaacgaactgaacgagatcgatgcacaaccaggcggatatcacgtgctgactttaaggcagctcgccttgaaggactctggaacaatctactttgaggccggtgaccagagggcctcagccgcacttcgggtgaccgagaagccctccgtgttctcccgcgaacttactgacgctaccatcaccgaaggagaggatttgacactggtatgcgagacctcaacctgcgacatccctgtctgttggacaaaggacggtaagacccttcgcggatctgcgcgttgccagctgagccacgaggggcaccgtgctcagctattgatcactggggcaacgctgcaggattcaggacgctataaatgtgaggctggcggagcctgctccagctccatagtcagagtgcatgcccgacctgttaggtttcaagaagccctgaaagacctggaagttctggaaggaggcgctgcaaccctacggtgtgtcctgtcctcggtggcggcacctgttaagtggtgctacgggaacaacgttctgaggccaggcgacaagtactctctgagacaggagggggctatgctggaactggttgtccgaaatcttcggcctcaagactccggcaggtacagctgcagtttcggagaccagacgacatctgctaccctgaccgtgacagccctgccagcacagttcataggaaaattgagaaacaaagaggcgacagaaggcgcaactgctacattgaggtgcgagctgtcgaaagccgcacccgtggagtggagaaaaggtagtgagactttacgcgatggagacagatactgtctgcgccaggacggggcaatgtgtgagcttcagatccgaggcctggccatggtggacgccgctgagtactcgtgtgtctgcggagaagagaggacgagtgccagtttaactatccgtccgatgcccgctcacttcataggtcgcctgcggcaccaagaatcaatcgaaggtgctacagctacactcagatgtgaactcagcaaagctgcccctgttgagtggcgtaaggggcgagaaagtttgcgggacggagacaggcactcactgcggcaggatggcgctgtctgtgaactgcagatctgtggactcgctgttgccgacgctggggaatacagttgtgtgtgcggagaagagagaacttccgcgacattgaccgtaaaggcccttcccgcaaagttcactgaaggacttcgcaacgaggaggctgtggagggggcaaccgcaatgctctggtgcgagttaagcaaggtcgccccagtcgagtggaggaaagggccagagaacctgcgggatggcgaccgttacatcctccgtcaagaaggcacccgctgtgagctccagatttgtgggctggcaatggctgacgccggtgaatacctctgcgtgtgcggccaagaaagaacgagcgctacactgacaattagagcgctcccagctcgttttatcgaggacgtcaaaaatcaagaagctcgggagggggcaacagccgtgcttcaatgtgagctgaactcagctgcgccagtagaatggagaaagggctccgagaccctgcgagatggagatcgctatagccttcggcaggacggcaccaagtgcgaattgcagattaggggcctcgccatggcagatacaggagagtattcttgcgtgtgtggacaggagcgcacctccgcgatgctgaccgtcagagccttgccgattaaattcacggagggcttacgcaacgaggaggctactgagggagccactgcagtgctgagatgtgagttgtcgaagatggcacctgtggaatggtggaaagggcatgaaactctgcgggatggggacaggcactccttaagacaggacggagctaggtgtgagctgcagatacgcggactagtagccgaggatgccggagagtacctgtgcatgtgcggtaaagaaaggacaagtgctatgctcacagttagagccatgccatcaaaatttatagagggtctgagaaatgaagaagctacagaaggcgacaccgctacattatggtgtgaactgtccaaagctgcacctgtggaatggagaaagggccatgaaaccctcagggacggtgatcggcattcattaagacaagatggctcgaggtgtgagctccagatccggggactcgctgtagttgatgccggtgaatactcctgtgtgtgcgggcaggagagaactagcgccaccttgaccgtgcgcgctctgcctgctcgttttatcgaagatgtgaagaatcaagaagctcgagagggagccacggcggtgctgcagtgcgaactgtcgaaagctgctcctgtcgagtggagaaaaggatccgagacactgcgaggaggagatcggtacagtctaaggcaggatggcacacgctgcgagctgcagatccatggcctgtccgtggccgatacaggagagtattcttgtgtgtgtggtcaagagcggacatcagcaaccctgactgtgagagcactcccagcaagattcactcaagatctgaaaaccaaggaagcctcagaaggagcgactgccaccctgcagtgcgaactaagtaaggttgctccagtggagtggaaaaagggtcccgaaactctacgggacggcggtagatattccctcaaacaggacggcacccggtgtgaactccagatacatgacctgtcagttgccgatgcaggagagtactcatgtatgtgtggccaagagcggaccagtgccacgctgactgtacgagccctgcccgcacggttcacagaggggctcaggaatgaggaggcaatggaaggcgctactgccaccctacagtgtgagctgagcaaggccgctccagtcgaatggaggaaaggcctcgaggccctgagggacggagataagtattccttgaggcaggacggagcagtttgtgagctccagattcacgggctggcaatggccgacaacggagtgtactcatgtgtctgcggacaggaaaggacttctgctacattaaccgtccgcgctcttcctgctagatttatagaggacatgcggaaccagaaggccactgagggggctactgtcactctgcagtgcaaattacgcaaggcagctcccgtggaatggagaaaaggccctaacacgctgaaagacggggacagatacagtttaaaacaggacggaacctcatgtgagcttcagatcagaggactggtgatcgccgacgcaggcgaatactcgtgtatttgcgagcaggagaggacttccgcgactctgactgtaagagcactgccagccaggttcattgaggatgtaaggaatcacgaagccacggaaggggcaacagcagtcctccagtgtgagctgagcaaagccgcaccagttgagtggaggaagggaagcgagacactgcgggacggagaccgctattccctgagacaagacggcacccggtgcgagctgcagattcgtgggctggctgtagaggatacaggagagtatctgtgcgtctgtgggcaggaaaggacctccgctactcttactgttcgggctctgcctgctaggttcatcgacaacatgacaaaccaagaggccagggaaggagccaccgccactctgcactgcgaattgtctaaagtcgcgccagtcgaatggaggaagggccctgaaaccctccgggatggggaccggcattccttgcggcaggacggtactaggtgcgaactgcagatacgcggactatctgtcgcagacgcgggagaatattcctgtgtgtgcgggcaagagcgaacttcagcgacacttaccattcgcgaagccacggaaggagcaactgcaatgctccagtgtgaactttccaaagtggcccctgtggagtggcggaagggtcccgagacactgcgggatggcgacaggtataatctgaggcaggacggcacccgatgcgagctccagattcacggcctttctgtggccgacacaggggagtacagctgtgtgtgcggacaagagaaaacctccgcaaccctcactgtgaaggcccctcagccggtcttccgcgaaccattgcagtctctacaagccgaggagggctcaacggccacactgcagtgcgagttgtctgagcctacagccacagtggtatggagcaaaggcggactccagttgcaagctaacggcaggcgagagcctagattgcaaggttgcaccgcagagctcgtccttcaagatcttcagcgggaagacacgggtgaatacacctgtacctgcgggagccaggctacaagcgccactttgaccgtcacagctgcccctgtgagattcttacgcgaactccaacaccaggaagtggacgagggaggcactgcccacttgtgctgcgagttgagtagggctggcgcaagcgtggaatggaggaagggatcacttcagctgttcccgtgtgctaaatatcaaatggtgcaggatggcgcagccgcagagctgcttgtaaggggtgtagaacaggaggacgctggcgactatacatgtgacacgggacacactcaatccatggccagcttgtccgtacgggtacccaggcctaagttcaaaacaaggctgcagagcctcgagcaggagaccggtgacatcgctagattgtgctgccaactgtcagatgccgaatctggtgctgttgtgcagtggctaaaagagggcgtggagctccatgcgggtccaaaatacgagatgcgatcccagggtgctactagagaacttttaattcaccaactcgaagctaaggacacgggagagtatgcctgcgtgacaggcggacagaaaacagctgcctcacttagagtcaccgagccagaggtgactatagtgcgcggattggtcgatgcggaggttactgcagacgaagatgtcgagttctcttgcgaagtgagccgggctggagctaccggcgtgcagtggtgccttcaggggttacctcttcagtctaatgaagtcaccgaggtggctgtgagagacggacggattcacacactgaggctgaagggagtgacacctgaggatgccggtaccgtgtccttccatttgggcaatcacgcttccagcgctcaactcactgtgagagcacctgaggttactatcctggaaccacttcaggatgtccagctgtctgagggacaggacgctagtttccaatgcaggttgagtagggcctccggtcaagaagcacgatgggcattgggtggagtcccactccaagccaacgagatgaacgatattaccgttgaacagggcacccttcacctgttgaccctccataaagttactctggaggatgccggaacagtctccttccatgtgggtacttgcagttccgaagctcaactcaaggtgaccgcaaagaacactgtcgttcgcggtctggaaaatgtggaggcattggaaggaggcgaagctctattcgaatgccagctgagccagcctgaagtcgccgcacacacatggttgcttgacgacgagcccgtgcacacgtccgaaaatgccgaagtcgtgtttttcgaaaatgggcttaggcatctgttactgcttaaaaatctaaggccccaggattcctgtcgtgtgacatttctggccggagacatggtcacaagcgccttcctcaccgtaaggggctggcggttggagatcttggagccattgaagaacgccgctgtccgcgctggagcccaggcatgtttcacctgtacgttgtctgaagcagttccagtcggtgaggctagctggtacatcaatggcgctgccgtccagcccgacgacagtgactggaccgttaccgcagacggttctcaccatgccctgttactacgaagtgctcaaccacaccacgccggagaagtgacatttgcctgtcgcgacgccgtggcatctgctaggctgactgtcttggggctgccagatccgcctgaggacgccgaggtggtggctcgtagctcccacaccgtgaccctctcctgggccgcacctatgagtgacggcggagggggattatgcggatatagagtggaagtgaaggaaggcgcaacaggacagtggagactgtgccacgaactcgttccgggacctgagtgtgttgtggatgggctcgcccctggcgagacataccggtttcgggtagctgcagtcggaccagtaggcgctggtgaacccgtgcacttgccacagacagtgcgcttggcggagccgcctaaacctgtacctccgcagcctagcgctccggagtctcgacaggtagctgccggagaagacgtgagtttggagttggaggtcgtagctgaggctggggaggtcatctggcacaagggcatggagaggatacagcctggcggacgatttgaagtagtttctcagggcaggcagcaaatgcttgtcattaaaggcttcacagccgaggatcagggcgaataccattgcgggttggcccaggggtccatctgtcctgccgctgcaacatttcaggtagcactgtctcctgccagcgttgatgaagcccctcagccctccctgcctcctgaggccgctcaagagggtgatttgcaccttttgtgggaggctctcgcacggaagaggagaatgtcccgcgagcccacactcgacagcatttcagagctcccagaggaggacgggaggtcgcagcgccttccccaagaggccgaagaggtggcaccggatctgagcgagggatatagtaccgccgatgaactagcccgaacgggcgatgctgacctgagccataccagttcggatgacgagtccagggcaggcactccgtcactggtgacctatctgaagaaggcaggcaggccaggcacatctcccctcgcctcaaaagtgggcgctccagccgcaccatccgtcaagccgcagcagcagcaggaaccactagccgctgtcagacctcccctcggcgacctatccactaaagaccttggagaccccagcatggacaaagctgctgttaagatccaggctgctttcaagggatacaaggtccgcaaggaaatgaaacagcaagagggacccatgttctcccatacgtttggtgacaccgaagcacaggtgggcgacgctctgaggctagagtgtgttgtggccagcaaggcagatgtgcgagccagatggctcaaggatggggtggaacttacagatggccgtcaccaccatatcgaccaactgggagacgggacttgtagtctcctaatcactggcctggacagggcagacgctgggtgttatacgtgtcaggttagcaacaaatttgggcaagtgacacactcggcgtgcgtggtcgtaagtgggtctgagtccgaggcggagtcgagcagcgggggtgagctagatgacgcatttcggagggcagctagacgtctgcacaggctgtttcgcacgaaaagtcccgcagaagtgagtgatgaggaattgtttctgtcggcggatgaggggcctgcagaacctgaggaaccagccgattggcagacatacagggaggatgaacacttcatttgcatcagattcgaagccctcactgaggctcggcaggcagtaacccgcttccaggaaatgttcgccacactcggtataggcgtggagattaagttggtggaacagggacccagaagggtggagatgtgtatttccaaggagaccccagccccagtcgtgcctcctgagccgcttccttccttactcaccagtgatgccgctcccgtgtttctgaccgagctgcagaatcaggaagtgcaagatggttacccagtcagttttgattgtgtggtcaccggccagcctatgccttcggtccgctggtttaaggacggtaagctgttagaagaggacgatcactatatgatcaacgaggaccaacagggcggtcaccagttaataattacagctgtggtgccagctgatatgggtgtgtacagatgtcttgctgaaaattcaatgggcgttagctccacgaaagcagagctgcgggtggatctcactagcactgattacgacactgcagccgacgcaaccgagagttcatcatactttagtgcacaagggtatctgtcgtctcgcgagcaggagggaactgagagtactacagatgagggacaactgccgcaggtggttgaggaactgagagacctgcaggtggcccctggcactagattagcaaaatttcagttgaaggtcaaggggtaccccgctccacggctctattggtttaaggacgggcagcctttgaccgcgagtgctcatataagaatgacagacaagaaaatattacacacgctggagatcatatccgtgactcgggaagacagcgggcagtatgccgcatacatctctaacgcaatgggtgccgcatactcaagtgctcgtctcctcgtaagagggccagatgagcctgaggagaaaccagccagcgatgtccacgaacagctagttcctccccgtatgctagaacggtttaccccaaaaaaggtcaaaaagggttcttctataacctttagcgttaaagtggaaggaagaccagttccaactgtccactggttgagggaagaagcagagaggggggtactatggattgggcctgatacccccggatatactgtggcctccagcgcgcagcaacacagtctcgtactgctagacgtaggcaggcaacatcaaggtacctacacctgcatcgcctctaacgcagctggtcaggctctctgtagcgccagcctgcacgtgagtgggctcccaaaggtggaggagcaagagaaagtcaaagaggcactcatctcaacctttctgcagggcactacacaggctatcagcgcccagggcttggaaactgcatctttcgctgatctgggcggacagcggaaagaggaacctcttgcagccaaggaagcactgggccatcttagccttgcagaagtgggcacggaagagtttttgcagaaattgactagccaaatcacggagatggtgtcagcaaaaatcacccaagcgaaacttcaagtccctggtggcgactctgatgaagacagtaagacaccgagtgcgagtccccgacacgggagaagcagaccctcttcttcgatacaagaaagctcctcagaatctgaggatggggatgctcgaggtgagatttttgatatttacgtggtgacagcagactacctgccacttggagcggaacaggatgctatcactctgcgagagggccagtatgtggaggtcctggatgctgcccacccactgcgctggctggttcgcaccaaaccgactaagtcctcacccagcaggcaagggtgggtcagtcctgcgtacctcgatagacgcctgaaactttctccggagtggggagcagcggaagccccagaattccctggcgaggccgtgagcgaagatgagtataaagccaggctgtccagtgtgatacaggagttgctttcttctgagcaggccttcgtcgaagaactccagttcctccagtcccaccacttgcaacatctggaacgctgtccacatgttccaatagcagtagccggtcagaaagcagtcatcttcagaaacgtgcgggatattggcaggttccactcctcttttctgcaggagcttcagcagtgcgacaccgatgatgatgttgccatgtgcttcattaaaaaccaggcagccttcgagcaataccttgagttcctggtcggccgtgtgcaggctgagagcgtcgtggtttccaccgcaattcaggagttctacaagaagtatgccgaggaggcattactggctggcgatccatcacagccaccccctccgccactccaacattatctcgagcaacctgtggagagggtgcaaaggtaccaggcccttctcaaagaattgatcaggaataaggcacggaaccggcagaactgtgcacttcttgaacaggcatacgccgtcgtcagcgcgcttcctcagcgggctgagaacaaactgcacgtgagtctcatggagaattaccctggcaccctgcaggccctcggcgagccgattagacagggtcacttcattgtatgggagggagcgcctggcgcaaggatgccatggaaaggccacaatagacacgtattccttttccgcaatcatctcgtcatctgcaaacccagaagggatagtcggactgacaccgtgtcatacgtttttaggaatatgatgaagctgtcctctatcgatctcaacgatcaggtagagggcgacgaccgggctttcgaagtgtggcaggaacgcgaagactctgtgcgtaaatacctcttacaggctagaacagcaattatcaaatccagttgggtaaaggagatctgcggtatccagcaaagactcgctctcccggtgtggcggccacccgattttgaagaggagcttgctgactgtaccgctgagttgggcgaaacagtgaaactagcatgtcgcgttaccggtacccccaagcccgtaattagctggtataaagacggcaaggcagtccaagtggacccccaccacattctcatcgaggacccggatggaagttgcgccttgatactggacagtcttaccggcgtggattcaggtcagtacatgtgctttgcagcaagcgccgcaggaaactgtagcaccctgggaaagatcctggtgcaggtgcccccaaggtttgtcaataaggtgcgggcttcaccatttgtcgaaggagaagacgcccaatttacctgtaccatcgaaggagctccatatccccagattcggtggtacaaagacggagcactgctgaccaccgggaataagttccagactctatctgagccccgtagcggattgcttgttctggtgatcagagccgctagcaaagaagatctggggctctatgagtgcgagttggttaacaggctgggctcagcacgagccagtgctgagctcagaatccaatccccgatgctccaggctcaggagcaatgtcatcgggagcagctcgtggccgcagtggaggatacaacactggagcgcgcagaccaggaggtcacgtccgtcctcaagaggctgcttggacctaaagcccctgggccatccacaggtgacctgacaggccctgggccatgcccccgaggggctccagccctccaggagaccggctcccaacccccagtaacagggacatccgaggccccagccgtgcctccaagagtccctcagcctctcttacacgaggggcctgagcaagagcctgaggccatcgccagggctcaagagtggacagtacccatacgaatggaaggcgctgcctggcctggtgccggtaccggagaactattgtgggacgttcattcacatgtcgtgagggagactacccaacgcacgtacacctatcaggccatcgatactcacaccgctcgaccaccgagcatgcaggtaacaattgaagatgtccaagcccaaaccggcggaacagcccaattcgaggccattatagaaggggaccctcagccttctgttacctggtacaaagactctgtccagctcgttgattccaccagactgtcacagcagcaagagggaactacctactcacttgtattgcgacatgtagctagcaaagacgccggagtctacacatgcctggcacagaatacaggcggacaagtcttatgtaaagccgaacttctcgtattaggcggagacaacgaacccgattcggagaagcagtcccacaggcggaagttgcactcattttacgaggtgaaggaagagataggtagaggagtgttcggatttgtcaaacgcgttcagcacaagggtaataaaattctatgcgccgcaaagttcattccactccgctcacggacacgcgcacaggcttacagggagcgtgacattcttgccgctttgtcccacccgcttgtgaccggcctgctggatcagttcgaaacccgcaaaaccctgatactcatcctggaactatgttctagcgaagagctattagatagactgtaccgcaaaggcgtcgtcaccgaggccgaggtgaaagtctacatccaacagctagtggaagggctgcattacctacacagccacggcgtcctgcatctggatattaagccttccaatatcctgatggttcatccggctagggaggatatcaagatctgcgattttggtttcgctcagaacatcaccccagcagagctgcagttttctcaatatgggagtccagaattcgttagccctgaaatcatccagcagaaccctgtgtccgaggcaagcgatatctgggcaatgggcgtgatttcgtatctgtccttgacctgtagctcccccttcgcaggtgagtccgatcgcgcaacactgctgaacgtgctggaggggcgtgttagctggagcagtccaatggcggcacacctgtcagaggacgctaaggactttattaaagctaccctgcagcgcgctccccaggcccgtccatctgccgcacagtgtctgagccatccttggttcctcaagagcatgcccgctgaagaggcacacttcatcaatacaaaacagttgaaattcttactcgccagatccagatggcagcggagtcttatgtcctacaaatccatccttgtcatgaggagcatacccgagctgttacgaggacctccggatagcccctccctaggcgtggccaggcacttatgccgcgatactggcggaagcagcagtagctcaagcagctccgacaacgaactggctcctttcgcacgggcaaagagccttccccctagtcctgtaactcactctccactcctgcacccacggggatttctccgcccatcagccagcctccctgaggaggctgaggcctcggaaagatcaaccgaggccccagcacctcctgcttctcctgaaggagccggaccccctgctgcacaagggtgtgtgccacggcactccgtaatcagatccctgttttaccatcaagcaggcgaatctccagagcatggggctctcgcacctgggtccagaaggcaccctgctcggagacggcatctccttaaggggggatatatagccggtgcgctgcccggtttgcgggagcccctgatggaacacagagtgctggaagaggaggcggctagagaagagcaggccacccttctggctaaagcgccttcatttgagactgccttgcgccttcccgctagcggaacccacttagcacccggacattcccattccctcgaacacgactctccatccacccctcgaccaagtagtgaagcctgcggcgaagctcaacggctcccaagcgccccttccggtggcgctcccattcgtgacatgggacatcctcagggcagtaaacagctgccaagcaccggcggtcaccctggcacggcgcaacctgaaagaccctcgccagacagcccctggggacagccagctccgttctgtcaccctaagcaagggagtgctccccaggaaggatgctccccacaccccgctgtggccccatgtccgcctgggtctttcccaccaggcagttgtaaagaggccccactggttccaagtagcccctttttaggccaacctcaggcccctcctgcccctgccaaagccagcccgccactggacagtaagatggggcctggtgacatctcgcttcccggtcgcccaaagcccggaccatgctctagcccaggatccgctagccaggcttcatcatctcaggtcagttccctcagggtcgggtcctcacaggtgggaacagagcccggacccagtctggatgccgagggatggacacaagaagcagaagacctttcagactctaccccaacgctgcagcgaccacaggaacaggcaaccatgcggaagttttctctcggaggtcgcggagggtatgctggagtggccggatacggaacatttgccttcggcggagacgccggaggcatgttgggacagggaccaatgtgggcgaggattgcctgggcagtctcccaatcggaagaagaggaacaagaagaagcacgagcagagagccagtcggaagagcagcaagaggccagagccgagtcacccttgccacaagtctcggcccgacctgtccccgaggtcggcagagcgcctaccaggtcttcccctgaacctactccatgggaggatatcggccaggtcagcctcgtccagattagggatctgtctggcgatgccgaagcggctgacacaatctcacttgatatctccgaagttgatccggcttatctgaacctaagtgacctgtacgatatcaagtacttgccttttgagtttatgatttttcgcaaggtgccgaagagcgcacagcccgagccaccgtctccaatggcagaagaggaattagcagagttcccagagcctacctggccatggccaggtgagcttgggccacatgcgggactggaaatcacggaagagagtgaagacgtggacgcattactagccgaggctgccgtgggtaggaagcggaaatggtcttcgcccagccgctcccttttccactttcctggaaggcacttgcctttggacgaacccgcagagttaggtctgcgcgagcgagtgaaggcctctgtcgagcacatctctcgaattctgaagggccgtccagaagggttggagaaggaggggccaccacggaagaagccaggattagcttcctttcggttatcggggcttaaatcgtgggatcgggcaccgacattcctgcgcgaactctctgatgagaccgtggtgctgggccagtctgtgaccctcgcctgtcaggtgagcgcccagccggctgctcaggcgacttggagtaaggacggagcgccactggagagctcctcacgcgtgttgataagtgcaaccctaaagaacttccagctgctcactatactcgttgtcgtcgccgaggatctcggtgtctacacttgttcagtgtccaatgcccttggtacagtgacgaccaccggggtacttcgcaaggctgagagaccctcatcttccccctgcccggatatcggggaggtgtatgcggacggggtgttgttggtgtggaaacctgtggagagctacggccctgtaacctacatcgtccaatgctctttggagggcggatcttggactacacttgctagcgacatctttgactgctgctacctcacttccaagttgtcacgtggcggaacctatacattccgcaccgcatgcgtttccaaggccggaatgggcccatatagcagtccctctgagcaggtgctcctcggtggtccctcacatctggcaagcgaggaggaatcccaaggaaggagtgcccaaccccttccttccaccaaaacttttgcgttccagacccagattcaacggggacggttctcggtggtgaggcagtgttgggagaaagcaagcggaagggcactggccgcaaagatcatcccctatcaccctaaggataagacggctgttctgagagaatacgaagctctgaagggactccggcacccgcacctggcccagctgcacgccgcatatctgtctccccgacacctggtgcttattctggagctgtgttccggacctgaactgttgccatgcctggccgaacgcgcttcgtattcggagtctgaggttaaagattatctgtggcagatgctgtccgccacccagtatctacacaatcagcacatcctacatcttgatctgcggtcagagaatatgattattacagaatacaacctgctcaaggtggtcgatctgggcaacgctcagtctctttcacaggaaaaggtcctgccctctgacaagttcaaggactacttggagaccatggcaccagagctgttggaggggcagggagctgtgccccagacggacatttgggcaatcggggtgactgcattcattatgctgagcgccgagtacccagtgtcctcagaaggggctagggatttacagagaggcctcaggaaaggcttggttcgcctgtcaagatgctacgcgggtctgtccggaggagccgtggccttcctgcggtccactctgtgtgcacagccttgggggaggccttgcgcctcctcctgtttacagtgtccttggctcacagaagaaggaccggcatgctccaggccagcacctgtaacctttccgacagctcggttacgggtgttcgtacgtaaccgagaaaaaaggagagccctgctgtataaacgacataacttggcacaagttagatat

SEQ ID NO: 28656 - DNA, 11220 bp, synthetic construct
  source 1..11220: mol_type = other DNA; note = Synthetic coding sequence
atgcttgtgattcgaggagctagtctgaaggacgccggagagtacacgtgcgaggttgaagcctcaaagagtaccgccagccttcatgttgaagagaaagcgaactgttttaccgaggagctgactaatctacaggtggaggaaaaaggcacggcagtgttcacctgcaaaacagagcaccccgcagcaaccgttacttggcgcaaaggcctgctcgagctgagggctagcgggaagcatcagccatctcaggagggcctgaccttgcgtctgactatcagtgctctagaaaaagccgactccgatacctacacgtgtgacatcggacaggcacagagccgggcacagctcctggtgcagggcaggcgtgtgcacataattgaggacctggaggacgtcgacgtgcaggaaggtagctcagccacattccgctgcaggatatctcctgcgaactacgagcctgtacattggtttctggacaagactccactgcacgccaatgaactgaatgaaatcgatgcacagcctggaggatatcacgtgctgaccctccgacaactggcgctcaaggattctggcacaatatacttcgaggctggcgatcagcgcgcatcggccgctctgcgcgtcacagaaaagccttctgtgttcagtagagaactgactgacgccaccatcacggaaggggaggatcttacgctggtctgcgagacctcaacttgtgacatccctgtatgctggaccaaggacggcaaaaccctgcgaggttcagcaaggtgtcagctgtcccacgagggtcatcgggctcagctcctgataactggcgcaactctgcaagactccggccgttacaagtgcgaagcgggaggtgcttgtagttcttctatcgtgagggtccacgcgcgaccagtgaggtttcaggaggctctgaaagatcttgaggtgttagagggtggtgccgcaactcttaggtgcgtgttatcttcggtggccgctcccgtcaaatggtgctacggaaacaatgtgctcagacctggagataaatatagcttgcgccaggagggagccatgctcgaactcgtggtgcgaaatctccgccctcaggacagcggacgatatagttgttcctttggtgaccagacaacttctgctacattgaccgtcactgctctgccagctcagttcattgggaagttacgcaacaaagaggcgacggaaggggcaactgccactcttcgttgcgagctgagcaaggcagccccagtagaatggcggaagggaagcgagacactccgggacggagaccgctattgcctgcgccaggacggggctatgtgtgaactgcagatacggggactggccatggtcgatgctgcagagtacagctgcgtatgcggcgaggagcggacctctgcctctttaaccatacgtcccatgcccgctcattttatagggcgactgcgtcaccaggagagtatcgagggggctacggcaacactcaggtgcgaactcagtaaggccgcacctgtcgagtggcgcaagggacgggagtctctcagggacggcgatagacattcacttagacaggatggcgcagtgtgcgaactccagatctgcgggttagcggttgctgatgctggggaatacagctgcgtttgtggcgaagagagaacgagcgcgactctcaccgtgaaagcacttcccgcaaagtttactgagggattacgtaacgaagaggccgtggaaggcgcaaccgccatgctttggtgcgaactgtctaaggtggcacctgtggaatggcgaaaaggccctgagaatctgcgcgatggcgatcggtatattctcagacaggaaggcaccagatgtgaattacaaatctgtggattggctatggcagacgctggcgagtacctttgcgtgtgtggccaggaacgcacttctgccacccttacaatccgggctctgccagctcgatttattgaggatgtgaagaatcaggaggcgagggagggtgctaccgcagttcttcagtgcgagttaaattccgcggctcctgtagagtggcgcaaggggtccgagaccttgagagatggcgataggtattcattgcgacaggacggcaccaaatgcgagttacagataagggggctagcaatggcagataccggggaatacagttgcgtgtgcggtcaggagcggacatcagctatgttgaccgtgcgcgctttgccaattaaattcaccgaagggttgcgcaacgaagaggctacagagggcgctacagccgtgctcaggtgtgaattgagtaaaatggctccagtggaatggtggaaggggcacgaaacactgcgtgatggagatagacactccttgaggcaagatggggcaagatgcgaacttcagatcaggggccttgtcgctgaggatgccggagagtacctgtgcatgtgcggaaaggagcgcacaagtgccatgctgaccgtaagagccatgccatcaaagttcatagaaggattgcgcaacgaggaggctactgaaggagacactgctactctgtggtgcgaactttcaaaggccgcacccgtggagtggcgcaagggtcatgagaccctgcgggacggcgatcgtcacagtctcagacaggatggcagccgttgtgaattacaaataagagggctggcagtagtcgatgctggtgagtactcgtgtgtgtgcgggcaggaacggaccagtgctaccctgacagtcagggccttgcctgccaggtttatcgaagatgtgaagaatcaggaggctagggaaggcgcaacggccgtactgcaatgtgaactgagcaaggccgctccggttgaatggaggaaaggatccgaaacactgcgcggtggagatcggtacagcctgcgacaagacggaacacgttgtgaactccaaatccacgggctgagcgtcgcagacaccggtgagtactcatgtgtgtgcggacaagaaagaacatccgcaacgctcaccgtgagagcaccccagcccgtgttcagagaacctctgcagtccctccaggcggaagaaggatctacagctactctgcagtgcgaactcagcgaaccaaccgcaaccgttgtctggtctaagggcggtctccagttgcaggcaaatgggaggcgggagcctcggctgcagggctgtactgcggagctcgtgctgcaggatctccaacgtgaggacaccggggagtatacctgtacctgtggatcacaggcgacaagcgccacactgaccgttacagccgctccagtgagatttctgcgcgaactccagcaccaagaggtggacgagggcggaacagcgcacttatgctgtgagctctcaagggcaggagcgagcgtcgagtggaggaagggctcactgcaattgtttccctgcgcgaagtaccagatggtgcaggacggcgctgccgctgagcttctcgtcaggggtgtggaacaggaggacgctggcgattacacttgtgacactggtcacacccagagtatggccagtttgagcgtccgcgtgcccaggccaaagttcaaaacccgcctacagtcactcgagcaggagaccggggatatcgctcgcctttgttgtcagctctcagatgcagagagcggggctgtggttcaatggttgaaggagggggtggagctacacgccggtccaaagtatgagatgaggtctcagggcgctacaagagaactgttgatccatcaactggaagccaaggataccggcgagtacgcctgtgttactggtggccagaaaaccgcagcctccctccgagtgacagagcccgaagtgaccatcgttcgcggactggtggacgcggaggtgacggctgacgaagacgtggagttttcctgtgaagtgagtagggctggcgctactggtgtgcagtggtgcctccaaggcctgccactgcagtcaaacgaagtgacggaagtggccgtccgggacgggcgaatccacactctgcgtctcaaaggcgtgaccccggaggacgccggaacagttagcttccatcttggaaatcacgcgagcagtgctcagttgacggtgcgcgctcctgaggtaacaatcctcgagcccttacaggatgttcaactgtctgagggtcaagacgcttcattccaatgccggctgagccgggcatctgggcaggaagctcgctgggctctgggtggcgtccctctacaggcgaacgaaatgaacgacatcacggtcgagcaaggaaccctccatttgctgacgctccacaaggttacccttgaggatgctgggacagtgtcttttcacgtaggaacgtgctccagtgaggctcaactcaaggtgaccgctaagaataccgtcgtcagggggttggagaatgtggaggccctcgagggcggagaagctctgtttgagtgccagctgtcccagccggaggtggctgcacacacatggttgctcgatgatgagcccgtgcatacgtccgagaacgccgaggtcgttttcttcgaaaacggactccgccaccttctgctgctgaaaaacctgagaccccaggactcctgccgggtcacatttctcgcgggagatatggttacctctgctttcctcaccgtgcgaggctggaggcttgaaattctcgaaccactgaaaaacgccgctgtgagggcaggagctcaagcatgcttcacttgtacccttagcgaagccgtgcccgtaggggaagcatcttggtatatcaatggcgctgccgtgcagcccgacgactcagactggaccgtgaccgctgatggctcccaccatgccctgttgctccgatcagctcagccacaccacgcaggagaggtgacatttgcctgccgcgacgctgttgctagcgcgcgtctgacagtgttagggctgcctgatccacctgaagatgctgaagtagttgcaagatcttcccataccgtcaccctatcttgggccgcaccaatgagcgacggtggtgggggactttgcggttaccgcgtagaagtgaaagaaggggcaacaggtcaatggcgtttgtgtcacgagttggtaccaggaccagaatgcgtggtggacggtcttgctccaggggaaacataccgcttcagggtcgcagccgtagggccagtgggggcaggagaaccagtacacttgcctcagactgttagattggccgagccaccaaagccggtcccaccccagcctagtgcacccgagtccagacaggtggcggctggggaggacgtgtccctggagctcgaggtggtcgcagaggctggtgaggtgatctggcataagggcatggagagaatacagccaggcggtcggttcgaagtggtgtctcaaggtagacagcagatgctagtgatcaaaggtttcacggccgaggaccagggtgaataccattgcggactggcacaaggatcaatttgtcctgccgctgcaactttccaagtcgccttgtcaccagcatcagtggatgaggctccacagccttctttaccaccagaagcagctcaggaaggggacctccaccttctgtgggaagcacttgctcgaaagaggcgaatgtctagagaacccactctggacagcataagcgaactccctgaggaagatggccgttctcagcgccttccacaagaggcagaggaagtggctcctgacctcagtgaaggctatagtactgccgacgaactagccagaacaggtgatgccgacctgtctcacacttcctccgatgatgaaagtcgggctggcacacccagcctggtgacatatcttaaaaaagccggaagacccggtaccagtccactagcaagtaaagtgggagcccctgccgcacccagcgtgaagcctcagcaacagcaggagcctctggcagcagtgaggccaccattgggggacttgtctacaaaggacctgggggatccgagtatggacaaggccgcagtgaaaattcaagctgccttcaaagggtacaaagtgcggaaggagatgaaacaacaagagggcccaatgttttcacacacattcggcgacaccgaggcgcaggtaggggacgctctccgcctcgagtgtgtcgtggcttccaaggctgatgtgcgggctcgctggctcaaggacggagtggagctaacagacggccgtcatcaccatattgatcaattaggcgacggcacctgctctctcctcattacaggtctggaccgggctgatgccggatgttacacttgccaagtgagcaataagtttggacaggtgactcacagcgcatgtgttgtggtgagcgggtccgagtctgaggctgagagctctagtggcggtgaactcgacgacgcgtttcggagagccgcacggaggctgcacaggcttttcagaaccaagtcacccgctgaggtcagtgacgaagagctcttcttgagtgcagacgagggaccggctgaacctgaagagccagcagattggcagacatatcgagaggacgagcacttcatctgcattcgattcgaggccctgactgaggctcggcaggccgtcacgagattccaggaaatgtttgctacccttggaatcggtgtagagataaagctggtagaacaaggccctcgaagagtagagatgtgcatctccaaagagacccccgctccagttgtgccacccgaacctctcccaagcctgctgacctctgacgccgctccagttttccttactgaattgcagaatcaggaggtacaagacggctatcccgtctctttcgattgcgtggtgacagggcaacctatgccttccgtgagatggttcaaagacgggaagctgcttgaggaagacgaccattatatgattaatgaggatcagcagggtggtcatcagttgattataacagccgtcgttcccgctgacatgggcgtgtatagatgcttggctgagaatagcatgggggtgtccagtacgaaagcagaactcagggttgacctgacctctacagattatgatactgcagctgacgctacagaatccagttcttacttttcggcacagggatacctgagttcacgtgaacaggagggtaccgaatctacaaccgacgaagggcagttaccgcaggtggtagaggagctgagagacctccaagtggcgccaggtacccgtctggccaagtttcagctgaaggtaaaggggtaccccgctcccagactctactggtttaaggacggacaacctctcacggcatctgcacacattcgaatgaccgacaagaagatactccacactctggagattatttccgtgaccagggaggacagcggacaatacgctgcctatatctcaaacgcgatgggtgcggcatattcctcggcacgtctgctggtcagagggccagatgaaccagaggagaagcctgcttccgatgttcacgagcagctggtgcccccaaggatgcttgaacggttcacgcccaagaaagtcaagaaggggtcatctatcaccttttctgtgaaggtggaagggcgacccgtcccgacagtccattggctaagggaggaagctgagcggggagttctgtggatcgggcctgatacccccggatacacagtggcaagcagcgcacaacagcactccttggtgctgctggacgttggacggcagcaccaaggcacttatacctgcatcgcttctaatgccgctggtcaggctctgtgttctgcgtccctacacgtgagtggcctgccaaaggtggaggaacaggagaaagtcaaagaggccctcatttctacatttctccaggggaccactcaagctattagtgctcagggactggaaaccgccagttttgcagatctaggcggacaacgcaaggaagagccactggctgccaaggaggcccttggccatctttctctagctgaagtcgggaccgaagagtttttgcagaaacttacaagtcagattactgagatggtctccgcaaagataacccaagctaagctgcaggtgccgggtggcgactctgatgaagatagcaaaacgccttcagccagtccgcgacacggcagatctcgcccatcttcttcaatccaagaatccagctcagagtctgaagatggcgacgctaggggggaaatcttcgatatctatgtcgtgacagccgattacctgccccttggggctgaacaggatgccatcaccctccgcgaaggccaatacgtggaagtgttggatgctgcccatcccctgcgttggttagtccggaccaaaccaacgaaaagcagcccaagtcgccagggatgggtgtcacccgcatatctcgatcgcaggctgaagctcagcccggaatggggcgctgccgaggcaccagaattcccgggtgaggctgtttccgaagatgagtataaagcaagattgtcttctgttatccaagagcttctgtccagtgaacaggcttttgtggaggaactccagttcctgcaaagccatcacctgcaacacctggagagatgtcctcatgtccccatcgctgttgcgggtcaaaaggccgtcattttccgaaacgtcagggacatcggcaggttccactcatcttttctgcaggaactccagcagtgtgacacagacgacgatgtggcaatgtgctttattaagaaccaggcggcattcgaacagtacctcgaatttctagtgggcagagtgcaggccgaaagtgtggttgtctctactgcgatccaggaattttataagaaatacgctgaggaggccctcctagctggcgatccctctcagcctccgccaccgcctttacagcactacctggaacaacctgttgagcgtgtgcaaagatatcaggctcttctgaaggaacttattcggaacaaggctcgaaatcgtcagaactgcgctctcctagagcaggcctacgctgtagtgtccgcccttccgcagcgagctgagaacaagttgcacgtatccttaatggagaactatccaggcacactgcaagccctaggagaacctattaggcaaggccatttcatcgtctgggaaggcgcacccggagccagaatgccctggaagggacacaaccgccacgtgttcttatttcgcaaccacctggttatttgtaagcctagacgcgactcccgaaccgataccgtcagttatgtatttaggaatatgatgaagctcagtagtattgacctaaacgatcaggttgaaggggacgacagagccttcgaggtctggcaggaaagagaagattcagtgagaaagtatctgctccaggccaggaccgcaataatcaaaagcagttgggtgaaagagatctgcggcattcagcagagactcgccctgccagtatggcgaccgccagacttcgaagaggagctggcggattgcaccgccgaactgggggagacagtaaagctcgcatgcagggtcaccggaactcctaagcctgttatatcctggtacaaggatggtaaagcggtacaggtcgacccgcatcatatcctgattgaggaccctgacggttcctgcgccctgatacttgactcattgacgggagtggattctggtcagtatatgtgcttcgctgcatcagctgctggaaattgtagtaccctcgggaaaattctggtccaagtgccccctcgatttgtcaataaagtgagggcctctccttttgtggagggggaggacgcacagttcacttgcacaatcgaaggcgctccttacccgcagatccggtggtacaaagacggtgccctcctgacaacaggcaataagttccagaccctgagcgaaccaagatccggtctccttgtcctggtaatccgagcggcaagcaaggaggatttgggactctacgagtgtgaactggtgaacagactaggcagcgccagagccagcgccgaacttaggatccaatcaccaatgttgcaggctcaagagcaatgccatagggagcaattagttgccgctgtcgaggtcacagagcaggagactaaagtacccaaaaaaaccgtgatcattgaggagaccataaccacagtggtgaaaagcccacgcggacaaagaaggtcccccagtaagagcccatctagatctccttcacgatgcagcgcaagccccctgcgaccgggactgttagcccctgacctgttgtacctccctggagccggtcaaccaagacgcccagaggcagagcccggacaaaagcccgtcgttcctacattatatgtcaccgaagccgaagctcacagcccagccttacccggactgtccggccctcaacctaaatgggtcgaagtcgaagagaccatcgaggtacgagttaagaaaatggggccacagggggtcagcccgacaactgaagtacctcggagctccagtgggcatctgttcaccctgccaggtgctactccaggcggagaccctaacagcaataatagtaacaataaactgctggcacaggaggcttgggctcaaggaacagccatggtgggcgttcgggagccattggtgtttcgcgtggacgcaaggggttctgtggactgggccgctagcggaatgggtagtctggaagaggaagggaccatggaggaagctggggaagaagagggcgaagatggtgacgcgttcgttacagaagaatcccaggacacacactctctcggagacagggatcccaagatcctcacccacaacggcagaatgcttacactggccgacctcgaggactatgtgccaggagagggggagaccttccactgcggtggccctgggcctggggcacccgacgaccctccatgtgaagtttcggtgattcagcgagagattggggagccaacagttggacagcccgttttacttagcgtcggccacgctctggggcctagaggaccattaggtttgtttcgacccgaacccaggggggctagtcctcctggtccacaggtacgcagtctcgagggtacaagcttcttgttaagagaagcccctgccagacctgtaggttcggctccctggacacagtccttctgtactcgaattagaaggtcagcggactccgggcaatcctctttcacgacagagttgtccacacaaaccgttaactttggtactgtgggggagacagtgaccctgcacatctgtccggacagagatggggatgaggctgctcagccataa

SEQ ID NO: 28657 - DNA, 1071 bp, synthetic construct
  source 1..1071: mol_type = other DNA; note = Synthetic coding sequence
atggctaccgccgctctcctgcggggagctactccagggagaggaggacctgtctggcggtggcgattgcgtgcagccccacgatgtcggctggcacattcaagctgctctcccggaggagacccaacagccggagccgcttgggcctgttttagactcgatgggagaaccctgctgagggtacggggaccggacgccgctcctttcctcctcggcctgctcaccaacgagctgcctctgccgtctcctgccgctgccggagccccacctgcagccagggctggttacgcccactttctgaatgtgcagggacgcaccctgtacgacgtaattctgtatgggttgcaggagcacagcgaagttagtggattcctgctggagtgtgactcgtcagtgcagggagctttacagaagcacttagctttgtaccggatccgtagaaaggtgactgtcgagccccaccccgagctgagagtatgggccgtgctcccctcgtcgccagaggcctgcggtgcggcaagtctgcaggaaagagcaggggcagctgccatactcattagggacccacgaactgccaggatgggctggagattacttacacaagacgaaggacctgcactggtcccgggaggacggttaggggacctgtgggactaccaccagcatagataccttcagggagtgccagagggcgtccgagacctgccacctggcgtggccctgcctctggagagcaatctggcctttatgaacggtgtatcctttaccaaaggatgttacataggccaggagctcaccgccaggactcaccatatgggcgtcatccgcaagcggctgttccccgttaggttcctggacccgcttcctacatctggaatcactccgggtgctaccgttcttacagcttcgggtcagaccgttggcaaattcagagctggccagggcaatgttggcctggcactcctttggtctgagaaaatcaaaggaccgttgcacattcgagcatccgagggggcacaggtggcactggccgcaagtgtccctgattggtggcctacagtaagcaagtag

SEQ ID NO: 28658 - DNA, 1395 bp, synthetic construct
  source 1..1395: mol_type = other DNA; note = Synthetic coding sequence
atgagagccgcaaggcgcggtctacattgcgcgggagcagaacgccctcgcagaagaggtcggctgtgggactcttccggggtgccacagagacagaaaagacctggcccttggagaacccagacccaagaacagatgagtcgtgacgtgtgtatccacacatggccctgcacctactaccttgagcctaagcgacgctgggtgaccggccagctgagcctcaccagcctgagtctgaggttcatgaccgacagcaccggcgaaattctcgtctctttccccttgtcttctatcgtcgagatcaagaaggaagcgagtcactttattttttcctctatcactattttagagaagggacatgccaagcactggttttcctctcttcgcccaagccgcaacgtcgtgtttagcatcattgaacatttttggcgggagctcctcctgtcgcaacccggagccgtcgccgatgcatccgtgcctcgaacccggggagaggagttaactgggctgatggccggatcacagaagcggctggaggatactgctagggtcttacatcaccagggtcagcagcttgattcagtaatgcgtggtcttgacaagatggagtccgatctcgaagtcgcggaccgcctcctgacggagctcgaatctcccgcttggtggcccttcagctcgaagttgtggaagacccccccagagacaaagccacgtgaggacgtcagcatgacatcctgtgaaccctttggcaaggaagggatcttgattaaaattcctgccgttatctcccatcgcactgagtcacatgtaaagcctgggagactgaccgtgctggtgagtggcctcgaaattcacgactcatcgagcctgctgatgcatcgcttcgaacgggaagatgtggatgatatcaaggtccactctccgtatgagatcagcattaggcaacgatttataggcaaaccagatatggcctatagactcattagcgcaaaaatgcccgaggttatcccaatcctcgaggtacaattttctaagaaaatggaactattagaggatgcattggtgctgagatccgcccgaacatctagcccagctgaaaaatcctgctccgtttggcacgccgcttcaggtctgatggggaggaccctccatagggagcctcccgcaggagatcaggaaggcacagcgctgcatctgcagactagcttaccagctctgtccgaagccgatactcaggagctgacacagatactccgacggatgaagggtctggctcttgaggctgagagcgaactcgagagacaggacgaagcattggacggcgtggccgcagcggtggaccgggctactttaaccatcgacaaacacaacaggcgtatgaaaaggttaacttag

SEQ ID NO: 28659 - DNA, 669 bp, synthetic construct
  source 1..669: mol_type = other DNA; note = Synthetic coding sequence
atgacatcttgtgagccctttggcaaggaaggtatcttaattaagattccggcagtgatctctcacaggaccgaatcgcacgtaaaacccggtcgccttactgttctggtctccggtcttgaaattcatgatagttcatcgctccttatgcatagattcgaaagagaagatgtggacgacattaaagttcactctccttacgaaattagtatcagacagagattcatcggtaaaccggatatggcctaccgcctgatctccgctaaaatgcctgaagtgatcccaatcttggaggtgcaattttcgaagaaaatggagctgctggaagatgcccttgtgctcagaagcgccaggaccagctcacccgctgaaaaatcttgctcagtttggcatgccgctagcgggctcatgggcaggaccttacatcgcgaaccccctgccggtgatcaggaaggcacagctctgcatctgcagacatcactacctgcattgagcgaggcagacacacaggagctaacccagatactgaggagaatgaaagggttagctctggaggctgaatccgaactggagcggcaggacgaggcccttgatggcgtcgctgccgcagtcgaccgcgctacactcacgatcgacaagcacaataggcgcatgaaaaggctcacttag

SEQ ID NO: 28660 - DNA, 201 bp, synthetic construct
  source 1..201: mol_type = other DNA; note = Synthetic coding sequence
atgccccagtatcagacctgggaggagttttccagagccgctgagaaactctacttggctgatcccatgaaggcccgagtggtactaaagtatcgacactccgacggaaacctctgcgtgaaagtcacagacgatcttgtgcaatggcatctcaactactgcaccctgcgccatggcattgctgggggattggaaacatag

SEQ ID NO: 28661 - DNA, 249 bp, synthetic construct
  source 1..249: mol_type = other DNA; note = Synthetic coding sequence
atgcctcagtaccagacgtgggaggaattcagcagggcagcagagaaactgtaccttgcagatccgatgaaggctcgggtagtgcttaagtaccggcatagcgacgggaacttgtgcgttaaggtgacagacgatctggtgcgccagtgtctggccctgcttctaagactgcaatgcagtggcatgataattgctcactgtattcttgacctactggggtctagcgggcctttggcttcagccagctag

SEQ ID NO: 28662 - DNA, 651 bp, synthetic construct
  source 1..651: mol_type = other DNA; note = Synthetic coding sequence
atgcaggcaaatggtgctggtggcggagggggagggggtggcggtggtggaggcggtggcggtggagggggaggccagggtcagaccccggaactggcttgcctatcagcacagaatggggaatcaagcccatcatccagctcgagcgcaggggacctggcacacgccaatggactccttccctctgctccttcggccgcaagcaacaattccaatagcctgaacgtgaacaacggggtgcccggaggcgcagcggctgcgtcctcagctacggtggcagcagcttctgccacaactgccgcttcatcttctctggcaactcccgagctcggctcctctctaaaaaaaaagaagcgcctaagccagtccgacgaagacgttatacggctgatcgggcagcaccttaacggactgggccttaaccagacggtggacttacttatgcaggaatctggctgtcgcctggaacacccgtcggctaccaaattcagaaaccacgtgatggagggtgattgggataaggctgagaatgatctgaacgaactaaaacccctggtgcacagtcctcacgctattgtggcgcagactttctcggaaacctccattaatttttttccgcttacggcagcattttgtcacgtgaggggctag

SEQ ID NO: 28663 - DNA, 2340 bp, synthetic construct
  source 1..2340: mol_type = other DNA; note = Synthetic coding sequence
atgcgcatcgaggagcgaaaatctcagcatctgaccggtctgaccgatgaaaaagtgaaggcctatctctcactgcatccgcaggtgctggacgagtttgtctccgagtctgtgtccgctgagaccgtcgagaaatggcttaagaggaagaataacaagtctgaagacgaaagcgctcctaaagaggtgtcacgatatcaagacaccaatatgcagggcgtggtatatgagctcaactcctatatcgagcagcgcttggacactggtggagataaccagctactgttgtacgaactcagctcaatcatcaagattgctacaaaggctgatggcttcgcactttattttctgggagaatgtaataattccctctgcatcttcactcccccaggcatcaaagagggcaaaccgagactgattccggcagggcctatcacacaggggactaccgtttctgcatacgtcgccaagtccagaaaaactctgctggtagaggacattcttggagacgagaggtttcctcggggtaccggattggaatccggtaccaggatccagtccgtgctgtgtctacctatagttacggcaatcggggatcttatcggaatactggaattgtaccgtcactggggtaaggaagctttttgtctctcccatcaagaagtcgccaccgctaacctggcatgggccagcgtggctatccatcaagtgcaggtatgccgcggtcttgctaagcaaactgaattaaatgatttcctgctggatgtaagtaagacatatttcgacaatattgtagccatcgactcactactcgagcatataatgatatatgcaaagaacttggtgaacgctgacagatgcgcacttttccaggtggatcacaagaacaaggagttatattcagacctgttcgacattggcgaagaaaaagaaggcaagcccgtcttcaaaaaaaccaaggaaattcgcttctccatcgagaaaggcattgctggtcaggttgctagaacaggcgaagtcctgaatatccccgacgcctatgccgatccccgttttaatcgagaagtggacctatacaccggctacactacccgcaacatcttatgcatgccaattgtgagcaggggaagcgttattggtgtggtacagatggtgaataagatttcaggtagtgccttcagcaagaccgacgagaacaactttaagatgtttgctgtattctgcgccctggcactccattgcgccaacatgtaccatcgaattcgtcacagtgagtgcatctatagagtgacaatggaaaagctctcataccattctatctgcacatcagaagagtggcaggggctcatgcagtttacgttgccagttaggctctgcaaagagattgagcttttccactttgacatcggaccttttgagaacatgtggccaggtattttcgtgtacatggttcacaggagctgcggcacctcttgttttgagctggagaaactgtgccggttcattatgagcgtcaagaaaaattatcgtcgcgtcccctaccacaactggaaacacgcagttaccgtggctcattgtatgtacgccattttgcaaaacaaccacacactgtttaccgatctggagaggaaagggctgctgattgcctgcctgtgtcatgatctcgatcaccgaggattcagcaattcttacctgcagaagttcgaccacccgcttgccgctctatattccaccagcactatggagcagcatcatttttctcagactgtcagcatcttgcaactggaggggcataacatcttctcaaccttgagctcttcagaatatgagcaagttcttgagattatcagaaaggctatcattgctactgacctcgctctttactttgggaaccggaaacagctagaggagatgtaccagacgggaagtctgaacctcaacaaccagtctcaccgtgatagagttatcggcctgatgatgaccgcgtgtgacttatgctccgttaccaaactgtggcccgtgacaaagttgacagctaatgacatttatgcagaattctgggcggaaggggacgagatgaagaagcttggcattcaacccatcccgatgatggaccgcgacaagaaggatgaggtaccacagggacaactcggcttttataatgcagtggcgattccttgttacaccaccctgactcagatcttgccccctacagaacctctcttgaaagcttgtagggacaacttatcccagtgggaaaaggtcatccgtggtgaggagacagccacttggattagctccccgtcagttgcccagaaggctgcagcctctgaagattag

SEQ ID NO: 28664 - DNA, 666 bp, synthetic construct
  source 1..666: mol_type = other DNA; note = Synthetic coding sequence
atggccgcagcttcaggcagtgttctccagaggtgcatcgtaagcccagccggtcggcactctgcaagtctgatattcctgcacggttctggggactctggtcagggcctccgaatgtggattaagcaggtgctgaatcaggacttgacatttcagcatatcaagatcatctacccgactgcgcctccacgattcaaaataacaaacgattgccccgagcacctggaatccatcgacgtcatgtgtcaggtcctgactgacctgatcgacgaagaggtcaagagtgggatcaagaagaaccgcattctgatcgggggattttctatgggcggttgcatggccattcacctggcctaccgcaaccatcaggatgtggccggagtattcgccctctcatccttcctcaacaaggcttctgcagtttaccaggcgttgcagaagtcaaatggcgtgctgccggagttgtttcaatgccatggcacggctgacgagctggttcttcactcctgggccgaggagaccaactccatgctcaaatcccttggagtgaccactaagtttcactccttccccaacgtgtaccacgagttgagtaaaacagaactggacatactaaagttgtggattctgaccaagttgcccggagagatggagaaacaaaaatag

SEQ ID NO: 28665 - DNA, 714 bp, synthetic construct
  source 1..714: mol_type = other DNA; note = Synthetic coding sequence
atggcagcagctagtgggtccgtcctccaacggtgtattgtgagccccgcagggaggcacagcgcaagcttgatctttctacacggttctggcgacagtggtcagggactgagaatgtggatcaagcaggtccttaatcaggatttgacattccagcatatcaagataatctatccaaccgctccccctaggtcctacacccctatgaaaggaggaatttcaaatgtgtggtttgatcgctttaagataaccaacgactgtccagaacacttggagtcaattgacgtaatgtgtcaggttcttaccgacctgatcgatgaggaggtcaagtcaggcatcaagaagaatcgtatcttgataggcggtttcagcatggggggttgcatggcaatacacttggcctaccgcaaccatcaagacgtagcgggtgtattcgctctgtcatcttttctgaacaaagctagcgccgtgtatcaagccctacagaaatctaacggcgtgctgccagaactttttcaatgtcacggcaccgccgatgagctggtattacattcctgggcggaggaaactaacagcatgcttaagagcctgggagtgaccaccaaattccatagcttccctaatgtgtaccatgaactgagtaaaaccgagcttgatattctcaaactgtggatattaaccaaacttcccggtgagatggagaagcagaagtag

SEQ ID NO: 28666 - DNA, 471 bp, synthetic construct
  source 1..471: mol_type = other DNA; note = Synthetic coding sequence
atggagaccgccaaggaaatgacccgtgagagtctgccgatcaagtgtcttgaagctgtaattctcggtatatacctcactaatggccaaccgagcatcgagcgttttccgatttccttcaagacttatttcagcgggaactactttcaccacgtggtgctgggaatctattgtaatggccgttacggatcgctcgggatgtctaggcgcgctgagttgatggataagcctctcacttttcgcacgctgagcgacctgatcttcgacttcgaagatagctataagaaatacctgcacacagtcaagaaagtcaaaattggtctgtacgtcccccacgaaccccattcatttcaacctattgaatggaagcaactagtgctgaacgtgtctaagatgctgagagctgatatacgcaaggagctggagaagtacgcaagagacatgcgtatgaaaggcttatgcagccattag

SEQ ID NO: 28667 - DNA, 936 bp, synthetic construct
  source 1..936: mol_type = other DNA; note = Synthetic coding sequence
atgacagggtcagccgcagatactcaccgctgtcctcatccgaagggagctaagggaaccagatctcggagctctcacgcaaggccggtgagtctggcaaccagtggcggtagcgaggaggaggataaggacggcggagtgctcttccatgtgaacaagagcggtttccccatcgactcacacacgtgggagcgcatgtggatgcacgtagccaaagtgcatccgaagggcggagagatggtcggcgctatccgcaatgctgcttttcttgctaaaccatctatcccccaagtgcccaattaccgtctctctatgacaatccccgactggcttcaggctatccagaactatatgaaaactctgcattatctgaccaacgggcagccctcgatcgagcggtttccaatatccttcaagacctacttctcagggaattattttcaccatgttgtccttgggatttattgcaatgggaggtatgggtccctcggaatgtcacgcagggcagagctcatggacaaacccttaacattcagaaccctatccgacttaatctttgattttgaggactcatacaagaagtacctccatacagtgaaaaaagtcaagatcggtctgtacgtaccacacgaaccccactctttccagcctatcgaatggaagcaactggtcctgaatgtgtcaaaaatgcttcgtgccgatattagaaaagaactggaaaaatacgcaagggatatgcgcatgaagattttaaaaccagctagtgcgcactcacctacccaggttcgttctaggggcaagtccctgtccccgcgtcgcagacaggccagtcctccacgtcggcttgggaggcgggaaaagtcacctgctctgcccgaaaaaaaggtggccgatctctctactttaaacgaggtggggtatcagatacgaatttag

SEQ ID NO: 28668 - DNA, 873 bp, synthetic construct
  source 1..873: mol_type = other DNA; note = Synthetic coding sequence
atgtggatgcacgtcgccaaggttcaccctaaaggcggtgaaatggtcggggcaatccgcaacgcagcattcttggcaaagcctagtatcccacaagtccctaattatcgcctgtccatgaccatccccgattggttgcaggctatacagaattatatgaaaacgttacagtacaaccataccggaactcaattttttgagattcgcaaaatgcgtcccctttccggcctcatggagacagctaaagaaatgacccgggagtctctgcctatcaagtgcttagaggcggtgatcctcggaatatatctcacaaatggccagccttccatagaacgttttccgattagtttcaagacctatttcagcggtaattactttcaccacgtggtcctgggaatttattgtaatggaagatacggatccctggggatgtcccgacgggcagaactgatggataaacctctcacattccgaaccttgtccgatctgatatttgacttcgaggactcctataagaaatatctgcatactgttaagaaagttaagatcggcctgtatgtgccccacgagccccacagttttcagcctattgaatggaagcagttggtgttgaacgttagtaaaatgctgcgtgctgatatccgcaaagagctcgaaaaatatgctagagacatgcgaatgaagatcctgaagcctgcaagcgctcactccccaactcaggtccggtcgcggggaaaatcgctctcacctagaaggcggcaggcctcccctccccgaagacttggcagaagggagaaatctccagcccttccagagaaaaaggttgcagatctttccactctcaacgaagtgggttatcagattcggatctag

SEQ ID NO: 28669 - DNA, 756 bp, synthetic construct
  source 1..756: mol_type = other DNA; note = Synthetic coding sequence
atgaccatccccgactggctacaggcgatacagaactatatgaagaccctgcagtacaaccataccggtacccagttctttgagatccgcaagatgagaccgctgtcagggctcatggagaccgctaaggaaatgacaagagagtcgctgcctattaagtgcctggaagcagtaatcctgggaatctaccttaccaacggacagccttccatcgagcggttccctatctcattcaaaacgtatttcagcggtaactactttcaccacgtagtgttggggatctactgtaacgggcgttacggcagcctgggcatgtcccgccgtgcagaactgatggacaaacctcttacattcaggactctgtccgacctgatctttgatttcgaggacagctacaaaaaatatctgcataccgtcaagaaagttaagatcgggctttatgtcccacacgagcctcacagcttccagcccattgaatggaaacagctcgttctaaatgtgtctaaaatgttacgggcagatattaggaaagaacttgagaaatacgctagagatatgaggatgaagattctgaaaccagctagcgcccactccccaacacaagtgcgttccagaggaaaatccctgtcccccagacggaggcaggcctcccctccccgaagactgggacggagagaaaagtctccggcattgcccgaaaaaaaggtcgccgatttaagtacactcaacgaggtgggatatcagatcaggatttag

SEQ ID NO: 28670 - DNA, 873 bp, synthetic construct
  source 1..873: mol_type = other DNA; note = Synthetic coding sequence
atgtggatgcacgttgcgaaagtgcatccaaagggaggggagatggtgggagctatccgcaatgccgcattcctagctaaacctagcattccccaggtgcccaactaccgtttgtctatgacaatcccagactggctccaagctatccagaattacatgaaaactctccaatataatcacactggcacacagttttttgagattcggaagatgagacccctgtctggcctgatggaaactgcaaaggagatgacaagggaaagcctgcccatcaagtgcctggaggccgttattctgggaatatatttgacaaatggccaaccatcaattgaacgctttcccattagtttcaagacatactttagcgggaattattttcaccacgtggtactcggaatatactgtaatggaaggtatgggtccttgggaatgtcgcgtcgtgctgagctgatggataagcctctgacatttaggacgctgtcagatctgattttcgatttcgaggactcctacaaaaagtatcttcacactgtgaaaaaggtcaagattggcctgtatgtgccccatgaacctcacagcttccaacccattgaatggaagcagcttgtgttaaacgtctccaagatgctgagagcagatattaggaaagaacttgagaagtacgccagagatatgaggatgaagatccttaagccagcaagcgcccatagccctacacaagtgaggtctcgagggaagtcactgtcaccccgtcggcgacaggcctccccacccaggcgccttggccgtcgagaaaagtcccccgctttaccagagaagaaggtggccgatctctcaaccttaaacgaagtgggctatcaaattagaatttag

SEQ ID NO: 28671 - DNA, 723 bp, synthetic construct
  source 1..723: mol_type = other DNA; note = Synthetic coding sequence
atggccggatcgcctgagcttgtcgttctagacccaccttgggataaagagttggctgctgggactgagagccaggctctggtctccgctacccccagagaggacttccgggtccgatgtaccagcaagagggctgtgaccgagatgttacaattatgtggaaggttcgttcaaaaattgggggatgcacttcccgaggagataagagagcctgccctgagagacgcccagtggactttcgagtcagcagtgcaggagaacatctccattaatggacaagcttggcaagaagcttccgataattgctttatggattccgatatcaaggttctggaggaccagtttgacgaaatcatcgtcgacattgctacaaagagaaaacaatacccacgcaagattctggagtgcgtaatcaagaccattaaggccaaacaggagatactgagcctgcctgcactgatcgagcagggtgagggtttctcgcaggtgcttaggatgcaacccgtcattcatctgcagcgcatccaccaggaggtcttttcctcttgtcataggaagcctgatgccaagcccgagaacttcatcacgcaaattgaaactactccaacggaaacagccagccggaagacaagcgacatggtgttgaagcggaagcagacgaaagactgtccccagcgaaagtggtatccgctcagacccaaaaaaattaatctcgacacgtag

SEQ ID NO: 28672 - DNA, 519 bp, synthetic construct
  source 1..519: mol_type = other DNA; note = Synthetic coding sequence
atggcagggtcccccgaattggttgttctggaccccccatgggacaaggagctggccgctggcacagagtctcaggcgctagtttctgccacacccagagaagattttagggttcgttgcacttccaaacgtgctgtgaccgaaatgcttcagctctgcggtcgctttgttcaaaaacttggagatgcactacccgaagaaatccgagagcccgcattacgagacgctcagtggactttcgaatccgcagtgcaagagaatatcagtataaacggacaagcgtggcaggaggcaagcgacaattgctttatggactcagacatcaaggtactagaagaccagttcgacgagatcatcgtggatattgccacaaaacgcaagcagtatccacgcaagattctggaatgcgtgatcaagacgataaaagcaaagcaggagatccttaagcagtaccacccggttgtccacccgctcgatctgaagtacgatccagatccagtcttagcttgcattaactag

SEQ ID NO: 28673 - DNA, 846 bp, synthetic construct
  source 1..846: mol_type = other DNA; note = Synthetic coding sequence
atggcagggtcccctgaactagtcgtgctagacccaccttgggataaggagcttgctgccggaaccgagtctcaggctctcgtttcagcgacacccagggaagattttagagtaagatgcaccagtaagcgagccgtgactgagatgctgcagctttgtggccgtttcgtccaaaaactgggggatgcattgccggaagagattagagagcctgccctgcgagacgcgcagtggaccttcgaatctgcggtccaagagaatatctcaataaacggtcaggcttggcaggaggcttcagacaattgcttcatggattcagacattaaggtcctggaagaccagtttgacgagattattgtcgacatcgccacaaaaaggaagcagtacccaaggaaaattctggagtgtgtcatcaaaactataaaagcaaaacaggagattcttaaacagtatcaccctgtcgtgcatcctcttgatctcaaatatgaccctgacccggctccacacatggaaaaccttaagtgccgcggtgagaccgttgccaaggagatttctgaagcaatgaaatcattgccagccctcatcgagcagggcgagggattttcccaggtgctgagaatgcagcccgtcatccacttgcagaggattcaccaggaagtgttttcatcctgtcaccgcaaaccggatgcgaagccagaaaattttataacccagatcgagactacgccaactgaaaccgcgtcccggaaaactagtgacatggtgttgaagaggaagcagactaaggattgcccacagaggaagtggtatccccttaggccaaaaaagattaatctggatacttag

SEQ ID NO: 28674 - DNA, 228 bp, synthetic construct
  source 1..228: mol_type = other DNA; note = Synthetic coding sequence
atggattcagacatcaaggttttggaggaccagtttgacgagattattgtagatattgccaccaagcgaaagcaataccccaggaaaattttggagtgcgtcatcaagacaatcaaggctaagcaggagatacttaaacaataccaccctgtggtccaccccctggacctgaagtatgatcctgacccgggtgcgaaacccggaggcttggctctgggagctgtgtag

SEQ ID NO: 28675 - DNA, 279 bp, synthetic construct
  source 1..279: mol_type = other DNA; note = Synthetic coding sequence
atggaggactatcaggctgccgaggaaactgcatttgttgtcgatgaggttagcaatatcgttaaggaagctatagagtccgctattggcggaaacgcataccagcactcgaaagtcaaccagtggactacaaacgtcgttgaacagacgctctctcagctcactaagctgggtaagccatttaagtatattgggaacggggtccttttcctgctctacttgcgcgatggcttcctcacccttataaggggtgcgagttctactagaaataacagttag

SEQ ID NO: 28676 - DNA, 204 bp, synthetic construct
  source 1..204: mol_type = other DNA; note = Synthetic coding sequence
atgcagaaaaatggagctggtttacatacagcctccagctgtttttgggatagctctaccgatggtatgattttcattcacgtgtgcgaggtcctactctgcgagatttacgactggaaattcccaatctttgaatgtaacgcctgtttgagcccattcaaaacctttaacaatcgattggccaaggtcttgtgtgtggcttag

SEQ ID NO: 28677 - DNA, 342 bp, synthetic construct
  source 1..342: mol_type = other DNA; note = Synthetic coding sequence
atggaagattaccaagcggctgaagaaaccgccttcgttgtggatgaggtgagtaacattgtaaaagaggcaattgagtcagctatcggtggaaatgcatatcaacacagcaaagtaaaccaatggaccacaaatgttgtggagcaaacattgtcccagctcactaagctaggaaagccatttaagtacatcgtcacctgcgtgattatgcagaaaaacggcgctggtttgcatacagctagtagctgtttctgggattctagtaccgacgggagttgtacagtgcgttgggaaaacaaaaccatgtactgcattgtcagcgccttcggcctgtcaatttag

SEQ ID NO: 28678 - DNA, 2037 bp, synthetic construct
  source 1..2037: mol_type = other DNA; note = Synthetic coding sequence
atgtacgctgctgtggaacacggcccagtactgtgctctgatagcaacatcctatgtctttcgtggaaaggtcgagtccctaagtcggaaaaggagaagcccgtttgccggaggcgctattatgaagagggctggctcgcgaccgggaacggccgtggagtggtgggcgtgacttttacgagctcacactgccggagagatcgctccacgccccagagaatcaatttcaatctacggggtcacaacagtgaggtggtgttagtgagatggaacgagccttatcagaagctggcaacgtgtgatgctgatggtgggattttcgtgtggattcaatatgaggggagatggtctgttgagctggtgaatgatcgtggggcacaggtatctgatttcacttggagtcacgacggtacccaggcgctaatcagctacagagacggcttcgtactggtgggtagtgtctctggccagaggcactggagcagtgaaatcaacttggaaagccagattacctgtggcatttggacccccgacgatcagcaggttttatttggcacagcagatggacaggtcatagtgatggactgccacgggagaatgcttgctcacgtgctccttcacgagtctgatggcgtcctgggtatgtcgtggaattatccaattttcttagtagaggatagttctgagtcggacacagattccgacgattacgctccccctcaagatgggcctgccgcataccctattcctgtccagaacattaagccactgctgacggtgagctttacatccggagatatttcattaatgaacaattatgatgacctctctcctactgtgatccggtccggcctgaaagaagtggtggctcagtggtgcacacaaggcgatttacttgcggtcgctgggatggagagacagacccagctcggggagctccctaatgggcctctgctgaaatctgctatggtaaaattttacaatgtaaggggcgagcatatctttacactggatactctagtgcagcggcctattatctcaatttgctggggccatcgtgattctcgactgttaatggcgagtggcccagccttatatgtagtcagagtcgaacaccgtgtgtcctcactacagttactttgtcagcaggcaatcgcgtccactttgcgcgaggacaaggacgtgtcgaaattaacactgccacctaggctgtgttcctacctgtccacggcttttataccaacgattaaacctcctatccccgatccaaacaatatgcgggatttcgtgagctatccttcggccggtaatgaaagactgcattgtactatgaaacgtactgaggatgatcccgaggtgggagggccatgttacacactgtacctagagtatctggggggactcgtgcccatcttgaaaggaagacgtatttccaagctgagacccgaattcgtgataatggatcctcggacggactcgaagcctgacgaaatatatggcaacagcctgatttcaactgtgatcgactcgtgcaactgcagcgacagttctgatatcgaattatccgacgactgggctgccaaaaagtccccgaagatctcccgagcttctaagtctccaaaactccctaggatctccatagaggcccgaaaatcgcctaagttacccagggccgcacaggaactgagcaggagtcccagactgcctctgcgcaaaccatccgtgggcagcccgtcccttactaggagagagttcccctttgaagatattacccagcacaattatcttgcacaggtcacatctaacatctggggtaccaagtttaagattgtaggtctcgccgctttcctgcccacaaatctgggggcagtcatttacaaaacttcccttttgcatctccagccaaggcagatgaccatctatctgcctgaagtccgcaaaattagcatggattatattaatctgcccgtcttcaatccaaatgttttctccgaggacgaagacgacctcccgggtgacgccgtttggacagattag

SEQ ID NO: 28679 - DNA, 4631 bp, synthetic construct
  source 1..4631: mol_type = other DNA; note = Synthetic coding sequence
atgtacgctgccgtagagcacggcccagtcctctgttccgattccaatatcttgtgtctttcatggaagggcagagtccccaagtccgagaaggagaagcccgtgtgcaggagaaggtattacgaagagggatggctcgccacaggaaacgggcgtggggtagtgggagtcacattcacttcaagccattgccgacgagaccgcagcaccccccaaaggattaacttcaatcttagaggacacaattcagaggtcgttctggtgcgctggaatgagccataccagaagctcgccacatgtgacgccgatgggggaatatttgtgtggatacagtacgaaggccgatggagcgtggagctggttaacgataggggcgcacaggtgagcgattttacatggagtcatgacggcactcaggcgcttatcagctatcgcgacggtttcgtgcttgtcggctccgtctccggccagcggcactggtcgtcggaaatcaatctggagagtcagatcacctgcggcatttggacgcccgacgaccaacaggtgttgtttggaaccgcagatggccaggtaattgtgatggattgtcatggccgaatgctagcacatgtcctccttcacgagagcgatggagttctgggaatgtcctggaactaccccattttcctggttgaggacagcagtgagagcgacaccgacagcgatgattatgctccacctcaggacggccctgctgcataccctattcctgttcagaacatcaagccgctcctgacagtgtcttttacatccggggacatcagcctgatgaataattatgatgatctctcccccacggtgatcaggagtggactaaaggaagttgtcgctcaatggtgtacacagggagatcttcttgcggttgccggaatggagaggcagactcagttgggcgagttgcctaacggtccattactgaagtcagctatggtgaagttctataacgtgaggggtgagcacatcttcaccctggatacacttgtgcagaggcccatcatttctatttgctgggggcacagggattctcgattgttgatggcctctggccctgccctttatgttgtgcgtgtcgagcatcgcgtttcgtctctgcaacttttatgccagcaggctattgcttccaccctacgggaggataaggacgtgtccaagctcacactcccccctagactgtgttcttatttaagcacggcttttatacccactatcaagccccctattcccgaccccaataatatgcgggatttcgtcagttaccctagtgccggaaacgaacggcttcattgcaccatgaaaaggactgaagacgaccccgaggttggtgggccttgctacaccctgtacctcgagtaccttggtggactggtgccaattttgaagggcaggagaatttctaagctccgacccgaattcgtcatcatggacccaaggacggatagcaaacccgacgagatctatggaaattccctgatatccaccgtgatagattcctgtaactgttccgattcatcagacatcgagctgtccgacgactgggcggctaaaaaaagccccaaaatctcccgggctagcaaaagccctaagttgccacggataagtattgaagcacgcaaatctcccaagttaccccgagctgcgcaggagctttctagatcgcctcggctgcccctgagaaagccaagcgttggaagcccgtctctgactaggagagagttcccatttgaagacattacacagcataactacttggcccaggtgacatctaatatctgggggacaaagttcaaaattgttggtctggccgcattcctacctaccaatctcggcgcagtgatctacaagacttccctgctgcaccttcagcctcggcagatgaccatatacttgccagaagtacggaagatctccatggattacatcaacctgcccgtgttcaacccaaacgtgttttccgaagacgaagatgacctacccgtgacaggagcatctggcgtccctgaaaacagccccccatgtacagtaaatattcccatagcacctattcacagcagtgcccaggccatgtcccctactcaaagcatcggtctggtccagtcattgctggctaaccagaacgttcaactggatgttctaaccaatcagacgaccgccgttgggactgcggaacacgccggagattcggctacccagtaccccgtttcaaacagatacagcaacccaggccaggtgatattcggatctgtcgagatggggagaattatccagaaccccccacctctgagcctgcctccccctccccaaggacccatgcagctcagcacagtgggacacggcgatcgggaccatgagcacctacaaaaatctgccaaagccctgcgccctacgccacagttggcggctgaaggcgatgccgtggtattcagcgcaccccaagaggtccaagtgacaaagatcaacccccctcccccataccccggaacaatcccggctgcacctaccacagcggcacctcctcctcctctccctccacctcagcctcccgtggatgtgtgcctgaagaagggagacttctccctctacccgacctccgtgcattatcagactccgttgggatatgaaagaatcaccactttcgactcttccgggaacgttgaagaggtctgtaggcccagaacacgcatgttgtgtagccagaatacatacactttgccagggcctggtagtagtgccactctaaggctcaccgctactgagaaaaaggtaccccagccatgcagcagtgccaccctcaaccgacttactgtccccagatattcaatcccaaccggtgatccaccaccttatccagaaattgccagccagttagcccagggtcggggagccgctcagcgatcagacaattcacttattcacgccactcttcggagaaacaaccgggaagctacgctgaagatggctcaactagctgattcccctcgcgctccccttcagcctttggcaaaatcaaaaggcggaccgggaggggtggtcacacagctgcccgcacggcctccccctgccctgtacacatgctcccagtgctctggaactggtccatccagtcaaccaggtgcgagcctggcccacaccgcctccgccagcccactcgcctctcaatcaagctacagtctgctgagtccccctgattccgccagagaccgcacagactacgtgaactctgcctttacagaggacgaggcactctctcagcattgccagctcgagaagccattgaggcaccctcctctgcctgaagccgctgtgacattgaagcgaccccctccttatcagtgggatccgatgctcggggaggacgtgtgggtgcctcaggagcgcacagcccaaaccagcgggccaaaccccttgaagctttcttccttaatgctctcccaagggcagcacctggatgtttctaggctgcccttcattagcccaaagtcccctgcttctcctacagcaacttttcagactggttacggtatgggggttccatacccgggatcttataacaatccaccgctccctggcgttcaggcaccctgtagtcctaaggatgccctgagccctacccaattcgcccagcaagaacctgcagtggtccttcaacccctttaccctccttcactgtcatactgcaccttacccccaatgtacccaggctcctcgacatgctcgtcactacagctgcctcctgttgccctgcatccatggtcttcctattctgcatgcccacctatgcaaaatccacaagggactctacctcctaagccccacctggttgtggagaagccgctggtcagcccaccccctgctgaccttcagtcgcacctgggcaccgaggtgatggttgaaacggccgacaattttcaggaggtgctgtcgctgactgaaagccccgtgccacagagaactgagaaatttggcaagaaaaaccggaagcggctggacagccgggctgaagaagggtcagtacaggccattaccgagggcaaggtgaagaaggaagccagaacgctgtcagacttcaacagtttaatcagttccccgcatctcgggagggaaaaaaaaaaagttaagagtcaaaaagaccagttgaagtccaaaaagttgaacaaaactaatgagtttcaggacagcagcgagtccgaacctgaactgttcatatctggggacgagcttatgaatcagtcacagggatctcggaaagggtggaaatccaaacgcagccctcgggctgctggtgaactggaggaggctaaatgtagacgtgcctctgagaaggaagatgggcgactgggcagccaagggtttgtttacgttatggcaaataagcagcctttgtggaatgaggccacacaggtttaccaactagacttcggaggacgtgtcacccaggaatcagcgaagaactttcagattgaactggagggcaggcaggtgatgcaattcgggagaatcgacggatctgcctacattctcgattttcagtacccatttagcgccgtgcaggccttcgcggtggccctcgcgaacgtgactcaacgcctcaagta

SEQ ID NO: 28680 - DNA, 3234 bp, synthetic construct
  source 1..3234: mol_type = other DNA; note = Synthetic coding sequence
atggacagcaagatgaagaagatggctgaactgcagctctctgtggtatcggaccctaagaacagaaaggcaatcgagaatcagatccaacagtgggagcagaatctagaaaagttccatatggacctgttccggatgcgctgctatctggccagcctccaaggtggtgagctgcctaatcccaaatcactcctggcagcggctagcagacccagcaaattggcactgggcagactcggtattttgtccgttagttcctttcatgctctcgtgtgtagtcgggacgacagcgccctgaggaaaagaaccctgtccctgactcagcgaggcagaaacaagaaaggaatcttttccagtttgaaaggactggataccctagctcggaagggcaaagagaaaaggccatcaatcacacagatattcgactcctccggatcacacgggttttcggggacacagctgccacagaacagctctaattcctcagaggttgacgagcttctgcatatctatgggtccaccgtagatggagtaccaagggataatgcttgggagatacagacgtacgtgcactttcaagacaatcacggcgtcaccgttggaattaagccggagcacagagtggaggatatcctaaccttggcttgtaaaatgagacaactggaaccttcccactacggtttacagttaaggaagctggtggatgataatgtcgaatactgcattcctgccccttatgagtacatgcagcagcaagtatacgacgaaatagaggtgtttcctcttaatgtgtatgacgttcagttgactaagacagggtccgtttgcgactttggctttgcagtgacagcgcaggtcgacgaaaggcagcacctttctagaatctttatctcagacgtcctccccgacggtctcgcctacggcgaaggactccggaagggcaatgagatcatgaccctcaatggtgaggccgtgagtgatttagacctgaaacagatggaggccttgttttctgaaaagagcgtaggcctgactctaatcgcacgcccaccagataccaaagcaacactgtgtaccagctggtccgattctgatctgtttagccgtgatcagaaatccctgcttccgccacccaaccagtcgcaattgctggaagagttcctagacaacttcaaaaaaaacacagctaatgacttcagcaatgttcccgatattacaactggactgaaacgaagccagacagatgggacccttgatcaagtctcacatagggagaaaatggaacagacgtttaggtccgcagaacagatcacagcactttgccgctctttcaacgatagccaagccaacggtatggagggccctagagaaaatcaggacccaccgcctaggtctctggcccgtcacttgtctgatgctgatagacttcgtaaggtaatccaagaacttgttgacaccgagaaatcatatgtgaaggatttatcatgcctgttcgaactctatctggaaccactgcaaaacgagacctttctaacacaggatgagatggaatctttgttcggcagtctgcctgaaatgttggaatttcagaaggtcttcctggagaccctcgaggatggaatttcggcctcatcagactttaatacgctggagacaccatcccaattcaggaagctgctattcagccttggtgggtctttcttatactatgcagaccatttcaaattatacagcggattctgtgctaatcacattaaggttcaaaaggtactcgaacgtgcaaagacagacaaagcctttaaggcgttcctggacgccagaaatccgacgaaacagcactcgtccacactggaatcctatctgattaagccagtgcagcgggtgctcaagtaccccttactcctcaaggaactcgttagtctgacagaccaggagtcagaggagcattatcatctgacggaagcactgaaggcaatggagaaggtcgcatcccacatcaacgaaatgcagaagatttatgaagactacggcactgtgtttgatcagcttgtggcggaacagtcggggacagagaaggaggtgaccgagctgtcaatgggagaattgctgatgcacagtacagtgtcctggctcaaccccttcctttccctcggcaaagctagaaaagacctggaattgaccgtgtttgttttcaaaagggccgtgattctagtctacaaggaaaactgtaagttaaagaaaaagctgccatccaactctaggccagctcataatagtaccgatctggatccattcaagttccgttggctgatccccatctctgccctacaggtgcgcctgggaaacccggcaggtaccgagaacaactctatctgggaactgattcacactaagtcagaaatagaaggcagacccgaaacgatttttcaattgtgctgcagtgacagcgaatccaaaaccaacatcgtgaaggtgatacggtcgattctgcgcgagaattttcggcgacatatcaagtgtgagttgcccctggaaaagacctgcaaagaccgcctggtccccctcaagaacagagtccctgtttcggcgaaactggcctccagccgtagcctgaaggtgttgaagaattcaagttctaatgagtggacgggagaaaccgggaaagggacattgctggactctgacgagggcagcctcagctctggtactcaatccagcgggtgtcctaccgcggaaggacggcaggacagtaaaagcaccagtcccggtaaatacccccatcccggactcgctgattttgcagataacctgattaaggagtcagacatattatccgatgaggacgatgatcaccgtcaaactgtgaagcaaggcagtcccacaaaggatattgagatccagttccaaaggctccgcatttcagaggacccagacgttcacccagaagcggagcaacagccaggcccagagtctggcgagggccagaagggaggcgaacaacccaagctggtgagaggacacttttgccctataaagcggaaggctaattcaactaagcgggacagaggcacactcctgaaagctcagatccggcatcagtcactcgactcccagagcgagaatgccaccatcgacctcaactccgtgctggaaagggagttcagcgtccagagcttaacttctgtcgtgtcagaggagtgcttttacgaaacagagtcgcatggcaagagttag

SEQ ID NO: 28681 - DNA, 579 bp, synthetic construct
  source 1..579: mol_type = other DNA; note = Synthetic coding sequence
atgtcccagtgcgcgtgcctcgaggaggtccatctccccaatatcaaaccaggcgaaggccttggcatgtacatcaaatcaacatacgatggcctacatgttattacaggcaccacagagaatgttggatggcagttgaaaaatctggtcaagaagctaagagagaatcccactggagtcgtgctgctgctgaaaaaacggccaaccggttccttcaactttacccccgcaccgctcaagaacctgcgctggaaaccccctctcgtgcagacgagtccaccaccagctaccacacagtcacccgagtcgacgatggacacatctctgaagaaagagaaaagtgctatcttagacctgtatatcccaccacctcctgctgttccatattcccccagagacgaaaacgggtcattcgtatacggtggttccagcaaatgcaagcaacctttgcctgggcctaagggcagcgagagcccaaattcattcttggatcaagagagtcgccgacgtaggtttaccatagcagatagtgaccagcttcccggatacagcgtggagaccaacatcctgccaacgtag

SEQ ID NO: 28682 - DNA, 1668 bp, synthetic construct
  source 1..1668: mol_type = other DNA; note = Synthetic coding sequence
atggaacctgtaacaaaatggtcaccgaaacaggtagtggactggaccagggggctggatgactgcctgcaacagtacgtgcacaaattcgaacgtgaaaagataaatggtgagcagctcttgcagatctcacaccaggacctagaggagctcggagtcactagaatcggccaccaagagctggtcctggaagccgtggacttattgtgtgcccttaactatggccttgagaccgataatatgaagaacctggtgctgaagcttcgcgcttctagccataaccttcagaattatatcagtagcagacggaaatccccagcttacgatggaaataccagtcgaaaggcccctaatgagttcctaacctctgttgttgagctcattggagcagcaaaggcccttcttgcatggttggacagggccccattcacgggaattaccgacttctccgtgaccaaaaataaaattatccagttgtgtttagatctaaccactaccgtacaaaaagattgctttgtggctgaaatggaggacaaagttctcactgtcgtgaaagtactaaacgggatatgtgacaagacaatccgtagcacaactgatcccgtgatgtcgcagtgcgcctgtttggaggaagttcacttacctaacatcaagcccggagaaggtctcggcatgtatatcaagagcacttacgacggcctgcatgtgatcactggcaccaccgagaattcgcctgccgacagaagtcagaagattcacgccggtgacgaggttatccaggtcaaccagcaaacagtcgtgggttggcagctaaagaaccttgttaaaaagctgcgggaaaacccgacgggtgttgtgcttttgttgaaaaaaaggcccaccgggtcttttaacttcacgcctgccccattaaagaacctgaggtggaagccaccactcgttcaaaccagccctccaccagccacgacccagtccccggagtcaacaatggacactagcctgaaaaaagaaaaatctgcaattctcgatctgtacattcccccaccacccgctgttccatactcgcctagagacgagaatgggtcgttcgtttatggaggcagctctaaatgcaagcaacccctgcccggaccaaagggaagtgagagcccaaactcattcctggaccaggaatccaggaggcggagatttactattgccgatagtgaccagcttccaggctactcagttgaaacaaacattttacccacgaaaatgcgtgaaaaaaccccgagctacggtaagccaagacctctcagtatgcccgcagatgggaactggatgggaatcgtggaccccttcgccagaccacgaggacacgggagaaagggcgaggatgccctgtgtagatatttttccaacgaacggatccctccaattattgaagaatccagttcccctccttacagattctccaggcccacaaccgaaagacacctggtccggggtgcagactatatccggggttccaggtgctacatcaattctgacctacatagcagcgcgacaataccttttcaagaagaaggaacaaagaaaaaaagtggctccagcgccactaaatctagcagcactgagccttctctgctggtgagctggttcaccagactcaagctcctgacacactag

SEQ ID NO: 28683 - DNA, 708 bp, synthetic construct
  source 1..708: mol_type = other DNA; note = Synthetic coding sequence
atgcgatctcgcgttttatggggtgccgctcggtggttgtggccgagacgcgctgtggggcctgcacgacgtccactctcaagtgggtcacctcccctggaagaactttttactcggggtgggcctctccgtaccttcctcgagagacaagccggaagtgaggcacatctgaaggttaggcggccagagttgctggccgtcataaaacttctgaatgagaaggaacgtgaactcagagagactgaacacttgctgcacgatgagaatgaggacctgcgcaagctggctgaaaatgagattaccctttgtcagaaggaaattacccaactgaaacaccagatcatcttgttactagtgccatcagaagaaacagacgaaaacgatttgatcctcgaggttaccgctggtgtaggaggcggactccgccacgcttcagcgtctattggaggaagtgaagcttatcgacacatgaagtttgaaggcggagtacaccgagtgcagcgcgtgccgaagacagaaaagcagggcagagtccataccagtacaatgacggtggctattctgcctcagcctacagagattaatttggtaatcaaccctaaggacttgcggatcgatacaaagcgggcaagcggagccggagggcagcatgtgaacacgactgatagcgccgtacgcatcgtgcacctccccaccgattggaagtag

SEQ ID NO: 28684 - DNA, 816 bp, synthetic construct
  source 1..816: mol_type = other DNA; note = Synthetic coding sequence
atgcgctccagggtcctttggggcgctgcacggtggctgtggccacgcagggcggtcggcccagccagacgtccgctgtcctccgggtcaccaccgctcgaggagctcttcaccaggggaggcccactgagaacctttctggaacgtcaagcaggtagtgaggctcatttgaaggtgagacgccctgagctactggcggtgattaagttgttaaatgagaaggagagagagctcagggagacggaacatctgctacacgacgagaacgaggacttgagaaagctggcagaaaacgaaatcacactgtgtcagaaggaaatcacacagctaaagcatcagatcatactgttgctggtaccgtccgaggaaaccgatgaaaatgatcttatcctggaggtgaccgctggggttgggggacaggaagctatgcttttcacttcagaaatattcgatatgtatcagcaatacgcagcgtttaagcggtggcactttgagacgctggagtattttccatctgagctgggaggacttcgccatgccagcgcctccataggcggtagtgaggcatatcgccatatgaagtttgagggcggagtgcacagagtgcagcgagtgcccaagaccgaaaagcaaggcagggtccatacttctactatgactgtggcgattctgcctcaaccgactgagatcaatttggtcatcaatccaaaagacttgaggatcgataccaaacgggcaagcggcgctggaggtcagcatgtaaatactactgatagcgccgtgaggatagtgcacctcccaacggactggaaatag

SEQ ID NO: 28685 - DNA, 1143 bp, synthetic construct
  source 1..1143: mol_type = other DNA; note = Synthetic coding sequence
atgaggtctcgcgtcctgtggggtgctgccagatggctgtggcccaggcgtgcagtagggcctgccagacggccactttcttcaggaagccccccactggaggaattgtttacccggggtggcccactgcgaacgttcctggagaggcaagctggctcagaggcccacctgaaggtccgtcggcctgagctcctcgcagttattaagctcctaaacgagaaagagcgggagttgagggagactgaacacctcctgcacgatgagaacgaggatctgagaaagttagccgagaacgaaatcaccctttgccaaaaagagatcacccagctaaaacatcagatcatactgttgctggtgcctagcgaggaaacggacgagaatgatctcatattggaagtaacagcgggagtcggcggtcaggaggcgatgttatttacgagcgagatctttgatatgtaccagcaatatgcagcgttcaagagatggcacttcgagacactggagtatttcccctcagagttaggcggtttaagacacgcctctgcctcgattggcggaagcgaagcctatcggcacatgaagttcgagggaggagtgcatagagttcagagggtcccaaaaactgaaaaacagggccgagtgcatacaagtaccatgactgttgccatactaccccagcccaccgaaatcaatttggtcatcaatcctaaggatctcagaatcgacactaaaagggccagcggcgctggaggacaacacgtgaacaccaccgactctgccgtgcggattgtgcaccttccaaccggagtggtcagcgaatgtcagcaggagcgcagccaattaaaaaataaggaactagcgatgaccaaactgagggcaaagctgtattcaatgcacctggaagaggaaatcaataagcgccagaacgctcgtaaaattcaaataggcagtaaaggccgatcagagaagatcagaacctataacttcccccagaacagggtcactgatcatagaatcaacaaaactctgcatgacctggagacctttatgcaaggagactacctgctggatgagctagtgcagtcactaaaggagtacgctgattatgaaagcctggtggagataatcagccagaaagtgtag

SEQ ID NO: 28686 - DNA, 3561 bp, synthetic construct
  source 1..3561: mol_type = other DNA; note = Synthetic coding sequence
atgtgtgaagtgatgcccacaattaatgagggcgatagactgggcccaccccacggagccgacgcagatgccaactttgagcagttaatggtcaacatgcttgacgagcgggagaagttactagaatctctccgcgagtcccaggagactctcgcagccacacagtctaggctgcaggatgctatacatgaacgcgatcagctccagcgccaccttaacagcgccctacctcaggagttcgctacactcactagggagttgtcaatgtgccgggagcagctcttggagagagaggaagaaatttcggagcttaaagccgaaagaaataatacacgactgctcctcgagcatctcgaatgcttggtctcccggcatgagcgctctctgagaatgaccgttgtgaaaaggcaggcacagagcccttctggggtttccagcgaggtcgaggtcctgaaagccttaaagtccttattcgaacatcacaaggccttggacgagaaggtacgtgagcgcctccgcgctgcactggaaagggtcaccacattagaagagcagttagctggtgcacaccagcaagtgtctgcactgcaacagggtgccggagtgagggatggagctgcagaggaggagggcacagtggaattgggtccaaagagactgtggaaagaagatacgggtagggttgaagagttacaggaattgctcgaaaagcagaattttgagctgagtcaggcacgcgagaggctggtcaccctgacaactaccgtcaccgagttagaggaagatctcgggacagctagaagggatctgataaaatcagaggagctgtcttctaagcatcagagggacctgagggaggcactggcccagaaagaagatatggaggaaaggataacaacgctggaaaagagatacttagcagcccagagagaggcgaccagtatccatgatctgaatgacaaactggaaaatgaactggccaataaggagtccctgcaccggcagtgcgaggagaaggccagacacttacaggagctcctggaggttgctgagcagaagctgcaacagaccatgcggaaagcagaaaccttaccggaggtcgaagcagagctcgcccagagaatcgctgcattaaccaaagccgaagagaggcatggtaatatcgaggaacacctccggcagctggagggacagctcgaggagaagaaccaagaactggctagagttaggcaacgcgagaagatgaacgaggatcacaataagagactgtcagacaccgtggaccggttgctgtctgaatctaacgagaggctgcagctgcacctcaaggagaggatggccgctcttgaggagaaaggtaggctgtcagaggagatagagaagctgcgccaggaggtggatcagctcaaaggcagagggggtccttttgttgacggcgtgcatagcagatcacacatgggtagtgccgctgatgttcgcttctctcttggcactaccacgcatgctcctcccggagtgcatcgtcgctacagcgcgctgcgtgaggagtcggctaaagactgggagacttcccccctcccaggaatgttagcacccgctgccggtccagcattcgactctgatcctgaaatttcagatgtcgatgaagacgagccagggggactggtgggctcggccgacgtggtttccccgtccgggcattcggacgctcagacactcgccatgatgctgcaagaacagcttgatgctatcaatgaagaaattcgcatgatacaagaagagaaagaatccactgagctgagggccgaggagatcgagactagggtcacaagcggaagcatggaggcactaaatctgaaacagctccgaaaacggggaagcatcccaacctctctcacggcactatcactcgccagcgcctctccaccgttatctgggagaagcaccccgaaattgacctctcgcagtgccgctcaggaccttgacaggatgggggtgatgaccctcccctcagacctgcggaagcacagaagaaaactgctgtcccccgtgtcccgggaggagaatagggaagacaaggctactatcaagtgtgagacatctcctccgtcttcaccacgtactctgaggctggagaagctcggacaccccgcactgtctcaggaggaaggaaaaagtgccttggaggaccagggatcgaaccccagttccagcaacagttcccaagattccctgcacaagggcgctaagcggaagggcatcaagagctctattggcagattattcggcaaaaaagaaaagggcaggctgatacagctttccagggatggcgctacgggtcacgtcctgctgacagattctgagtttagtatgcaggagcccatggtgccagctaagcttggaactcaagccgaaaaggatcggcgactgaagaaaaaacatcagctgctggaggacgccagaagaaaggggatgccatttgctcagtgggacggcccaactgtcgttagctggttggagttatgggtaggcatgcccgcttggtatgtggccgcatgtcgggctaatgtcaaaagcggcgctatcatgtctgctttgtccgacacagaaatccaaagagagatcgggatctcaaatgcattgcaccgccttaagttgcggctagccatccaggagatggtgagcttgacttcccccagcgctccgccaacctccaggaccagttctggtaatgtgtgggtcacccacgaggaaatggagaccctcgaaacatccacgaagacagatagcgaggaggggagctgggcccagaccctggcgtacggggacatgaaccacgagtggattggtaacgagtggctcccctctctgggattaccccagtatcgatcatatttcatggagtgcctcgtcgacgctcggatgttagaccacttgactaaaaaggatctgcgcgtgcatctgaaaatggtggattcattccaccggacctcattgcagtacgggatcatgtgtctgaaaagattgaattacgatcggaaggagttggagaagaggagagaggaaagccaacatgaaattaaagacgtgctcgtgtggacaaacgaccaggttgtccactgggttcagtccatcggactgagggactatgctggaaacctgcacgaaagtggggtgcatggggctcttcttgcgctggacgagaacttcgatcataacaccttagccctgattttacaaatcccaacccagaatacccaagccagacaggtaatggaacgcgagttcaataatctacttgccttgggcaccgacagaaaactcgacgacggggatgataaagtgttccgccgagccccttcctggcgtaaacggttccggccacgggagcaccacggtcgtggcggtatgttgagcgctagcgccgagaccctgcccgcaggcttccgagtgtcaactctcggcactttgcaacccccaccagcaccccctaagaaaatcatgcctgaagcacacagccactatttatatggccacatgctcagtgccttcagggactag

SEQ ID NO: 28687 - DNA, 1803 bp, synthetic construct
  source 1..1803: mol_type = other DNA; note = Synthetic coding sequence
atgtcgcgagttgctaaatatcgcaggcaggtaagtgaagaccccgatattgactctttgctggagaccctgagccctgaggagatggaggagctggagaaggaattagatgtagttgatccagacggcagcgtgcctgtcggtctgcgtcagcgcaaccagaccgagaagcaaagtaccggagtttacaaccgcgaggccatgctcaacttctgcgagaaagaaaccaagaagctgatgcagcgcgaaatgtcaatggacgagtcaaaacaggtggaaactaagactgatgctaaaaacggcgaggagagaggcagagacgcctccaagaaggcgttaggtcccagacgagactccgaccttggcaaagaaccgaagcggggtggtcttaagaaatcttttagccgagaccgggacgaggctggtgggaagtctggcgagaagcccaaagaggagaaaataatcagaggaattgacaaagggagggttagagccgctgtggacaaaaaggaggctgggaaggacggcagaggtgaagagcgcgcagtcgcgaccaagaaggaggaagaaaagaagggcagtgaccggaatactggactgtctagggataaggacaagaagagggaagagatgaaagaggtggccaagaaggaagatgatgagaaagtgaagggtgagcgtcggaataccgacacacggaaggagggagaaaaaatgaagcgcgctggagggaataccgacatgaagaaagaagatgagaaggttaagcggggtacaggcaacaccgatactaaaaaggatgatgaaaaagtaaagaaaaacgagccgttgcacgaaaaggaggcaaaagatgattccaagaccaagacgcctgaaaagcagacgcccagcggccctacaaagccttccgagggacccgctaaggtggaggaagaggccgctcctagtatttttgacgagccccttgaaagggtgaaaaataatgacccagaaatgacagaggttaatgtaaacaactcagattgcatcactaacgaaatcctagttcggtttacagaagctctggagttcaatactgtggtgaaacttttcgctctcgctaacactagagccgatgaccacgtcgcctttgcgatcgccatcatgcttaaggccaataagaccatcacaagtctaaacctggactcaaatcacatcaccgggaaggggatattggccattttccgggctctgttacagaacaatacacttacagaattgagatttcacaaccagcgccacatctgtggaggcaaaacagagatggagatagccaagctcctgaaggaaaacaccactctgctgaaactgggctatcattttgagttggcaggacctcggatgaccgtaacgaatctgttgtcaagaaacatggataaacaaagacagaagagattgcaagagcaacgccaggcacaagaagccaagggagagaagaaggacctgctggaagtcccaaaagcaggcgcagtggcaaaggggagcccaaaacctagtccccagccgagccctaaacctagcccaaagaacagcccgaagaagggaggagccccagcggctccgccaccgccacccccacctcttgcacccccattaattatggaaaacttgaagaatagcttgtcgcccgctacccagagaaagatgggagataaagtgctccccgctcaggaaaagaacagtcgggaccagctgctggcagccattcggtcttcaaatctcaaacagttgaaaaaagttgaagtgcctaaactgctgcagtag

SEQ ID NO: 28688 - DNA, 828 bp, synthetic construct
  source 1..828: mol_type = other DNA; note = Synthetic coding sequence
atgggcactcggctgcctctcgtgctgcggcaactgcggagaccccctcagcccccaggaccgcctaggaggctgagagtgccttgcagagcaagcagcgggggaggcggagggggagggggaggcagggagggcctgctaggccagcgcagacctcaagatggccaggcaaggagtagttgttctcccggtgggaggacaccagccgctcgagattctatcgtaagagaggtgattcagaactcaaaggaggtactgagcctcctccaggagaaaaatcctgctttcaagccagttcttgccataattcaggcaggcgacgacaatctcatgcaggaaattaaccaaaatctggcggaagaagcaggtctgaatatcactcacatttgccttcctcctgattccagcgaggcagaaatcatcgatgagattctgaagatcaacgaggacacccgggttcacggccttgctctccagatttccgaaaatctgttttccaacaaagtattaaacgccctcaaaccagagaaggacgtggatggcgtcaccgacattaacttgggcaagctggtgcgaggtgacgctcatgaatgcttcgtgtccccggttgccaaggccgttatcgagctgctcgagaaatccggcgtaaacctcgacggaaagaagatcttagtggtgggagctcatgggtcgctcgaagccgctctgcagtgtctctttcagagaaagggtagcatgacgatgagtattcaatggaaaacacggcagctgcaaagtaaaactgaatcacggtcggtcacccgtctggagtgccggagagtgatttag

SEQ ID NO: 28689 - DNA, 999 bp, synthetic construct
  source 1..999: mol_type = other DNA; note = Synthetic coding sequence
tgagggagggaggggctactgggtcaacgtcgtcctcaggacggccaagcacgcagttcatgctcgccagggggtcgcacacccgcagctagagatagcattgttcgcgaagtcattcaaaactctaaagaagtcctctccctgctgcaggaaaaaaaccccgctttcaagcctgtcctggcaattattcaggccggtgacgacaatctgatgcaagagataaaccagaacttggctgaggaagcagggctgaacataacccacatatgcctgccacctgattcctcagaggccgaaatcatcgacgagatcttaaaaataaacgaagatacacgtgtacacgggctggccctgcagatctctgagaatctcttcagcaacaaggtgctgaatgcacttaagccagaaaaagatgttgacggtgtcacagatatcaatttgggaaagttggtgcggggagacgcccatgaatgctttgtcagtcctgtggccaaggctgtcatcgagcttctagaaaaaagcgttggagtaaatctcgatgggaagaagattctcgtggtaggcgctcatgggagcctggaggcagccctgcaatgcctctttcagcggaagggcagcatgaccatgtcaatccagtggaaaacgcgccagctccagtcaaaactacacgaagcagacattgtcgttttaggctctcctaagcccgaagagattcccctgacatggatacagccagggacaactgtgctcaattgctcccacgatttccttagtggcaaagtgggatgtggatctccgaggatacattttggtggcctcatcgaggaagatgacgtaatcctgctcgccgctgcgttaaggatccagaacatggttagtagtgggaggcgttggctccgggaacagcagcatagaaggtggaggctgcattgcctgaagctccagccactctctccagtgccctccgatatagaaatcagtcgtggtcaaaccccctag

SEQ ID NO: 28690 - DNA, 2937 bp, synthetic construct
  source 1..2937: mol_type = other DNA; note = Synthetic coding sequence
atgggcacaaggctcccgctcgtgcttcgccaattgcgcaggccaccccagcccccaggtccaccacggaggttaagagtaccctgtcgggctagtagcggcggaggcggtgggggagggggtggcagagaggggctgctagggcagcggagacctcaagacggccaagcacgctccagctgcagtccaggagggaggacgccggcagcgagggatagcatagtacgcgaagtgatacagaattcaaaggaggtcttgtcacttcttcaggaaaaaaatccagcttttaagcctgttctggctatcatacaagccggagatgacaacctgatgcaggagattaaccagaatctcgcagaggaggctggactgaacatcacccatatctgcctcccccctgactcatccgaagccgaaattatagatgagattctcaagattaacgaggacacccgcgtacacggtcttgcactccagatcagtgagaacctcttcagcaacaaggtactcaatgctcttaaacccgagaaggatgtggacggggtcaccgacattaacttaggtaaactcgtgcgcggagatgcccacgagtgcttcgtatcgcccgtggccaaggccgtgatcgagcttctagaaaagagcggagttaatttagacggaaagaaaatcttagtcgtgggtgcccatgggagcctagaggctgccctgcagtgcctgttccagcgcaagggatccatgaccatgagcatccagtggaaaacacgccagctgcagtcaaagctgcacgaggccgacatcgtggtcctgggatcacccaagcccgaggagatccctctaacgtggatacaacctggtactacagtcctcaactgttcacatgatttcctctccgggaaggttggatgtggcagcccacgaattcattttggaggactaatcgaagaggacgacgtgattttgctggccgcagctctccgaatacagaatatggtgtcctcaggccgaaggtggctgcgcgagcagcaacaccggaggtggcggctgcactgtcttaaactgcaaccattgagtccggttcccagtgatattgagatctcaagggggcagacccctaaagcggtggatgtgttggctaaggagattggcctccttgcagacgagatcgaaatctacgggaagtccaaggccaaggttcgactatctgttctcgaaagattgaaagaccaagcagacgggaaatacgtcctggttgcaggcataacacccacgccactgggtgagggcaagtccacggtgaccatcggactcgtgcaagccctgacagcacatcttaacgtcaatagttttgcatgcctgaggcagccctcccagggccctactttcggtgtgaagggcggagccgcagggggagggtatgcccaagtcatccccatggaggagttcaacctccatctcacaggcgacatacacgcgattacagctgccaataatctattagccgcagcaatagacactaggattctccatgagaacacccagaccgataaggccctgtataaccggttggttccgctcgttaatggggtgcgtgaattcagcgagattcagctggcccgattaaagaagctgggaattaacaagactgatccaagtacgctgaccgaagaggaagtttcaaaattcgcacgtttggatattgaccctagcacaatcacttggcagagggtgctagacactaacgacaggtttctgagaaagatcaccattggacaaggaaacacggaaaaaggccactatcgtcaggcccaatttgacatcgcggtggcatctgagattatggcagtcttagctcttactgatagtctcgccgatatgaaagcccgacttggccgaatggtcgtggcaagtgataagtcagggcagcccgttaccgccgatgacctcggagtgacgggggcattgaccgtcctgatgaaagacgcaatcaaacctaatttgatgcagacactcgaagggaccccagttttcgttcacgccggaccttttgctaatattgcccacgggaatagcagcgtgctagccgacaagattgcactgaaactcgttggcgaagagggcttcgtagtcactgaagccggtttcggagccgatatagggatggaaaaattcttcaatatcaagtgcagagcctctgggctggtgcccaatgtggtcgtgctggtggcaacagtacgcgctctgaagatgcacggtggcggaccatctgtaactgcaggcgttcctcttaaaaaagaatacaccgaggaaaacatccagcttgtcgccgatggctgctgcaacctacagaagcagatacagattacccagctgtttggggtacccgtggtggtcgccctaaacgtgttcaaaacagacacccgggctgagatcgacctggtttgtgagctcgccaaacgagccggtgcatttgacgccgtcccatgttaccattggagtgttggcggaaagggttccgtcgacctggcccgtgctgtgagggaggccgcatctaagcgcagcagatttcagttcctgtacgatgtgcaggtgcctattgtagataaaattagaaccatagctcaggcagtgtatggtgcgaaggacatagaactgtctcctgaggcccaggcaaagattgacaggtacacccaacagggtttcggtaatctgccgatatgcatggcaaaaactcatcttagtttaagccatcagccggacaagaaaggcgtcccaagagatttcatcctgcctatctctgatgtgagggcaagcattggcgcaggattcatctatcctctggtcggaacgatgagcacaatgcccggtcttcccactagaccctgtttttacgacatcgacctggacaccgaaactgagcaggtgaagggactgttttag

SEQ ID NO: 28691 - DNA, 408 bp, synthetic construct
  source 1..408: mol_type = other DNA; note = Synthetic coding sequence
atgattcctaacggatatttgatgtttgaggacgagaattttatcgaatctagtgtggctaaactgaatgccctgaggaagtctggccagttctgtgacgtacggctgcaagtctgcggtcacgaaatgctcgcccacagagcggttctggcttgctgctccccttacctctttgagatctttaattctgacagcgatcctcacggcatcagtcatgtgaagttcgacgacttgaaccctgaggctgtggaagtcctgctgaattatgcatacacagcccaactgaaagcagataaggagctagtcaaggacgtctactcagcagcaaagaagctgaagatggatcgagtgaaacagcacctactgtatttctgcctgcactccactagcacaagttctctgctctag

SEQ ID NO: 28692 - DNA, 1929 bp, synthetic construct
  source 1..1929: mol_type = other DNA; note = Synthetic coding sequence
atgataccaaacggctatctcatgttcgaagatgagaactttatcgagagctcagttgccaagcttaatgcactgaggaaaagcggacagttttgtgatgtgagactgcaagtctgtggccacgagatgctcgcgcacagggccgtgctcgcctgctgtagcccttacctattcgagattttcaattcagactcagatcctcacggaatatcccacgtgaagtttgacgaccttaaccccgaggctgttgaggtgctcctgaactatgcctacacggcacagttgaaagctgataaagaactggttaaggatgtctacagcgcagccaagaagctcaagatggacagagtgaagcaggtgtgcggagactatctcctgagtagaatggacgtgaccagttgtatctcgtatagaaactttgcctcctgcatgggcgacagcaggctactgaacaaggtcgacgcatatatccaggagcacctgttgcagatctcagaggaagaggaattcctgaaactgcccaggctcaaattagaagtcatgctggaggataacgtgtgcctgccatctaacggtaaactctatacaaaagtgattaattgggtgcagaggagtatatgggagaatggggatagtctggaggagctgatggaggaggttcagactttgtactattccgccgatcataaacttctggatgggaacttactggatggtcaggcagaagtgttcggaagcgatgatgatcacatccagttcgtgcagaagaagccacctagagaaaacggccacaagcagatctcctcttcttccacaggctgtctgtcatccccaaatgccacggttcagagtccaaagcacgagtggaagatcgtcgcatccgagaagaccagcaacaacacatatttatgcctggctgtcctagatggcatattttgcgtcatttttttgcatgggcgtaacagcccgcagagctcacccacctccactccaaagctgagtaagtcattgtcctttgaaatgcaacaagacgaactgattgaaaagccaatgagccctatgcagtacgcccgaagcggcctgggaacagctgagatgaatggcaagctaatagctgccggaggctacaatcgcgaagagtgcttgaggaccgtcgaatgctataatccacacactgatcattggtcttttctggcacctatgcgaacacctagggcgaggttccagatggcagtgctgatgggacaactgtatgttgtagggggatccaatggtcacagcgatgaccttagctgtggagagatgtacgatagtaacatcgacgattggatccctgtcccggagctgcggaccaacagatgtaatgctggcgtctgcgctctgaatggcaagctgtacattgtgggtggaagtgatccctacggtcagaaggggctcaagaattgcgacgtgttcgatcctgtgacgaagttgtggactagttgcgctcctctaaatatccgacgccatcagagtgcggtgtgcgaactcgggggttatttatacatcattggtggtgcggaaagttggaactgcctaaatacagttgagagatacaatcccgagaacaacacgtggaccctgatcgcccctatgaacgtggctcgccgaggggctggcgtcgctgttcttaacgggaagctcttcgtgtgtggaggctttgatggctcacacgcaatcagttgcgtcgaaatgtacgatcccactcggaacgaatggaaaatgatggggaatatgacaagcccaaggtccaacgcagggattgctaccgtagggaataccatttacgcggtggggggttttgatgggaacgagttcctcaacacagtggaggtatataacctcgagagtaatgaatggtccccgtacactaagatttttcagttctag

SEQ ID NO: 28693 - DNA, 408 bp, synthetic construct
  source 1..408: mol_type = other DNA; note = Synthetic coding sequence
atgagtaaaaataccgtcagttccgcaagatttagaaaggtggatgtggacgaatatgacgagaataaatttgtcgacgaggaagatggtggggacggacaggctggccctgacgagggggaagtggactcttgccttcggcaaggcaacatgaccgccgctctacaggccgcactaaaaaacccccctataaacacaaaaagtcaagcggtgaaggatcgcgcaggctccatagtcctaaaggtgctcattagttttaaagcgaatgacatcgaaaaagctgtgcagagcctggacaagaatggagtggatttacttatgaagtacatttataaaggattcgagagtcccagtgataacagttcagctatgctcttacagtggcatgagaaggtccctctcgtgtag

SEQ ID NO: 28694 - DNA, 849 bp, synthetic construct
  source 1..849: mol_type = other DNA; note = Synthetic coding sequence
atggccagttcctttcttcctgctggagcaattactggagactcaggaggggaactgtcctccggggacgactcaggtgaggtggaattcccgcactcccctgaaatcgaagaaacgtcctgcttggcagagctgttcgaaaaggccgctgctcatttacaggggttaatccaggtcgcttctcgtgaacagctgttgtacttgtacgcacgctacaaacaggtgaaggtcggcaactgtaatacgccaaagccttccttttttgatttcgaggggaagcaaaaatgggaggcatggaaggcccttggggacagctcccctagccaagccatgcaagaatacattgctgttgtgaagaagctggatccaggatggaatccgcagatacccgagaagaagggtaaagaggctaacacagggttcggaggaccagtaatcagttctctgtaccatgaggagacgatacgcgaggaggataaaaacatattcgattattgtagggagaataacatagaccatatcaccaaggccatcaagagtaaaaatgttgacgtaaacgttaaggacgaagagggccgagcacttttgcactgggcctgcgaccggggtcacaaggaactagtgacggtcctgctgcaacaccgggcagatattaactgccaggataacgagggacagacagctctgcactacgcctcagcatgtgagttcttggacatagtcgagttgcttcttcagagcggagcagatcccaccctgcgtgaccaggatggctgccttcccgaagaggtcacaggatgtaagactgtgtcccttgtacttcagaggcatacgaccggaaaggcctag

SEQ ID NO: 28695 - DNA, 9353 bp, synthetic construct
  source 1..9353: mol_type = other DNA; note = Synthetic coding sequence
atgagatccagcaaatcgaaagaggtcccgctccccaatcctaggaactctcagagcaaagacactgtgcaagctgacatcacaacttcctgggatgcactcagccaaaccaaggccgctcttcgacacattgagaataagttggaggtagctcccacgtcaaccgcggtttgcgacagcgtaatggatacgaagaaatctagcacttcagccactcgaaaaattagccgcaaagacggcagatacctcgacgattcttgggtgaatgcccctatatctaaatccactaaatctaggaaggagaagagcaggagtcctttgagggctacaactctggagtcaaacgtcaagaaaaataacagggtggagtttcgcgagccattggtgtcatatcgcgagattcatggcgcaccctccaatttctcatccagtcatctggaatctaaacacgtttactgcgttgacgtgaacgaggagaaaacagaaagcggcaattggatgattggctccagggaggagcggaatatacggagctgcgatttcgagtcctctcagtcatctgtgatcaatgatactgtggtgcggtttcttaatgataggcccgctatcgacgccctgcaaaacagcgagtgcttgatacggatgggagccagcatgaggacagaagaggaaatgcccaacagaacaaaaggctccgagaacaatctgaagctgagcgtgaataatatggctcacgacacggatccaaaagccttaaggctgacggattcgagcccatcttccacttcaaccagcaactctcagcgactagacattctgaagcggagacagcacgacgtgaagctggaaaaactgaaagaacgcatccgcaagcagtgggagcattctgaggagaccaatggccgaggccagaagcttggccacattgaccatccagtcatggtcgtgaatgtagacaattctgtgactgctaaggtgcgaaaggtggctacagcacccccagcacccgcatacaaaggattcaatccctcggagaccaagattcggaccccagatggcaaggtgtggcaagaggcagaatttcagaatatgtcacgggaactctacagagacctggcactgcactttgctgatgatatcagtatcaaggaaaagcctgccgaaaagtccaaggaaaagaaagtagtcaaacccgtgcggaaggtgcagaaagttgctcagctgagtagcactgagtgtaggactggtagtagccacctgattagtaccagcagttggcgtgacgggcagaaactcgtcaagaagatccttggccctgctcccagaatggaaccaaaggaacaaagaacagcatcctctgacaggggcggtagggagcggactgcgaaaagcggcggacatatcggcagagcggagtccgaccctaggctagatgttctgcacagacacctgcagcgaaattccgaaagaagtcgttcaaaatcccgctctgagaacaacatcaagaagcttgctagctcacttccagacaacaaacaggaagaaaataccgctcttaacaaggactttttgccaatcgagatccggggtatactggacgatctgcaactagattctaccgcacataccgctaagcaggacactgtcgagttgcagaaccagaagtcttctgctccagtgcacgcccctcgatcacactcacctgtgaagcgtaaacccgacaaaatcaccgccaacgaagatcctcctgtaattagcaagcggagacactatgacaccgatgaggtcaggcaatacattgttcgccagcaagaggagagaaagagaaaacagaatgaagagaagaaggctcaaaaagaggcgaccgagcagaagaataaaaggttgcaagagttatatagaaagcaaaaagaagcattcacaaaggtcaagaatgtcccgccttccgagcccagcgctactcgaaggctgcaggagacgtattctaaactccttctggagaaaactttgcttgaggaaccaagccatcagcatgtgactcaagagacccaggctaagcccggttatcagccaagcggcgaatccgacaaagaaaataaggtacaagaaagaccaccctcggcttcatcaagttccgacatgagccttagcgagcccccacagcccctggcacggaaagatctgatggagtccacttggatgcagccagagaggctttctcctcaggtgcaccacagccagccccagccctttgccggtaccgcgggaagtctcctgtctcacctactgagtctggagcacgttggtatactgcataaagacttcgaaagcattcttcctactcgaaaaaaccacaatatggcctcccgcccattgaccttcacacctcagccttacgtgacttcaccagccgcttatacagatgcgctgctgaagccttctgcatcccagtataaatctaaactggatcgtatcgaggccttgaaagcgacagctgcctccttgtcctctcgaatcgagagcgaggcaaagaagcttgctggcgcatcaatcaactatggctccgcatggaataccgagtacgatgtgcagcaggcaccacaagaggatgggccatggacaaaagccgtgactccccctgtaaaagatgacaacgaagacgtgttcagcgccaggatccagaagatgctgggctcatgcgtttcccacgctacatttgacgatgaccttcccggagtcggtaacctctccgagtttaaaaagctgcccgagatgatccgtccccagtccgcgatttctagcttccgcgtccgaagcccagggccaaagcctgaagggttgctggcgcagctgtgcaagcgtcagaccgactcgtcttcctccgacatgcaggcgtgctctcaagataaagccaagatctctcttggcagttcaatcgattcagtgtctgaaggaccactgctatccgaaggatcactgtcagaagaagaaggagaccaagacggacagcccctcctgaaggtggctgaaattctgaaggaaaaagaattctgccctggcgaacggaattcctacgaacctattaaagagtttcaaaaggaagccgagaaattcctccccctcttcggccatattggcggaacgcagagtaaggggccatgggaggagctggctaagggcagcccccactcagtgattaatattttcacaaaatcctatcagctgtacggaaaaggatttgaggataagcttgaccggggaacctcgacttcgcggccattgaacgctacagccacaccactgagtggagtgagttacgaagatgacttcgtgtcctcgccaggtacaggcacttcgacggaaaagaagagtacactagagccacactccactctgagtcctcaggaggatcactccaacagaaagagtgcatatgatccgtcatcagttgatgtgacttcacaacattcttcaggagcccaatcggccgcaagttctcggtcctccacctcttcaaagggaaagaagggaaaaaaggagaagaccgaatggttagattccttcactggtaacgttcagaactcactgctcgacgaagagaaggccgagaggggcagtcatcaaggaaaaaagtccggaacgtcctccaagctgtcagtgaaggattttgagcagactctcgacacggactccaccctggaggatctgtctggacactcagtgagcgtctccagcgataagggacggtcacaaaagacaccaacatcgcctctttcccccagctcacaaaaatcccttcagtttgacgtggctggaacctcaagtgaaagatcaaagagttctgtcatgcccccaactattaccggctttaaaccgaacgccccattaactgatctgaatcctgcagcatccaggacgaccacagaaaatatggcacctattcccggatcaaaaaggttcagccccgcaggtctgcaccaccggatggcagcggagctgagctacctgaacgcaatcgaagagagtgtgcggcagttaagtgatgtcgagcgcgtccgcggaataagcctcgcacagcaggagtcggtgtccctagcccagattattaaggcgcagcaacaacgccacgagcgggacctggccctccttaaactgaaagcggagcaggaggcgctcgagtcacagcgccaactcgaagaaacacgcaataaggccgctcaggtacatgcagaatctttacagcaggtcgtgcagtcacagagagaggtaactgaagtgctgcaggaggccacctgcaagatcgcagcccaacagagcgagacagccagactaacaactgacgccgcaagacagatctgtgagatggccgaactgacgcgaactcatattagcgacgctgtggtggcatccggagccccacttgccatcctgtacgatcatcagcggcagcatcttccggattttgtgaaacagctccgcactcgcacagaaaccgaccgcaaatctccttctgtgagtctgtcccagagtaaagaaggcaccttggactcaaagcaccagaagtattccgccagctacgacagctattcagagagctctggctacaaaaatcatgaccgcaggagcagtagcggctcatcccgacaagaatctccatccgtgccctcttgcaaagaaaatgagaagaaactcaatggcgagaaaatcgaatcctcaattgacgaacaggtccagacggcagcagacgacagcctgcgatcagactctgtgccatccttgcctgacgagaaggactcaacttccatcgctacagagtacagcctgaaatttgacgaaagtatgacagaagatgagatagaggagcagagttttcggtccctcctgccaagcgaaagtcacagacggttcaatatggaaaagcgacgaggccatcacgacgattcagacgaggaggccagtcccgagaagacaacactatctacggcgaaagaacttaacatgccttttagtggcggtcaagattcattttcaaaatttaccatggaaatggtccggcagtacatgaaagaagaagagatgcgcgctgcacaccagtcaagtcttcttagactacgcgaaaaagccctaaaggagaaaactaaagctgagctcgcttggctggaacaccagaagaaacaccttcgcgacaaaggcgaagatgacaagatgccaccactgaggaagaaacagaggggccttctgctgcgtctgcagcaggagaaggcagaaataaaaagacttcaggaagctaataaagcggctagaaaagaacgccagctgatcctgaaacagcaggaggaaattgagaagattcgccagaccactattaagctgcaggagaaactaaagtcagccggagagtccaagctggactctcactcagacgatgataccaaagataataaagcaacttctcctggacccactgacctggaaaccagatctccctcacctatttccatttctagcagcgagacctccagcatcatgcagaaactcaaaaagatgcgatcccggatggacgaaaaatttctcacgaagcgcgaacagaagctgatgcagcgcagacagcacgctgaggaattgctcgaatggaagaggcggttggatgcggaggaagcagaaattagacagatggagaagcaggctctggctgcttgggacaaggagttaatcaaaccaaagacccccaagaaggagctagaagatcagcgaactgaacagaaagaaatcgcttcagaggaggagtctcccgtgcccctatactcccacctgaacagcgaatcgtctatccccgaggagcttggcagccccgcagttgagtacgttccctccgaatcaatcggacaggaacagccgggatcccctgaccatagcattctaactgaggaaatgatatgcagtcaagaactggagtcctccacaagtccgtcgaagcacagcttgccaaagtcgtgcacctctgtctctaaacaggagtcatccaaaggcagtcaccggactggcggacagtgtcaccttcccatcaagtcacaccaacactgttacagctggagcgacgagtctctaagcatgacacagagcgaaaccacgagtgaccaatccgacattgagggcagaatccgggcacttaaagatgagctgaggaaacgaaaaagcgtcgttaatcagcttaagaaggaacagaagaaacgccagaaggagcggctgaaagcccaggaggcctcgttgataaaacagctcgagagctatgacgaattcatcaaaaagaccgaggcagagctatctcaggatctagaaaccagccccacagctaaaccgcagataaagaccctgtcttccgccagtgaaaagcctaagatcaaaccactaacgcccctccatagatccgagaccgccaaaaactggaagtctctgacggaatcagagcggtcaaggggcagtctcgagtcaattgctgagcatgtcgacgcttcccttagtggaagtgagagaagtgtgagtgagagaagtttgtctgcgtatgccaaaagagtgaacgagtgggacagcagaacagaggatttccagactccttctcctgtgctgcgcagcagtcggaaaatccgcgaggagtctggtgacagtctggaaaacgtgcccgctctgcaccttctgaaagagctgaatgctacatccagaattctcgacatgtcggatgggaaagtgggagaatcgagcaagaaatccgaaatcaaggagattgagtacaccaagcttaagaaatccaagatcgaagatgctttttccaaggaaggaaagtccgatgtgctgctgaaactggtacttgagcagggcgattctagtgaaatcctttctaagaaagacctgccattggacagcgaaaacgttcagaaagacctagtggggctcgccatcgagaacctccataaatctgaggaaatgctgaaagagaggcagagtgatcaggatatgaaccactcccccaatattcagtcaggaaaggacatccatgaacagaagaacacgaaagagaaggacctgagctggagtgaacacctctttgcacccaaagagatcccgtactcagaagactttgaggtcagctcgttcaagaaggagatttccgcggagctatacaaagatgactttgaggtgtccagcctgctatctctgagaaaagactcccagagctgtcgagacaagccccagccgatgcgttcatccactagcggcgctacgagctttgggtccaatgaagagatcagtgagtgtttgtccgaaaaaagtctctctattcattctaatgtccattccgacaggttacttgagctgaagtcaccgaccgagctgatgaagtctaaggaaagatccgacgtggagcacgaacaacaggtcacagaatccccctctcttgctagtgtcccaacggctgatgagttattcgactttcacatcggggatagggtactgatcgggaacgtccaacccggaattctaaggtttaaaggagagacaagcttcgccaagggcttctgggctggggtcgagttagataaaccggaggggaacaataatggcacctacgacggaatcgcttacttcgagtgtaaggaaaagcatgggatttttgccccacctcagaaaatttcccacattccagaaaatttcgatgattatgtggacattaatgaggacgaagactgttactccgatgagcggtatcagtgttacaaccaagaacagaacgatactgagggcccaaaggaccgcgagaaggatgtgtctgagtacttttacgaaaagagccttcctagcgtgaacgacattgaggcttccgtgaaccgctccaggtccttgaagatcgagactgacaacgtgcaggacattagcggggtactggaggcacacgtccaccagcagagttcagtggattcacagataagcagtaaagagaacaaggatctgatttccgatgcgactgagaaagtttctattgcagccgaggatgacaccctggacaataccttcagcgaggaactcgaaaaacagcaacagttcacggaggaagaagacaatctgtacgcagaggcaagcgagaaattgtgtacaccactcttggacttattgactagagaaaagaatcagctagaagctcaactaaaaagttccctgaacgaagagaaaaaatccaaacagcaactggaaaaaatctccctcctcaccgattccttactgaaggtttttgttaaggatacagtgaatcagctccagcaaattaaaaagactagagacgaaaaaatccagctgtccaaccaggaactcctgggcgacgatcagaagaaggttacaccccaggatttgagccagaacgtcgaagagcaatcacccagcatcagcggctgcttcctgagctccgaattagaagacgagaaggaggaaatctcttctccggacatgtgtccacgccctgagtcccctgtatttggtgccagcggccaggaagagctcgccaagaggctggccgaattagagctgtccagggaatttctaagcgctctcggcgacgaccaggattggttcgacgaggacttcgggctgagtagtagccacaaaatccagaaaaataaggctgaggagacgatcgtcccgctgatggctgagcctaaaagagtcacccagcagccctgtgagaccctcctggcagtccctcataccgccgaggaggtggaaatactggtgcataacgcagcagaagagctgtggaaatggaaagagttaggacacgatctgcactcgatttccatcccgacaaaacttcttggctgcgctagcaagggtctggacatcgaatccactagtaagcgagtctacaagcaagccgtgttcgatttaacgaaggagatcttcgaagagatatttgcagaagacccaaaccttaaccagcccgtgtggatgaagccctgtcgcatcaacagcagctatttccgtagggtgaagaatcccaacaacctcgacgagatcaagtcctttatcgcaagcgaggtgttgaagctgttttcgcttaagaaagagccaaaccacaagaccgattggcaaaagatgatgaagtttggacgtaagaagagggatagggtggaccacatcctggtgcaggaactccatgaggaagaggctcaatgggtgaactacgatgaggatgagctttgtgttaaaatgcagctggcggacgggatcttcgaaacgctgatcaaagacacaatcgatgttcttaatcagatcagtgaaaagcaagggaggatgcttctcgtcta

SEQ ID NO: 28696 - DNA, 2946 bp, synthetic construct
  source 1..2946: mol_type = other DNA; note = Synthetic coding sequence
atgtctgagcaggagcggattcaggagtgtcttaggaaggagatcagatccttgctaatttctacaaaagatgggctgtcgccacaggaattagagaaagaataccttcttatggtggggaaccacctgccactgcgcattctgggttacagatcaaccatggagctggtgctggacatgcccgacgtggtgagggtttgccctggtgccggaggaaccgtgatattgaaggcaatacctgacgaaagtactaaagggattgcaagcctcgttgctaagcaacgaagttctcataaacttaggaatagcatgcataagggtcgcccttcaatctacagtggcccaaggagccaccgacgtgtgccttatcggggtcgggtggcccctattctcccagccgtcgtgaagtccgaactgaaggacctattagctcttagcccggtgttgttgagcgactttgaaaaagcctttgccaaacgattcggccgaagttttcagtatatgcagtacggatttctatcaatgtttgaggtgttaaacgcagctagcgacgtaatcagcgttgaacagacccgagcagggtccctgttgatgctgaaaaaatcagttacagaggagaaaccgagaggttgccccgctggcaagatatttacacaaccgttcagaatgaaacagggatcctactctacaggcttccctgtcgctaagccgtgtttttcccaaccgacgtccaacatggaacccccaaagcagatcatgagcatggagaaaacaagtaagctcaacgttgtagaaaccagcagactgaatcacaccgagaagttaaatcagctcgagaacactttcaagagtgtgatcgctcagatcggtccaggtggaacaattagtagcgagttaaaacataagatcaagttcgtagtgagcaaatttcccgaagggttgttcatttccaagctactcggggagtacgaggtgattttcaaggagcaactgtcgccaaagaaactggggtttctcaacgtgacagagttggtcggcgcactcagcgacatcctccatgtcgagtttcgaaagggccaccaggacttactcgtttttgatgccgacaaaaagccactcccgcctgtgcagtccgataaaaagatagaagcaaaagcctgcgtttcttcaccacccagaaattctctgtccaccgcggcagtcaaggaaaccgtgtggaactgtcctagtaaaaaacaaaaggagccccagcaaaagatttgcaaaaagcctaacctagtggtgaagcctctccaactgcaagttgaaacaaacaagagcgagctgaaccttgccatggctaaccatgacattccacccgacgctgtgcccaataaaaagctctgcagactgcctcccttagacactagtagtcttatcggagtgttcgtggagtacattatctcgccctcccagttctatatccgcatatattcacgggacagcagtgagttactagaggatatgatgatcgaaatgaggagatgttactccaatcaactggtgagcgataggtatgtgatgccagaatgcttcatccaaccaggacacctgtgctgtgtgcgcatatctgaggataagtggtggtaccgcgtgatcatacaccgggttcttgagaaacaagaggtcgaggtgttttaccccgatttcggtaatatcgggatcgtccagaaaagcagcctccgctttttgaaatgctgctatacaaagctgcccgcacaagcaatcccatgttccctggcctgggtgcggccagtggaagagcactggacaagtaaggccattttgcaatttcagaagctgtgcggcctaaagcctctggttggggttgtggatgaatacgtggatggtattttaaacatctttctctgcgacacttcatcaaatgaggatgtctatttccaccacgtgttacgaacggaaggacatgccatcgtgtgcagggagaatatttcgtccaagggattttcagagcttaatcccctggccctctacacaacatccagtggcggacctgaggatatcgtactgacggagctggggtaccctagccagcagcattatttcaacgaggacaggaagataagtccacagtctaaagaatcagagctgaggattcttgatgagatccccacggggatgccgtgcctggaatcagtgacaataggagacgacatctgggacgaaaattggctgcctttacaggccaagatgggcaagggaggggatgctgcgtcacacctgtttaccgcatcgctgggtggcaaaaatcagtatagttcatgtaaggagatgccccagaaggactggtgctttagcacccctaaagacacgtgggacgatagctggcagccctccggccttgtgaacgggactaaagtggaggtacacaagcccgaggtgctgggagcccaggaaaaaaatactggtactaataggacacagaagcagctcgacattaatggaagctcagatagtagtacgctgcctaagttagaggagttttgtacgagcttgacccagtcagaacagtcagcggatggctcccagagtgaacccaataactctcaaactcaaccaaagcagattcagctttctacagccgctccgtgctccaccacggctgttgatgattcagctgagaaacctagcggctccgttgaatccagccctgagattttaaaaaatgaggactttagcagttctcgcgctatcactctgtataaagataagcggcaggagtctgtggatcagctctccctgattctgagctatgaatgccagatctctcagaaactgtatattcccaggtccaccgccaccgctgctcttggcgcagccgctagactggccacctcccgatctctgttgcattggtatccgagcgtcaaacggatggaggcttag

SEQ ID NO: 28697 - DNA, 648 bp, synthetic construct
  source 1..648: mol_type = other DNA; note = Synthetic coding sequence
atgtccgcaaagcgggctgaactgaagaagacccatctggttaaggagagacactgctggaccagcaaaaattacaaagctgtctgcctggagctgaagccggaaccaacaaagacgtttgactacaaagccgtgaaacaggagggccgtttcaccaaagctggggtgactcaagacctgaagaacgaacttcgggaggtcagagaggaactaaaggagaagatggaggaaatcaaacagataaaggatttgatggataaggattttgataaactacatgagtttgtggagattatgaaggagatgcagaaagacatggatgaaaaaatggatatcctgatcaatactcagaagaactacaaactccccctccggagagctcccaaagagcagcaggaactacgcctgatggggaaaacccaccgggaaccacagctacggcctaaaaagatggatggggcttctggagtcaatggagctccgtgtgccttacacaaaaaaacaatggctccccaaaagactaagcaaggctcactggaccctctgcaccactgcgggacctgctgcgagaagtgcctgttgtgcgctcttaaaaacaactacaacaggggcatttacgccgcagtcgggctgctcgacctgtggtag

SEQ ID NO: 28698 - DNA, 606 bp, synthetic construct
  source 1..606: mol_type = other DNA; note = Synthetic coding sequence
atgtcagcgaagagagcagagctaaagaaaacccatttatctaagaattacaaggccgtgtgcttggaactaaaaccagaaccgacgaagacgttcgactataaggccgtcaagcaggagggcagattcaccaaggctggtgtcactcaggatctaaaaaacgaattgcgcgaagtgcgggaggagctgaaggagaaaatggaggagatcaagcagattaaggacctgatggacaaggacttcgacaagctgcatgagttcgttgaaattatgaaagagatgcagaaagatatggacgagaagatggacatactgatcaatacccaaaagaactataagcttccattaagaagggcccctaaggaacaacaggaacttcgactcatggggaaaacccaccgggaaccacagctacggcctaagaagatggacggggctagcggggtcaatggtgccccttgtgccctgcataagaagaccatggcaccacagaagaccaagcagggctctctcgaccctcttcatcactgcggtacgtgctgcgtgagtgagaccctgccagaaccttctacaggcgctagacctctcgcaccggctccttggtag

SEQ ID NO: 28699 - DNA, 300 bp, synthetic construct
  source 1..300: mol_type = other DNA; note = Synthetic coding sequence
atgagtgcaaaaagagccgagctgaagaagactcacttgagtaagaattacaaggcagtttgcttagaactgaaacctgaacctaccaaagtacggagcccattcgaggcgatgcaagctgccagacctgaaatacacggcgaggtgactcgaagtcagggtagctttgccgaccccagcggccaggacttgagccaaactttcgattataaagccgtgaagcaggagggcaggttcactaaggctggtcggaccccacgcctgctcgaagaactgagcctgcttctgttgccactgtag

SEQ ID NO: 28700 - DNA, 639 bp, synthetic construct
  source 1..639: mol_type = other DNA; note = Synthetic coding sequence
atgtccgccaaacgggctgagctaaaaaagacacacctatccaagaactacaaagccgtgtgcctcgaattgaagccagaacccacaaaaacatttgattacaaagccgtcaaacaggaaggtaggtttacgaaggctggagtcacccaggatctgaagaatgagctgcgggaggtccgtgaagaactcaaagaaaagatggaagagattaaacaaattaaggatttgatggacaaggactttgataaactccatgagttcgtcgagatcatgaaggaaatgcagaaggacatggacgaaaagatggacatcctgatcaatacgcagaagaactacaaactccctcttcggagggcgcctaaagagcagcaggaactccgcctgatgggcaagacccaccgcgagccgcagttgcggccaaaaaaaatggacggggcttcaggggttaatggagccccttgcgccctgcataagaagactatggcaccacagaaaactaaacaggggagtctggatcccctacaccactgtggtacgtgttgtgaaaaatgtctcctgtgtgcacttaaaaacaactataacagggcgcagctccagaacctaccagcggtgcccattcatcacctacaggcaccatag

SEQ ID NO: 28701 - DNA, 402 bp, synthetic construct
  source 1..402: mol_type = other DNA; note = Synthetic coding sequence
tgatacgaattacgtgaggaacatctcgataagatttttaaacaccgcgaactccagcaaaagttggtggatgctaagctcgagcaagcccaagaaatgatgaaagaagcagaagagcgtcacaagcgggagaaggagtatctgctgaatcaagccgctgaatggaaactgcaagcaaaggtgctgaaggaacaggagacagtgctgcaagcgcaggtcagaccgggtgggagggggatgggcgtgctgtcttctctcagccccgataagaaggccggagccaaaggcggtcaacagaagtcttcctacgtcgccggtgacggagggatggggatagggaatgaagaacagcttcacatctatagctacttccaggtcaagatcaaggcccagtattactag

SEQ ID NO: 28702 - DNA, 687 bp, synthetic construct
  source 1..687: mol_type = other DNA; note = Synthetic coding sequence
atggcaagtgaggaattgcagaaagatctcgaagaagttaaggtgctcctggagaaggctacccggaaacgagtgcgggatgccttgacagcggagaaaagtaagatcgaaaccgaaatcaagaacaagatgcagcagaaatcccagaagaaggcagagctgctcgacaacgaaaaacctgcagctgtggtggccccaattaccactggctacacagttaagatttctaactatggctgggaccagagtgataaattcgttaaaatatacatcaccctgacaggcgttcaccaggttccgactgagaatgttcaggtgcatttcactgagaggtcctttgatttgctggtgaaaaacctgaatggtaagtcctactccatgatcgttaataacctgctgaaaccaatctcagtggaaggttcgagcaagaaggtgaaaactgacactgtgctgatactttgtcgcaaaaaagtggaaaacactcggtgggactatctgactcaggtggaaaaagagtgtaaggagaaggagaagccttcttatgataccgaaacagatccttcagagggtctgatgaatgtgctgaaaaagatctatgaggatggtgatgatgatatgaagagaaccatcaataaagcctgggtagaatcaagagagaagcaggccaagggcgacactgagttctag

SEQ ID NO: 28703 - DNA, 558 bp, synthetic construct
  source 1..558: mol_type = other DNA; note = Synthetic coding sequence
atgcagcagaagtcgcagaagaaagccgagctgctcgacaacgaaaagcctgctgccgtggttgctccaattacaacgggctacactgtaaagatcagcaactacgggtgggatcagtccgacaaatttgtcaagatctacattaccctaaccggggtgcatcaggttcccactgaaaacgtgcaggtccatttcaccgaacggagtttcgatttactcgttaaaaacttaaacggaaaatcatattccatgatcgtgaacaatcttctgaaaccaatctcagtggagggaagctccaagaaggtgaagaccgataccgtgctgatcctgtgcagaaaaaaggtggagaacaccaggtgggattatctgacccaggtcgaaaaggagtgtaaagaaaaagagaagccctcatatgacacggaaacagatccttctgaggggctgatgaacgtgcttaagaaaatttatgaggacggagatgacgatatgaaacgcacgattaataaggcttgggtggaatctcgggaaaaacaggcaaagggtgatacagagttttag

SEQ ID NO: 28704 - DNA, 1134 bp, synthetic construct
  source 1..1134: mol_type = other DNA; note = Synthetic coding sequence
atggaacagctacccgatttgcatagccactttagcgacctcaacctggaggctcacatgtatgcctcacagtggttcctgactctgttcacagctaagtttccactctgcatggtgttccatatcatcgatctcctgttgtgtgaagggctcaacatcatttttcacgttgcccttgctctgttgaaaacgtcaaaggaagatctcctccaggccgacttcgaaggtgccttgaaattctttagggtgcagctaccgaagcggtatcgagccgaggagaatgcacggaggcttatggagcaggcttgcaatattaaggtgcctactaagaaactgaaaaagtacgagaaggaataccagactatgcgggagtcgcaacttcagcaagaggatcccatggacaggtataaacgcgagaaccgccgtcttcaagaggcttctatgcgtctggagcaggaaaacgatgatcttgcacacgagctggtgacatctaagattgccttacggaatgacttggatcaggccgaggacaaagcagatgtgctcaataaagagttgctgctgactaagcagaggctggtggaaaccgaggaggaaaaaagaaagcaggaggaggaaactgctcaactaaaggaggtcttccggaagcagctcgagaaagctgagtatgagataaagaagaccaccgctattattgcagagtataagcagatctgttcccagttgtcaacacgtcttgagaaacaacaggcagcctccaaggaggagctggaagttgtcaaagggaagatgatggcctgcaagcattgttctgatattttcagcaaggagggggcactgaaactggcagctacggggagagaagatcagggcattgagacagatgacgagaaagactccctgaaaaagcagctgagagagatggagctggagctggctcagaccaagttgcagttggtagaggccaaatgtaaaattcaggagctcgagcaccagaggggagctcttatgaatgagatccaagccgctaaaaattcctggtttagcaagaccctaaattctatcaagactgctactggtacccagcccctgcagccagcaccagtgactcagccccctaaggaatccacatag

SEQ ID NO: 28705 - DNA, 762 bp, synthetic construct
  source 1..762: mol_type = other DNA; note = Synthetic coding sequence
atgatcgagaactcttcgtggagtatgacctttgaagagcgtgagaaccgccgtctccaagaagccagcatgcggctggagcaggagaacgatgatctggcacacgagctggtgacatctaagatcgcactgagaaatgatctggatcaggcagaagataaagcagatgttttaaacaaagagctccttctcactaagcagagactggttgagaccgaggaggaaaagagaaagcaagaggaagagacggcacaactcaaggaggtcttccggaaacagctggaaaaggcagagtacgaaattaaaaaaactactgcaatcatagctgagtacaagcagatctgttcacagctttcaacccggttggagaaacagcaggcggcttccaaagaggaactggaggttgtgaagggaaagatgatggcatgtaagcactgcagcgacatcttctccaaggagggagcccttaagcttgccgcaaccgggagggaggatcagggcatcgagaccgatgacgagaaggactctctgaagaagcagctccgggagatggaactggagctggctcaaacgaagctccaactcgtggaggcgaagtgcaagattcaggagctggagcatcagaggggcgctctaatgaatgaaatccaagccgcaaagaatagctggttctccaaaaccttgaatagtatcaaaacagctaccggcacccagcctctacagccggctcctgtaacccagccacccaaggaaagcacctag

SEQ ID NO: 28706 - DNA, 759 bp, synthetic construct
  source 1..759: mol_type = other DNA; note = Synthetic coding sequence
atgggcaagtcttatgatggtcgggcatatgtgatcactgggatgtggaatccaaacgctcctgtgttcttggctttgaacgaggagactcccaaggataaacaggtatatatgacagtagcggtggatatggtggtcaccgaggtagtggaacctgttcgctttctcttggaaaccgttgtgcgcgtgtatcccgcaaatgagcgcttctggtatttcagcaggaagacattcactgagaccttctttatgcgcctcaaacagtcagagggaaagggtcacacgaatgctggcgatgctatctacgaggtagtcagcttacagagagaatccgataaggaagagccagttacgccgaccagtggcggagggcctatgtctcctcaggatgacgaggctgaagaggaatctgataacgagctgtcaagcggaactggagatgtgtccaaagactgtcccgaaaaaatcctgtatagctggggagagttgctgggaaaatggcacagtaacctaggcgctcgccctaaaggactctcaactctcgtgaaatcaggcgtacctgaggcactcagggcagaagtttggcaactgctcgccggatgtcacgacaaccaggccatgctggatcggtaccgtatacttattacaaaggtttgttggtccttactggaggtgcacagtcgaccatgtctgcccggatatcaccaatggaagctgcagaattcaaaatattgtaggatggccaatgttgctgcctag

SEQ ID NO: 28707 - DNA, 2484 bp, synthetic construct
  source 1..2484: mol_type = other DNA; note = Synthetic coding sequence
atggaagttcgtgcatctctccaaaaagtgagtgggtcgagcgattcggttgcaaccatgaattcagaagaatttgtgctcgtcccccagtatgccgatgataattcaaccaagcacgaggagaaaccccagctgaaaatcgtcagcaacggtgatgagcagctcgaaaaggccatggaagaaatcctccgggactctgagaagcggccatcctccctgttggtcgattgtcaatcttcaagtgagataagcgaccattcatttggcgacattcctgctagccaaacaaacaagccgtcacttcaactaatccttgatccgagcaatacagagatctcaacccctcgcccttcatcccctgggggactcccagaggaggattctgtgctctttaacaagttgacttacttgggctgtatgaaggttagctctccaagaaacgaagtggaggccttgagggccatggcaaccatgaaatcctcctcacagtacccattcccggtgactctgtatgtgcccaacgtgccagaaggctcagtgcgtattatcgatcagtccagtaatgtggagatcgcttccttccctatttacaaagtcttattctgcgcccgaggccatgacgggacaacggaatctaactgcttcgccttcacagagtcatcccatggatcagaagagttccagatccacgtgttttcctgcgaaatcaaagaggccgtctcgcgaattctctattctttctgcactgcctttaagaggagttcaaggcaggtgtccgacgtgaaggattccgtgatcccaactcccgatagtgatgtgttcactttttctgtgtccctggaagtcaaagaggatgacggaaaggggaacttccggttgttagtgatacctatcccatttgaatatttctcccctgtgcccaaggaccgagacaagttctacttcaaactgaaacagggaatcgaaaagaaggtggtgattacagtgcagcaactatccaacaaagaacttgccatcgaacgctgttttgggatgctcctgagtccaggtagaaatgtcaaaaattctgatatgcatcttttggatatggaaagcatgggcaagtcgtatgacggcagagcctacgtgattacgggaatgtggaaccccaatgcaccggtgtttttagcgttgaacgaggagacccctaaggacaaacaagtgtacatgactgtggcagtagacatggtggtgaccgaagtagtggagcctgtaagattcctcctggagactgtggttcgggtatatcctgcaaacgagcgcttctggtacttctctagaaaaacctttacagaaacattctttatgagacttaagcaatccgagggtaaaggtcacaccaacgccggtgatgccatatatgaagtcgtaagcctacagagggagagcgataaggaagaaccagtgactcccaccagcggcggagggcctatgtcaccccaggatgacgaggccgaagaagaaagcgataatgaactgagtagcggaacgggcgatgtgagtaaagattgccccgagaagattctctattcttggggagagctgcttgggaagtggcactccaacctgggcgcacggccaaaaggcttgagtacactggtgaaaagtggggtgcccgaggctctgagggcagaagtgtggcagctcctggcgggatgtcatgacaaccaagctatgctagaccgctatcgtattctcattactaaagattccgcccaggaaagtgtgatcacccgagatatccatcgaacattcccagcccatgactactttaaggacactgggggagatggacaggagagtctgtacaagatttgtaaagcgtatagtgtttacgatgaagacatcggctactgccagggccagtccttcctggctgctgtgctgctcttacacatgcccgaagagcaggccttttgtgttctcgtgaagattatgtacgattacggcttgcgcgatctgtaccggaacaacttcgaggacctacactgcaaattctatcagctcgagagactgatgcaggagcagctccccgacttacacagtcactttagcgatttaaatctcgaggcccatatgtacgcttcccagtggtttctcaccctcttcacagctaaatttccgctgtgcatggtgtttcacatcatagacctcctgctctgcgaaggcttaaacattatctttcacgtcgccctggcgttactgaagacgtctaaggaagatctgttacaggccgatttcgagggcgcattgaagttctttcgggtgcagcttcccaaaaggtaccgggcagaagaaaatgccaggaggctcatggagcaggcctgcaacatcaaggtgcccactaagaaactcaagaagtatgagaaggagtaccagaccatgcgagagtcacagctgcagcaggaagatccaatggaccggtataaattcttctttctatag

SEQ ID NO: 28708 - DNA, 2580 bp, synthetic construct
  source 1..2580: mol_type = other DNA; note = Synthetic coding sequence
atgggtaacagggaaatggaggagttgattccgctcgtgaatcgccttcaggacgcattctctgccctcggccagtcatgcttgctggaacttccacagatcgctgtggttggcggtcagtccgcgggaaaatccagcgtcctagaaaatttcgtaggcagggacttcctccccaggggatccggaatagtcactaggagacccctggtcctgcagctcgtgacgtccaaagccgagtacgcagagttcttacattgcaaaggaaaaaagttcaccgacttcgacgaagtccggttggaaattgaggccgaaacagaccgcgtgactggtatgaacaagggaattagcagcattccgataaaccttagagtatacagcccccacgtcctcaatctcaccctgatcgatctccccggaatcacaaaagttcccgtcggggaccagcctcccgacattgagtatcaaatacgggaaatgatcatgcagtttatcacaagggagaattgtctcatactcgctgtgacccccgcaaacacggatctggctaacagtgacgcacttaagctggccaaagaagtcgatccacagggtcttaggacaataggggttatcactaagctggacttgatggatgaaggtaccgatgctagggacgttctggagaataagttgctgccacttagacgaggatatgttggggtggtgaacagaagccagaaggacattgatggcaagaaggacataaaagctgccatgcttgccgagcggaagtttttcctgtcccatccagcatatcgccatattgcagaccgcatgggtaccccacacctgcagaaggtgcttaaccagcagctaacgaaccacattagagacactctccctaacttccgtaacaagctgcagggacagctcctttctatagagcacgaagtcgaagcatataaaaacttcaagcctgaggatcccacccgcaagacgaaagccctgctccagatggttcagcagttcgccgttgattttgagaagcgaatcgagggatctggagaccaggtggatacccttgaactgtcaggcggtgccaagatcaaccgtatctttcacgagcggttcccatttgaaatcgtcaagatggaattcaacgaaaaggagctgaggcgggaaatctcttacgccatcaaaaatatccacggaatacgcaccggccttttcacacctgacatggccttcgaggctatcgtgaaaaagcagattgtgaagcttaaaggaccatcgctgaagtccgtagatctggtgatacaagaacttattaatactgtgaagaagtgcacaaagaaattagcaaactttcccaggctgtgcgaggaaacggagaggatcgtggccaaccatataagagagagagagggaaagaccaaggaccaggttctgctcctaattgatatccaggtgagctacatcaacaccaatcacgaagatttcatcggcttcgccaatgctcagcagcgttctagccaggtgcacaaaaagacaaccgtgggaaatcaagttattaggaagggatggttgactatctccaatatcggaatcatgaagggtgggtccaaggggtattggttcgttctgaccgctgagtctctgagttggtacaaggatgacgaagaaaaagaaaagaagtacatgcttcctctagacaatctcaaagtgagagatgtagaaaagtcattcatgtcttcaaaacacatcttcgcactcttcaataccgaacagcgcaacgtctacaaagattatcggtttcttgaacttgcgtgtgattcgcaggaggacgtggacagctggaaggcatccctcctgcgggctggcgtgtaccccgataagtcagtcgcagaaaatgacgaaaacgggcaagcggaaaactttagcatggaccctcagttagagaggcaggtggaaactatccggaatttggtggactcctacatgtctattatcaacaaatgcattcgagacctcatacctaaaactattatgcaccttatgatcaataacgtgaaggacttcatcaacagcgagcttctggctcagctctactcaagcgaggaccagaatactctgatggaggagtccgcagagcaggcgcagcgaagggatgagatgctgcggatgtatcaggccttgaaagaggctctgggcatcatcggcgatatttcaaccgccactgtaagcacacctgcacccccaccagtcgatgatagctggattcaacactccagacgatcaccacctccttcacccaccacccagcgcagacctacgttgtccgcacccctggctagacctacttcagggaggggcccagcgcctgccatacccagtccagggccacatagcggagcccctccagtgcccttccgacctggccctctgcctcccttcccctcttcttctgattccttcggagcgccaccacaagtgccctcgaggcctactcgagcgccaccctcggtcccttcacgccgaccacccccaagccccaccaggcccactatcataaggccgcttgaatcttccctgctcgattag

SEQ ID NO: 28709 - DNA, 1761 bp, synthetic construct
  source 1..1761: mol_type = other DNA; note = Synthetic coding sequence
tccgagtctttaagttccgccgtctttgttgagggccttaagaggcagggaggatgtgctagacttgaggaggcctgcctatccgaggcaggggaggacctgaccggcgtgcggttcagcctgcccggaaagaacttcccctgtgggtcctcttctagctctagcagatcacggaacagctcttcctctaattccagttcatcctctagtacaaccactacaaccacctcttccagtggagcccaagaccgtatgccagtcctggaaaggtattttcaccctgctgagctgggccgtcggtggactgggccagagggtgtgttgccatcgagtcccggatctcggccaggatgtcagcagggccctctcccctgggatcttccggagatgattcgcatggtaaagctggtatggaaatcaaaatccgaactgcaggcaacgaagcagagaggaatcttagacaacgaggacgcactaagatcttttcccggtgacattaggctaagagggcagacaggtgtacgggctgagaggagagggtcttacccgttcattgattttcgcctcttgaacagtactacatacagcggagaaattggcactaagaagaaggtgaagcggctgctgagtttccagaggtactttcacgcatctcggctcctgcggggtattatcccacaggcacccctccatttactcgatgaagattacctgggccaagcaaggcacatgctttccaaggtaggaatgtgggacttcgacatcttcctgtttgatagacttacaaatggaaactccttagttaccctactgtgccatctgttcaacacgcacggcctaatccaccatttcaagttggatatggtgacactccataggttcctggttatggttcaggaggactaccacagtcagaacccataccacaatgctgtccacgctgctgacgtgacccaggcaatgcactgctatttgaaagaacctaaattggcctcattcctaacccctcttgacatcatgctgggcctcctcgctgccgctgcacacgacgtcgaccatccaggtgtgaatcagcctttcctgataaaaactaatcatcatttggccaatctgtatcagaacatgtccgtgctggagaatcaccactggcgaagtaccattggcatgttgcgggaatcaagattattggcccatcttcccaaagagatgacgcaggacatcgaacagcagcttggaagtctgatactggctaccgacatcaaccgccagaacgaattcctgacccggctgaaggcacacttgcataataaagacttacgactggaggatgcacaggaccgccactttatgctacagattgcgctgaagtgcgcagatatatgcaacccttgcaggatttgggagatgtccaaacagtggtcagaaagggtatgcgaagagttctacagacagggagagctggagcagaagttcgaattagaaatttcgcctctgtgcaatcagcagaaggactccatcccaagtattcagattggcttcatgagttatattgtggaacctctcttcagagagtgggcacacttcactgggaatagcaccctgagtgaaaatatgctggggcatctcgcacataataaggctcagtggaagagcttactcccaagacaacacagaagcaggggctcttccgggtccggaccagaccacgatcacgccggacagggcaccgagtctgaagagcaagaaggggattccccatag

SEQ ID NO: 28710 - DNA, 525 bp, synthetic construct
  source 1..525: mol_type = other DNA; note = Synthetic coding sequence
atgactacaaaaaatctggaaactaaagtcaccgtcactagctctcccattcgcggagcaggggacggtatggagacagaggagccaccgaagtctgtcgaggtgactagcggagtgcagtcccgcaagcatcactccctgcagagtccctggaagaaagccgtccccagtgagagtcctggcgtcttacagctggggaagatgttgacagagaaggccatggaggttaaggcagtgcgaattttggtaccaaaggctgctataacccatgacattcccaataagaacacgaaagttaaatctctaggtcaccataagggagaattcctcgggcagtcagaaggagtcattgagccaaacaaggaactctccgaagtgaaaaatgtactcgaaaagcttaagaattccgagaggagactgctccaggataaggaaggactctccaaccaactaagagtccagactgaggtgagacgcgctctcattgataaaatgagcaccaccctctatgtctggactttctag

SEQ ID NO: 28711 - DNA, 1203 bp, synthetic construct
  source 1..1203: mol_type = other DNA; note = Synthetic coding sequence
atgacaacgaagaacctggagaccaaagtgaccgtcacttcctcgcccattcggggtgctggcgatggcatggagaccgaagagccaccgaagtccgttgaggtgacaagcggcgtccagagtcgtaagcaccacagcctacagagtccctggaagaaggctgtgccatccgagagcccgggtgtgctgcagctcggaaaaatgcttaccgaaaaggctatggaagtaaaagctgtgcggatcctggtaccaaaagccgctattacccacgacattcccaacaagaacactaaagtaaaaagtctcggccatcataaaggggaatttttggggcagtctgagggagtgatagagcctaataaggagctgtcagaggttaagaatgtgctcgagaaactgaaaaatagtgaaaggaggctgctccaggataaggagggcctgtcaaatcagctacgtgtccagaccgaggtcaaccgagaattgaaaaaactcctcgtggccagtgtaggagatgatctccagtaccacttcgaaagacttgctagggaaaaaaaccagttgatcttggagaacgaagccctggggcgaaacaccgcacagctgagcgaacagttggagcgcatgagtatccaatgcgacgtctggcggagcaagtttcttgcttctcgagtcatggccgatgagctgacgaattcaagggctgctctccagcgccaaaaccgggacgctcatggcgctattcaagatctgttgtctgagagagaacaattccgacaggagatgatcgcgactcaaaagctactggaagaactgctggtttccctgcagtgggggcgtgagcagacatattctccttccgtccagccacattccaccgcggagctcgccctgacaaaccacaagttggccaaagctgttaactcccatctcctcggtaacgtgggaattaacaaccagaagaagatcccttctaccgtggaattctgttccactcccgcagaaaaaatggcggaaaccgtcctcaggatcttggaccccgtgacctgtaaagagagctcacctgacaaccctttcttcgagagcagccccactaccttgctggctaccaagaaaaacataggcagatttcacccctatacaaggtacgaaaacatcacatttaattgctgtaatcactgtagaggagaactgattgcactatag

SEQ ID NO: 28712 - DNA, 276 bp, synthetic construct
  source 1..276: mol_type = other DNA; note = Synthetic coding sequence
atggatgccgacagtgatgtggcgttagatatactgattaccaatgtcgtttgtgtgttccgcactcgatgccacctcaaccttaggaagatcgccttggaaggcgctaacgtaatttacaagcgggatgttgggaaagtgctgatgaagttgcgcaaaccaagaatcaccgccactatatggtcttcaggcaagataatttgtaccggtgccacctctgaggaagaggctaaattcggagctaggaggctggcgaggtccctccaaaagctttag

SEQ ID NO: 28713 - DNA, 492 bp, synthetic construct
  source 1..492: mol_type = other DNA; note = Synthetic coding sequence
atggatgcagatagtgatgtagctctggacatcctgataacaaatgtggtgtgcgtatttaggacacggtgccatctgaatctgcgtaaaatagcgctcgagggcgcaaatgtgatttataaaagagacgtgggtaaggttctcatgaagcttcgcaaacctaggattacggcaactatttggagcagcggaaagattatttgtacaggggctaccagcgaggaggaggcaaaattcggggcacgcagattggctcggtctctgcagaaactcggattccaggtaatttttaccgattttaaagtggttaacgtactcgccgtgtgtaacatgccttttgaaatcaggctacctgagtttacgaaaaataataggccacacgcctcctacgagcccgaattgcatcccgcagtgtgctaccggatcaaaagcctgagagccacactgcagatcttttccaccggctctatcactgttacaggaattctctag

SEQ ID NO: 28714 - DNA, 1023 bp, synthetic construct
  source 1..1023: mol_type = other DNA; note = Synthetic coding sequence
atgcttgaagctccaggccctagtgatggatgtgagttgagcaaccctagcgcttctcgcgtatcgtgcgctggacagatgctggaagtccagcccggtctgtacttcggtggggcagccgctgtcgcagagcctgaccatctgagagaggctggcattacagccgtcctgaccgttgactccgaggagccatccttcaaggctgggcctggcgtcgaagacctctggcgtctgtttgtccccgctttggacaaacccgaaacagatctgctgagccacctcgatcggtgcgtggcctttataggccaagcgagagccgaggggagggctgtattggtgcattgccacgctggtgtcagcagaagcgtcgctattatcacagcttttcttatgaagactgatcagttgccattcgaaaaagcctacgaaaaactgcagatcttaaagccagaggccaagatgaatgagggattcgaatggcagctaaagctttatcaggcgatgggctatgaggtagacacaagcagcgcaatctataaacagtataggctgcagaaggtcacagaaaagtatccagaactccagaaccttccccaggagctcttcgctgtggacccgactacggtcagccaaggcctaaaggacgaagtactttacaagtgtagaaagtgcagacgctcactattcagatcctccagcatcctcgaccacagggaggggtcaggccctatcgcatttgcacacaagcgcatgactccctcaagtatgttgacaacaggaagacaggcccagtgcacgtcatatttcatcgagccagtgcagtggatggaaagtgcccttttaggtgtcatggatggtcaactgctttgcccaaagtgctcggcaaaactcggcagctttaattggtacggagaacagtgcagttgcggtcgctggataacaccggctttccagatccacaagaaccgggtggacgaaatgaagattttaccagttttgggctctcagacagggaaaatctag

SEQ ID NO: 28715 - DNA, 807 bp, synthetic construct
  source 1..807: mol_type = other DNA; note = Synthetic coding sequence
atgtggcccctgactgccttgctcttgctggctaccctggaaaagccaatcctaagccttcatcccccatggaccactatcttcaagggcgagcgcgtcaccctgaagtgtgatggataccacccattgctgctcgaactccagcccatcagtaccctttggtacctggggcatttgctcctgcccagccacaagaaatccattgaagtgcagacacccggtgtttaccgctgtcaaaccaggggagcgcctgtgtccgacccgatacatctgtccgtgagcaacgattggctcattctgcaggtcccgtacgccccagtgttcgagggtgagcccttggtgcttcggtgtcggggttggtatgataaggtcgtctacaagctgcattactaccacgacggccaggcagtgcggtacttccactcatcggccaactatactgttctgcaggccagggcgagtgacagcggtaggtaccagtgttccggcacaatgcggattcccgtggaatccgcaccgatgtttagcgccaaagtggccgtcaccgttcaggaggccaggcacgctgcagcagtccgcgttctgcaggtccaaccccgaggtgcacctctgaggctgggacgtagggtgcatagtcccggtgcgagaggacgcggagccaggattgtgctggtgcggggtggctacaggcacccgcagtgtcctgaaacgcaaagtgtggctgctgctcccggagcaggtttctcccccggacccggtttacatcaccggccatcctccatggggcgatctctagggtcctggtag

SEQ ID NO: 28716 - DNA, 936 bp, synthetic construct
  source 1..936: mol_type = other DNA; note = Synthetic coding sequence
atgtggcctctgaccgctcttctcttactggctaccctggagaagccgatactgtcacttcatccgccttggactactatctttaagggcgagagagttaccttgaagtgtgacggataccatcctctgctattggaattgcagccaatttccactttatggtaccttggccacctgcttcttccttctcacaaaaaatccatagaggtacagactcccggagtctaccgctgccagacaagaggcgcaccagtgagtgacccaatacacctgagtgtatctaacgactggttaattctgcaggttccctatgccccagtgttcgagggcgaaccactggttctgcggtgtagggggtggtatgacaaagtggtttacaagttacattattaccatgacggccaagccgtgagatattttcattcttctgctaactacaccgtgttacaggccagggccagcgactccggtcgataccagtgcagtggaactatgaggattccagtcgagtctgccccaatgttctcagccaaggtggccgtcaccgttcaggcagcaagatgcgccgcatcaaccggggctcctagtacacagtctcgaagtcccaggagccggtccagtaacaggacgggggctcgcagactgccccctcctgccgtgagcggaaacgccgtcaggggctgcagtagccgtggccgtgttttaccttggacaaggccgcctccacctccgcagcttcacggtccccagccctggttactggtgatcgggcgattcccgtctgagagccccaggtgtcctgataggtctcggtggagccctccttctggaactccacctcctccgggttgtagctctagacgggcagcccctcgccttaggggtcatccccctgcacttagaagaaggccgtggaacaaccgcttagagccctag

SEQ ID NO: 28717 - DNA, 957 bp, synthetic construct
  source 1..957: mol_type = other DNA; note = Synthetic coding sequence
atgtggccgctgacagctctgctcctattggtcccatcatccggacaggccgcaacactcgagaaacctattctgtccctgcacccaccctggaccaccatcttcaagggcgaacgggttacactgaaatgcgacggataccaccctctccttctggaactccagccgatttctaccctgtggtatctcgggcacctacttctgccgtcacacaagaagtccatcgaggtgcaaacacctggtgtatacaggtgccagacccggggagctcccgtcagtgacccaattcaccttagtgtatcaaacgattggctaatccttcaggtgccttatgcccctgtctttgaaggcgaacctctcgtgctccgttgcagaggctggtatgacaaggttgtatacaagctccactattaccacgatggacaggctgttcgttactttcattctagcgcaaattacaccgtcctccaggcccgagcctcagatagcggtcggtaccagtgttcaggaacaatgaggatcccagtggagtctgctccgatgttctctgccaaagtcgccgtcactgtgcaagctgcccgatgtgcagcctcaacaggggcaccgtcgactcagtctcgatccccacgcagccgtagcagcaaccgcaccggagccagaaggttacctccaccagctgtaagtggaaatgccgtgcgcggatgctcatccaggggaagagtgctgccctggactcgtcccccacctccaccccagctgcacggcccacagccttggcttctcgtgatcgggagattccctagtgaatctccacggtgcccagatcgttcacggtggtctcctccatccggaacgccccctcctccaggctgctcaagtcggagagcggcaccaaggctccgcggacatccacctgccctaaggagacgaccctggaacaacaggctggaaccatag

SEQ ID NO: 28718 - DNA, 1281 bp, synthetic construct
  source 1..1281: mol_type = other DNA; note = Synthetic coding sequence
atgtggccattgaccgccttgttacttctagtgcctagtagtgggcaggccgcaacactagaaaagccaatactgtcacttcatccgccatggacgactatcttcaagggggagcgtgtgacactcaagtgcgatggctaccatcctctgctgctggagctgcagccaatttctacactctggtacctggggcatctgcttctgccaagccacaagaagtcaattgaggtacaaacacctggcgtgtataggtgtcagacaaggggcgctccagtaagtgaccccattcatctgtccgtcagtaacgattggctcatcttacaggtaccttatgcccctgtatttgaaggagagcctctcgttttgcggtgtcgcggttggtacgacaaggtggtgtacaagctgcactactaccatgacggccaagccgtgcgctattttcacagcagtgcaaactatactgtgctccaggcacgtgcctctgactctgggcgttatcaatgttctggcactatgagaattcccgtggagagtgcccctatgtttagcgcgaaggtggccgttacagtgcaggaactgttcagggcccctgtgcttcgtgtgatgggcccaagagaggccagaggcgctgccttgggaggcgtagtcttaagatgcgataccaggctgcacccccagaagagagacacacccttacagtttgccttctataaatactctcgtgctgtgagacggttcgactggggagctgagtatacggtcccagaacccgaagtcgaagaattggagtcctactggtgtgaggccgcaaccgcaacccgttccgtaaggaagcggtcaccatggctgcagttacctgggccaggtagcccactggacccggcttcaacaacagcccctgccccatgggcagccgctctcgccccaggcaatagacctttatcattccggaaaccaccggtgtcccgctccgtccccttagttacttcggttagaaacaccacgtcaacagggctccagtttcccgcttccggtgcgcctaccgctggtcccccagcctgtgcccctcctacacctctcgagcaatccgccggagctctcaaacccgatgtcgatttgctgcttcgagagatgcagctgttaaaagggcttctgtcccgcgtagtcctggagctcaaagaaccccaggccctgcgggagctgcgtggaacacctgaaacgcccacttctcacttcgcggtgtctccgggaacccccgagacgaccccagtcgaaagttag

SEQ ID NO: 28719 - DNA, 369 bp, synthetic construct
  source 1..369: mol_type = other DNA; note = Synthetic coding sequence
atggccggaggctgtagagcaccctctagcgctcccactgtaagtctgcctgagctacggtcactactggcctccggcagggccaggctctttgatgtcaggtccagggaagaggcagcagcgggtaccatccccggagctttgaacattcctgtctcggagcttgagtctgccctgcagatggagcctgcagcattccaggcactgtacagcgccgagaagcctaagctggaggacgagcatctggtgttcttttgccagatgggaaagaggggactccaggccactcaactcgccagatctctgggctacaccggcgcaagaaactacgcaggagcttatcgcgagtggctggagaaagagagctag

SEQ ID NO: 28720 - DNA, 225 bp, synthetic construct
  source 1..225: mol_type = other DNA; note = Synthetic coding sequence
atggctggcgtgtcagagctggaatcggccctccaaatggaacccgctgcttttcaggctctctatagcgccgaaaagcccaagttggaggatgagcacctggtattcttctgccagatgggcaaaaggggactgcaggccacgcagcttgcacggtcattaggatatactggagcccgtaactacgccggtgcctatcgggagtggctggagaaggagtcctag

SEQ ID NO: 28721 - DNA, 1794 bp, synthetic construct
  source 1..1794: mol_type = other DNA; note = Synthetic coding sequence
atgtcaagcaaagggtcctccacagacgggaggaccgacttggcaaacgggtcactttcaagctccccagaggaaatgtctggcgcagaggaaggcagggaaacttcatctggaatcgaggttgaagcctcggatttaagccttagcttgaccggagatgatggcggaccgaaccggacctccaccgaatcccgtgggacagacacagagagcagtggcgaggacaaggattcggattcaatggaagatacgggacactacagtatcaacgatgaaaatagggtgcatgatagaagcgaggaggaggaagaggaagaagaggaggaggaggaggagcagccacgacgaagggtccaaaggaaaagagccaatagagatcaggattctagtgacgacgagcgggctctggaggactgggtatccagtgaaacctccgcccttcccaggccacgatggcaggcacttccggcactgagagaaagggaactcgggagcagcgctcggtttgtgtacgaagcgtgtggggcacgagtatttgtacagagatttagattacagcatgggctggagggtcacaccggctgcgtaaacaccctgcattttaaccagcggggaacatggctggcttctggttcagatgatctgaaggtagtagtgtgggactgggtccgtcgccagccagtcctggactttgagtcaggccataaatcgaacgtgtttcaggctaagtttcttccaaacagcggcgactccacattggcaatgtgcgcaagggacgggcaggtccgcgtcgcagaacttagtgcaacccagtgttgtaaaaatactaagagggtagcccagcataagggagcctcacataaactggctctggagccggattctccctgtactttcctctctgcaggggaggatgccgtggtattcacaatagatctgaggcaggatcggcctgcctctaaattggttgtgaccaaggagaaagagaagaaagtgggtctttacacaatctatgtgaaccccgcaaatactcaccagttcgccgtgggagggagagaccaatttgtaagaatttatgatcagcgcaagatcgatgagaatgagaataacggggtccttaagaagttttgcccccatcatctggtcaattcagagagcaaggccaacattacttgtctcgtgtacagccacgatggaactgagttacttgcctcctacaacgacgaagacatctatctcttcaactcctcccattcagatggcgctcagtacgtaaagagatataagggccaccgcaacaacgccactgtgaaaggagtgaacttctatggacccaagtctgaattcgtggtctctggaagcgactgtggccacattttcctgtgggaaaagagctcctgccagattattcagtttatggagggagacaaggggggagttgtaaattgccttgagccccaccctcacctcccggtactcgcgaccagcggactggaccatgacgtgaagatttgggcgccaaccgctgaggcctcaactgagctgacgggtctgaaggacgtcatcaagaagaacaagcgggagagggacgaagattctctgcatcagaccgacctgttcgactctcacatgctgtggttcctgatgcaccatctgagacagcggagacaccatcggaggtggcgagagccaggcgtgggcgctaccgacgccgattccgacgagagccctagcagcagtgatacgagcgacgaggaagaaggacccgatcgcgtccagtgcatgccttcttag

SEQ ID NO: 28722 - DNA, 1794 bp, synthetic construct
  source 1..1794: mol_type = other DNA; note = Synthetic coding sequence
atgtcttctaaaggatcatctacagacggtaggaccgatctggcaaacggttcgctttcttctagtcccgaagaaatgtccggggcagaagaaggacgggagacctccagcggcatcgaggtcgaggccagtgacctttccctttcgctgaccggagatgatggcggtcccaacaggacaagtaccgagagccgtggaactgacaccgaatcctctggagaagataaagacagcgattccatggaagatactggccattatagcatcaacgatgaaaaccgggtgcacgatcgatctgaggaggaggaagaggaagaagaggaggaggaggaagaacaacctcgtcgcagagttcagcgaaaacgtgctaatcgagatcaagattccagcgacgatgagagagcattggaggattgggtctcctcagagacttccgccctgccacggccaaggtggcaggcactgccagctctcagagagcgtgagctaggtagttcagctcgtttcgtgtacgaagcatgcggagcacgagtgtttgtacagcgctttcggttacagcacggactggagggtcacacaggctgcgtcaatactctacacttcaatcagcgcggtacctggttagcgagtggatctgacgatttgaaggtggtggtatgggactgggtccggaggcagcctgtgctggacttcgagagcggacataagtccaacgtgtttcaggcgaaatttcttcccaactctggagactcgacattggctatgtgcgcacgggatgggcaagtgcgcgtggctgagctgtctgccactcaatgttgtaagaacaccaaacgggtggcacagcacaaaggagcgtcccacaagctggccctagagcccgactcgccctgtacattcctgagcgcgggtgaagacgcggtggtatttactatagacctgcggcaggaccgtccagcttccaagcttgtggtaaccaaggaaaaggaaaagaaagtaggtttatacacaatctatgtcaaccctgccaacacccatcagttcgcagtcgggggtagggatcagttcgtgcgtatctacgatcaaaggaagatcgatgagaatgaaaataacggagtgctgaagaagttctgcccacatcatttggtgaacagtgagtcaaaggccaacattacatgcctcgtttatagccacgacggaaccgaactgcttgctagctataacgacgaagatatttaccttttcaatagctctcattctgatggcgcacagtacgtcaaaagatacaaagggcacaggaataatgctacagtgaagggcgtgaatttctatggacccaaatctgaatttgttgttagcggatccgattgcgggcatatattcctctgggagaaatctagttgtcagataatccagtttatggagggtgataagggaggggtcgtgaactgtttagagccccatcctcatctgcccgtgctggcaaccagcggccttgaccacgacgtgaagatctgggcccctaccgctgaagcctctaccgagctgacaggactcaaagacgttataaagaagaataaaagggagcgtgacgaggacagcttgcatcaaacagaccttttcgacagccatatgttgtggttcttaatgcaccatctgagacaacggaggcatcacaggagatggcgtgagcccggagtgggcgctacggacgctgatagtgacgagtcacccagctctagcgatacctctgacgaggaagaggggccagatcgtgttcagtgtatgccctcatag

SEQ ID NO: 28723 - DNA, 453 bp, synthetic construct
  source 1..453: mol_type = other DNA; note = Synthetic coding sequence
atgggcgtccagccccctaacttttcatgggtactgcctgggcgattggccggactggccctgcccagattgcccgcacactatcaattcctgttggatctgggggttaggcacctcgtgagtctaacagaacgcggtcctcctcacagtgattcttgtccaggcctgacactgcataggctgcggattccagatttctgtccccctgcccctgatcagatcgatagattcgttcaaatcgttgacgaggccaatgctagaggggaagcggtgggcgtccactgtgccctgggcttcgggagaacaggaactatgctggcgtgttatctggtaaaggagcggggattggccgctggagatgcaatagctgagattagacgattgcggccaggctccattgagacatacgaacaggaaaaagccgtgttccaattttaccagcggacaaagtag

SEQ ID NO: 28724 - DNA, 453 bp, synthetic construct
  source 1..453: mol_type = other DNA; note = Synthetic coding sequence
atgggtgtccagcctcccaactttagttgggtgttacccggacggctggctggcttagccctccctcggttaccggcacattaccaatttctgcttgatctgggcgtgaggcacctggtgagtctgacagaaagagggcctccacattctgacagctgcccgggactgacactgcatcggctgcgcattccagacttttgcccacctgccccagaccaaatcgaccgattcgtgcaaatcgtggatgaagccaacgctaggggcgaggccgtgggtgtccactgcgctctcggcttcgggaggaccggcacaatgctggcctgctaccttgtcaaggagaggggccttgccgcaggtgatgcgattgccgagatacggcgtctgagacccggttcaattgagacgtacgagcaggaaaaagcggtgtttcaattctaccagaggacaaaatag

SEQ ID NO: 28725 - DNA, 453 bp, synthetic construct
  source 1..453: mol_type = other DNA; note = Synthetic coding sequence
atgggggttcagccacccaattttagttgggttctacccggtcggctagctgggcttgctcttcctagactgccagcccattaccaatttctcctggacctcggagtccgccatcttgtctctcttactgagagaggacccccacacagcgattcatgccctgggttgactctccataggcttcgcattccagatttctgccctcccgctccggatcagatcgatcgattcgttcaaattgttgacgaggctaatgcaaggggtgaagccgtaggagtgcactgcgccttagggtttggcaggacagggaccatgctggcttgttacctggtgaaagagagaggattggccgctggggacgccatcgctgaaattcgtcggcttcgcccagggagcattgagacgtacgaacaggagaaggccgtgtttcagttttaccagcggacaaaatag

SEQ ID NO: 28726 - DNA, 4866 bp, synthetic construct
  source 1..4866: mol_type = other DNA; note = Synthetic coding sequence
atggagggatgcatgggggaggagagctttcagatgtgggagctgaacagaaggctagaagcatatcttgcccgagtcaaggcattggaagaacaaaatgagctgctgtccgctgaactggggggtctacgggctcagtctgctgacacaagctggagggcccacgcggacgatgagctggcggcattgagggcgctggtagatcagcggtggcgggagaaacatgccgctgaggttgcgagagataacctggctgaagaactcgagggggtagcaggacgttgtcaacagcttagactggccagagagagaactaccgaggaggtggctcgtaatcgaagggccgttgaagccgaaaaatgcgcaagagcatggctttccagccaggtcgccgaattggagcgcgagctggaagctctgagagttgcccacgaggaggaacgcgtgggccttaatgcccaggctgcctgtgctccccgatgtccagctcctccccgtggacctcctgctcctgcccctgaggtggaggagctggcacgaagactgggagaagcctggcgcggagctgtcagaggctaccaggaacgtgtggcccatatggagacatcactgggacaagctagggagcggcttggacgggctgtgcaaggggcaagggaaggcaggttggaattacagcagttgcaggccgagcgtgggggattactagaacggagggcggcattggagcaacgtttagagggtcggtggcaagaaaggctccgagctacggagaaattccaactagcggttgaggcgctggaacaggaaaaacagggccttcagagtcagatcgcccaggtccttgaagggcgtcagcagctggcacacttgaagatgagccttagtctggaggttgccacctaccgcactttattagaagcagagaattcccgtttacagacacccggaggcggaagtaagactagtttatcatttcaggacccaaagttggagcttcagttcccccgaacgcccgagggtagaaggctgggctccctgctgccagtgctttccccgacctccctcccatcccccctgcccgcaactttagagacccccgtgcccgctttcctgaaaaatcaagaattcttgcaggcaaggacgccaacacttgcttctactccaatcccacccacaccccaagcaccctctccagccgtcgatgcagaaatacgcgctcaggacgccccattgtctctgctccagacccaggggggacggaagcaggcccctgagcccttaagggccgaagcccgtgtggcaatcccagcaagcgtactacctggtcctgaagaacctggcggacagcgccaggaagcgtcaacaggccagtccccggaggatcacgcaagcttggcccctcctctgtccccagaccacagttctctcgaggccaaagacggggaatcaggaggcagtcgggtattcagcatctgtcggggtgaaggggaaggccaaatttggggtttagtggagaaggagacagccattgaggggaaagttgtcagttcactgcaacaggaaatttgggaggaagaggatttgaaccgcaaggaaattcaggactctcaagttccattggagaaggaaacccttaagtccttgggagaggaaattcaggaaagtttgaagacattggagaaccagtcgcatgagacgctcgaaagagaaaatcaggagtgtccaagaagtctggaggaagacttggagaccttgaagtcacttgaaaaagagaataaagaactgctgaaggatgtggaggtggtcaggccccttgaaaaggaagctgttgggcagctgaaacctaccggcaaagaagatacccaaaccctgcagtccttgcagaaagaaaaccaagaactcatgaagtcccttgagggcaacctggagacattcctctttcccggaacagagaatcaggaactagtcagttcacttcaggaaaaccttgaatccctcacggccctggaaaaggagaaccaggagccgcttaggagcccagaggtaggagatgaggaggctctgcggcctctcacaaaggagaatcaggaaccattacggtcattggaggatgagaataaggaggcattcaggtcacttgagaaagagaaccaggagccattaaaaaccctcgaggaagaggaccagagtatcgtgaggccacttgagactgagaatcataaaagcctcagatcattggaggagcaggatcaggagacgttgcggacactcgagaaggagactcagcagcggagacggagtctcggtgaacaggatcagatgacgctccgcccacctgagaaagtggacctagagccgcttaaaagccttgatcaagagatcgctaggccccttgaaaatgaaaatcaggaatttctcaaatctctaaaggaggagtcagtcgaggcagtaaaatctctcgagacagaaatccttgaaagtctgaaatccgccggacaggagaacttagagactcttaagagtccagaaacacaagcaccattatggaccccggaagaaataaatcagggcgcaatgaaccctcttgagaaggagattcaggaacccctggaaagtgtggaggtcaatcaggaaaccttccggttgctggaagaggaaaatcaagagagtctgcggtctctgggagcatggaacctagagaatctcagatccccagaagaggtagataaggagagtcaacgcaacctggaggaagaagaaaatctcggcaaaggagagtatcaggaatctctgcggtcattggaggaggagggtcaggagctgccacagagcgcagatgtgcagaggtgggaagatactgtagaaaaggatcaggagctcgcccaggagagtccgcctgggatggccggagtcgagaatgaggacgaagcagaactcaatttacgagagcaagatggtttcacaggaaaggaggaggtcgtggagcagggcgagctgaatgcgaccgaagaagtgtggatccctggcgaaggtcatccagaaagtcctgagcccaaagagcagcgcggtttagttgagggtgcttcggtgaaaggaggagccgaaggtttacaggaccctgagggacagagccagcaggtgggagctcccggtctccaggcacctcagggccttcccgaggcgattgagcccctagtagaagacgacgtcgcacctggtggcgaccaggcctctcccgaggtaatgctggggagcgagccagctatgggcgagtctgccgcaggagctgagcccggtcctggccagggggtggggggtctcggcgatcctggacacctgactcgagaggaggttatggaacccccactggaagaggaatccttggaagccaaaagggttcaggggctggaaggccctcggaaggatctggaggaagccggtggactcggtactgaattctccgagctacccggaaaatccagagatccgtgggagccccctcgcgaaggaagggaagaatcagaggccgaggctccaagaggcgcagaggaagcattccctgccgaaactttggggcacacaggatctgacgccccatctccgtggcccttgggctctgaggaggccgaagaagatgttccccctgtccttgtgtccccctcaccaacctacacgccgatcctcgaggacgcgccagggcctcagccacaggccgagggctctcaagaggcttcatggggcgtccaaggcagggctgaggctcttggcaaggtggagagtgaacaggaggaactgggcagcggcgagatccctgagggacctcaggaagagggagaagagtcccgggaggagagcgaggaagacgaactgggagagaccctcccggactccacccccctgggcttttacctgcggagtccaacctcaccacgatgggatccaacaggagagcaacgccctcccccacagggtgagaccggcaaagaaggatgggatccggcagtgctggcctccgagggcctggaggctcctccatctgaaaaagaagagggtgaagaaggagaggaagagtgtgggagagactcggacctgtctgaagagttcgaagacctgggaaccgaagccccatttctgccaggcgtgcctggggaggtcgccgagccactcggtcaggtcccccagctgttgctggacccagccgcttgggatcgtgatggcgagtcggacgggtttgccgatgaagaggagtctggtgaagaaggagaggaagatcaggaggagggccgagaacctggtgctggcagatgggggccagggagtagcgtcggctcgctgcaggcccttagctcatcgcagagaggcgagttcctcgaatccgattccgtgtctgtctccgtcccttgggatgacagcctacgcggtgccgttgccggagcacccaaaacagctctggagaccgagagccaggatagcgctgagccgagcggttcagaagaagaaagcgaccctgtttcactggagagggaggataaggtgccgggacccttagagatcccttccggcatggaagacgcaggaccaggggctgatatcattggagtgaacgggcaagggccaaaccttgaagggaagtctcagcacgtcaatggcggtgtcatgaatggattggagcagtccgaggaggtaggacagggcatgcccctcgtctctgaaggggatcgtggatcaccttttcaggaggaagaaggcagtgcactgaaaacgagctgggctggggcaccggtgcacctggggcaggggcagttcttgaaattcactcagcgtgaaggcgacagggagtcttggagctctggtgaagactag

SEQ ID NO: 28727 - DNA, 378 bp, synthetic construct
  source 1..378: mol_type = other DNA; note = Synthetic coding sequence
atggagcggcatactagtcatcctaatcgaaaggtgccggcaaaggaagaggcaaatgccgtaccgttatgtcgggcaaagccctcaccgagctatatcaatctgcaggccagttctccaccagccacatttctgaatatacagaccaccaaactgccttccgttgatcacaagcccaaggaatgtctgggactgctagaatgcatgtacgctaacctgcaactccagacacagctggcccaacagcagatggccgttctggaacacctgcaggcttcagtcacccagctagcccctggacgaggctcgaacaattccagcttacccgcactctccccgaaccctctgctcaatcacttgccacaattctctaagtag

SEQ ID NO: 28728 - DNA, 378 bp, synthetic construct
  source 1..378: mol_type = other DNA; note = Synthetic coding sequence
atggaacgacacaccagccaccccaatcgcaaggttccagcgaaggaggaggccaatgcagtcccattgtgcagagcaaaacctagtcccagctacatcaacctccaagcctctagccctccagccactttcctcaatattcagacaacgaagttaccatcagtggaccacaagcctaaggaatgcctcggattgcttgagtgtatgtacgctaacctgcaactccaaacccagctcgcgcagcagcaaatggcagtgctggagcacctgcaggccagcgtaacacagttagccccagggcgtggctcaaataatagcagcctgccagctctgtctcctaatcctctgctcaaccacttgccgcagttcagcaagtag

SEQ ID NO: 28729 - DNA, 378 bp, synthetic construct
  source 1..378: mol_type = other DNA; note = Synthetic coding sequence
atggagaggcatacatcccaccccaataggaaagtcccagccaaagaggaagcaaacgccgtccccctttgcagggctaaaccttctccttcgtacattaatctgcaggcctcctctccaccggctacctttcttaatatacaaaccacgaagctgccctctgttgatcacaaacctaaggaatgtcttggcctgctggagtgcatgtacgctaatctccagctccagacccaattggctcaacagcagatggctgttctggaacacctgcaagcaagcgtgacccagctggccccaggacgagggtccaacaactcttctctccccgcactatcgcccaatccccttttaaatcatctccctcagttctccaagtag

SEQ ID NO: 28730 - DNA, 378 bp, synthetic construct
  source 1..378: mol_type = other DNA; note = Synthetic coding sequence
atggagagacacacatcacaccccaatcggaaggtgcccgcaaaggaggaggccaatgccgtccccctgtgcagagcaaagccaagcccaagttacattaatctgcaagctagcagtccacctgccacctttctgaacatccagaccaccaaactgccgtccgttgatcataaacccaaggagtgccttggactgcttgagtgcatgtatgctaacttacagcttcagacccagctagctcagcagcaaatggccgtgctcgagcatctacaggcttccgtgacccaactcgcgccaggcagaggtagtaacaacagtagccttccagctctatccccaaacccactgttgaaccacctcccccagttttccaagtag

SEQ ID NO: 28731 - DNA, 378 bp, synthetic construct
  source 1..378: mol_type = other DNA; note = Synthetic coding sequence
atggagcggcacacgagccacccaaatcgaaaggtacctgccaaggaggaggcaaatgcagtgccactctgccgggcaaaaccatctcccagctacataaacctccaggctagctcccctcccgcaaccttcctgaatatacagactactaaactgccttccgtggaccataaacctaaggaatgcctggggttgttagagtgtatgtatgccaacctgcagttacaaacacaattggctcagcagcaaatggcggtacttgagcatttgcaggctagcgtgacacagttggcccctggcagaggctctaataacagctctttgccggctctgagtcccaatccgcttttaaatcatctgccccagtttagtaaatag

SEQ ID NO: 28732 - DNA, 624 bp, synthetic construct
  source 1..624: mol_type = other DNA; note = Synthetic coding sequence
atggccgaggcgtctagtgccaacctcgggagtggctgtgaggagaagcgccatgaaggctcgtcatcagaatcagttccccctggtactaccatcagcagagtaaagctgctagataccatggtagatacctttttgcagaagctggtggccgcaggctcaagcccgcttctgcactgggacggctccgcgggaccacgccttccctcaggtggtcagagtgtgaagcaggcattctcctgggccgcttgcaggctcccacagggcagaaaggaagagatctccgacatcaaggaggagggaaatctggaagccgtcctgaacgcactggacaagattgtggaggaggggaaagtgcggaaagaacccgcttggcgaccttccgggattccagagaaagatctccactcagtcatggccccttactttttgcagcaaagagacactttgaggagacacgtgcaaaaacaagaagccgaaaatcagcaactggctgacgctgtgttggccggacgccgtcaggtcgaggagctgcaactgcaggtccaagcacagcagcaggcctggcaggcccttcaccgcgaacaacgtgagctggtcgccgtcctgcgcgaaccagagtag

SEQ ID NO: 28733 - DNA, 618 bp, synthetic construct
  source 1..618: mol_type = other DNA; note = Synthetic coding sequence
atggccgaggcctctagcgcaaacttggggagcgggtgcgaggagaaacggcatgagggctcctctagcgaatctgtacctcctggcactaccatatccagagttaagctgctggatactatggtggacacctttcttcagaagcttgtggccgctgggtcctaccagcggttcactgattgttataagtgtttttaccagctgcagccagctatgactcagcaaatatatgacaaatttattgcccagttgcagacttccatcagagaagagatttctgacattaaagaggagggcaacctcgaggcggtcctgaatgccctcgacaaaatagttgaagaggggaaggtacgcaaagagccagcctggcgcccatccgggatacctgagaaagatcttcactccgtaatggcaccttacttcctgcagcagcgtgacactctaagacggcatgttcagaagcaggaagctgagaatcagcagttggccgacgccgtcctggcaggcagacgtcaagtagaagagctgcagttacaggtgcaggcccagcagcaggcatggcaggccctccaccgtgaacagagagaactggtagcggtgctgcgcgaacctgagtag

SEQ ID NO: 28734 - DNA, 543 bp, synthetic construct
  source 1..543: mol_type = other DNA; note = Synthetic coding sequence
atggcagaggccagcagcgccaaccttggaagtggctgtgaggagaaacgccatgaaggttcaagctctgaatccgtgcctcccggaaccaccatcagccgagtgaagctgctagacaccatggtcgacacattcctgcaaaaactggtcgctgcaggaagttaccagcgtttcactgattgctacaagtgtttctatcagctgcagcctgctatgacccaacagatctacgataagtttatagcccaactgcaaacatctatccgggaagaaatctcagacattaaagaagagggtaacctggaggctgtgctcaacgctctcgacaaaattgtcgaggaggggaaggtgagaaaggagccagcttgcaacggtaccccatgtggcgcaatgtgtagaaacaggcgccctcggaccagcagttggcagatgccctcctggcagggcggtggaaggtggaggagctgtagttaccgtagtaggccgtcttcccggcctgggcgactatacaccgagaacagaggaagttggctgctgtgctag

SEQ ID NO: 28735 - DNA, 2253 bp, synthetic construct
  source 1..2253: mol_type = other DNA; note = Synthetic coding sequence
atggaggatcttttcgaaacgtttcaagatgaaatgggcttctccaatatggaggacgacggaccagaggaggaggagagagttgctgaaccccaggccaactttaatacacctcaagccctcagattcgaagagttactggccaaccttctgaacgaacagcatcagatagccaaggaactgtttgagcaactgaagatgaaaaagccatctgccaaacagcagaaggaggtcgaaaaggttaagccccagtgcaaggaagtgcatcagacactgatcctggatcctgctcaacgaaaacgcctccagcagcaaatgcagcagcatgttcagctgcttacgcagatccatttgctggccacatgtaaccccaatcttaatcctgaagcgagcagcacccggatctgcctcaaggagctgggaacgttcgcccagagcagcatcgcccttcaccaccaatataaccctaagttccagaccttatttcaaccctgtaatttgatgggtgccatgcagctcattgaagactttagcacacacgtaagcatcgattgtagcccacacaagacggtgaagaaaaccgctaacgaattcccgtgtcttcctaaacaggtggcctggatcctcgcgacatcaaaagtgtttatgtaccctgaactcctccccgtgtgctcactaaaggctaagaacccacaagacaaaatcctttttaccaaggccgaagacaatctactggccctgggtctgaaacattttgagggcaccgagttcctgaatcccctgattagcaagtacctgctgacatgcaagactgccagacaactgaccgtaaggattaagaacttaaacatgaaccgagccccagataacatcataaagttttataagaagacaaaacagctgcctgttctgggcaagtgctgcgaggagatccagccccatcagtggaagccccctatcgaaagagaggagcatcgccttcctttctggctgaaagcctcgttgcccagcattcaggaggagttgaggcacatggcagacggtgcaagggaagtcggcaatatgaccggtaccacggagattaactccgaccaggggcttgagaaagacaattccgagctgggtagtgagacacgatatccactgctgctgccgaaaggcgtggtactgaaactcaaacctgtggccgataggttccccaagaaagcttggcgacagaagcgaagctctgtacttaaaccactgcttatccagcctagtcccagccttcagccatcatttaacccgggaaaaaccccagcccaatccactcatagcgaagcccctccttcgaagatggtgctgcgaattccgcatcccatccaacctgcgacggtgctccagacagttcctggagtgccacccctcggagtcagcgggggagagagctttgagagccccgcagccctccccgctatgccccctgaggccaggacctccttccccctctctgaatcccaaactctcctgtcctcagctccagtacctaaggtgatgatgccaagtcccgcttcctcaatgttcagaaagccttacgtccgaaggcgcccatctaagcggagaggcgctcgtgccttcaggtgcatcaaacccgcaccagtgatccaccccgcttctgtgatcttcacagtgcctgcaacaacagtgaaaatcgtgtccctgggcggaggctgtaacatgattcaacccgtgaatgccgcagtggcacaatcgccacagactatccctatcgctactcttctggttaaccctacttcatttccgtgccctttaaaccaacccctggtggcctcaagcgtttcaccactgattgtgagcggcaacagtgttaatttacctattccaagcacccctgaggacaaagctcatatgaacgttgatatcgcatgcgccgtcgccgatggagaaaatgcctttcagggtcttgaaccaaaactggagccccaggagctgagcccattgagtgccactgtattccctaaggtggagcacagccccggacctcctcctgtggacaagcagtgtcaggaaggcctgtcagagaactctgcatatcgatggacggtggtgaaaaccgaagaaggaagacaggctctagagcctctcccgcaggggatacaagaatccctaaacaactcatctccaggcgatctggaggaggtggtgaagatggaaccagaggacgccactgaggaaattagtgggtttctatag

SEQ ID NO: 28736 - DNA, 2667 bp, synthetic construct
  source 1..2667: mol_type = other DNA; note = Synthetic coding sequence
atggccggagtcgggaggagtggcggaccatggggtcggaccagaggaggaagatctgggcgtttgggggtctcactcggagcgctgtcatcacttcccctggaggaattaccacgcccactgtgttgccgaagatgccggcgacattttgggttcgccctgcggggagagactattccagtatcagttgcgggaagtgcttctagtcagttcgcccctctggcactgcatctgagcctgcttctttctaggattagtgcatccaggctaacaaggtggcctcccccagacaaaagagagggttcagctgtcgaccccggaaaacgaagaagccttgccgctacacctagctcctccctcccttgtacgttgatcgccctgggtctgaggcacgagaaggaggccaacgaactgatggaggatctcttcgagacttttcaggacgaaatgggattctctaatatggaagacgatgggccagaggaagaggaacgcgtggccgagccacaggccaacttcaatactccgcaagccctgaggtttgaggagttactcgctaacctgctgaatgaacaacaccagattgccaaagagctttttgaacagctgaagatgaaaaagccctctgcaaagcagcagaaggaagtcgaaaaagttaagccacagtgtaaagaggtacaccagaccttgatcctggatccggcacagcgcaaaaggctccagcagcaaatgcagcagcatgtccaattgctgacacagatccacctgctcgccacgtgcaatcctaaccttaacccagaggcttcgagcacacggatctgtctcaaagaactgggcacctttgcccagtcaagtatcgccctgcatcatcagtataacccaaaatttcaaactctcttccagccttgcaaccttatgggagcgatgcagttgattgaagacttctccacccacgtgtctatcgactgcagccctcacaagactgtgaagaaaactgcaaatgagttcccgtgtctccccaagcaggttgcctggattttggctaccagtaaggtattcatgtacccagaattactgcctgtgtgtagcctcaaagccaaaaacccccaggataaaatcctcttcaccaaagcagaggataacttgctggccctgggcctaaagcacttcgaaggcaccgaattcttaaatccgctaatatctaagtacctgcttacctgtaaaaccgccagacagttgactgttagaattaagaatctaaacatgaaccgcgcaccagacaatatcataaagttctataaaaaaacgaagcagctgcctgttctcggaaagtgttgcgaagaaatccagccacaccagtggaagcccccaatcgagcgggaggaacatcggctacccttttggctcaaagcatccctcccctcaatacaagaagagctgaggcacatggccgatggggcaagagaagtcggtaatatgactggcaccactgagattaattcagatcaaggtttggagaaagacaacagtgagctgggctccgaaacccgctatccgttactcctgcctaagggcgtggtgctcaagcttaagccagttgccgatcggttccccaagaaagcctggcggcagaagcgatcctccgtgctgaaacccttgttgatccagcctagccctagcttacagcctagctttaacccagggaaaacaccagcgcagtctacacatagcgaagccccacctagcaagatggttcttagaattccacatcctattcagcctgccacggtgctccagaccgtgcccggtgtacccccactgggtgtgtctggtggcgagagcttcgagtctcctgccgcactgcctgctatgccccctgaagcacgtaccagttttcccctctccgagtcacagactctgttgagttcagcccctgtgcccaaagtaatgatgccaagccccgcatccagtatgttcaggaaaccttacgtgagacgcagaccctcgaagaggagaggggctagagctttcagatgcatcaagccagctccggtgattcacccagcctccgtgatctttactgttcctgcgacgaccgtgaaaatagttagccttgggggagggtgtaatatgatccaacctgtgaatgccgcagtggcacaatcacctcagaccatacccatcgctacactgctagtcaatcccacgagcttcccctgtcctctgaaccagcctctcgtcgcatcctctgtgtcgcctctgatcgtgtctggtaactcagtcaatctgccgatcccttcaacgcccgaggataaagcacacatgaatgttgacatcgcctgcgccgttgcggatggagagaatgcctttcagggcctggagccaaagttggaacctcaggaactgtctcctctttctgcaacagtgttccccaaagtcgaacactcacccggacctcccccagtggataaacagtgtcaagaagggttaagtgaaaactcagcttatagatggaccgtggtcaagaccgaagagggcagacaggcactcgagccgctcccccagggcatccaggaatcactgaacaatagcagtccgggagatcttgaggaggtagtcaagatggagccagaggatgcaacagaagagatcagcggttttctctag

SEQ ID NO: 28737 - DNA, 2607 bp, synthetic construct
  source 1..2607: mol_type = other DNA; note = Synthetic coding sequence
atggccggtgtaggccgttctgggggtccatggggccgaacacgtggaggaaggagcggaaggctcggggtgtccctgggcgctctgtccagtttaccgctggaagaactccctcggccactgtgctgcaggcggtgccgtcgccactttggatttgcactgcgaggcgaaacaattcccgtgagtgtggccggtagtgcttcgtcacagttcgccccactcgctctgcatttgagtctgttgctgtcccggatctctgccagtagactgacccgctggcctccaccagacaagagggaaggctcagctgtcgatccaggcaagaggaggtctctggctgctaccccttccagctcactgccatgcacccttattgccttgggtctgcggcatgagaaggaggcgaatgaattaatggaagacttgtttgagacctttcaagatgaaatgggcttcagtaatatggaggacgatggtccagaggaggaagagagagttgcggaacctcaggccaacttcaatactccgcaggctctccgtttcgaagagctgttagctaatctgctgaatgaacaacatcagatagctaaggagctgtttgagcagctgaaaatgaaaaagccatccgccaagcagcagaaggaggtcgagaaggtcaaaccccagtgcaaggaggtccaccagaccctgattcttgaccccgctcagagaaagaggctgcagcagcaaatgcagcagcatgtacaacttctgacacagatccaccttctcgctacatgcaatcccaatctcaatccggaggcgtcatctactcgcatctgcctgaaggaattaggcacttttgctcagagtagcatcgccctgcaccaccagtataacccgaagtttcaaactttattccagccctgcaatctgatgggggctatgcagctaatcgaggatttttctacacacgtgagcattgactgttccccacacaagactgtaaaaaagacagctaatgagttcccctgcctgccaaagcaggttgcgtggatcctggccacctccaaggtgtttatgtatccagaactgcttccagtctgcagtctcaaggccaaaaatccccaggataagatcctgtttacaaaagccgaggacaacaagtacttactgacgtgcaaaacagcacgacagctgactgttcgtattaaaaatctgaatatgaatcgcgctcctgataacattataaaattctataaaaagaccaaacagttgcctgtgctagggaagtgttgcgaggagatccagccccaccagtggaagccccctattgaacgggaggagcatcgccttcccttttggctcaaagctagcctcccttccatccaggaagagctccgacatatggccgacggggcaagagaagtgggcaatatgacaggaacaaccgagatcaattcagaccagggcctcgagaaagataacagtgagctgggaagcgaaaccaggtatcccctgctgctgccaaagggggtcgttctaaagctcaaacctgttgccgacagatttccgaaaaaagcatggcgccagaagaggtcatctgttttaaagcctttactgatccagccttcaccttctcttcagcctagcttcaacccagggaaaacccccgctcagtcgacgcattccgaggcccctccgtccaagatggtgctgaggataccccatccaatacagcccgcaactgtgctgcagacagtgcccggtgttccacccctcggggtctccggaggcgaatccttcgagtcccctgctgctctacccgcaatgcccccagaagcaaggacttctttcccactgtcagaatcccagacactcctctcttccgcccctgtgccaaaagtgatgatgccgagccctgcgtcttccatgttccggaagccctatgtgaggcggcgtccctccaaaaggaggggagctcgcgcttttcggtgcattaagccagcccctgtgatccatcccgcatctgtgattttcaccgtgcctgccacgactgtgaaaatcgtaagccttgggggagggtgtaacatgatccagcccgtgaatgcggcagtggcccagtctcctcagaccattccaatcgctactttgttggtcaaccccacatcgtttccctgtcccctgaaccagccactcgttgcgagctctgtcagccctttgattgtgtccgggaacagcgtgaacctgcccataccctccacacccgaagacaaggcccacatgaatgttgacatcgcgtgtgcagtggctgacggggaaaatgcctttcaggggctggagccgaaactggaacctcaagaactgagccccctgagcgcaactgtcttccccaaagtggagcactcaccaggtccaccacccgtggacaaacagtgccaagaggggttgagcgagaatagtgcctacaggtggacggtcgtcaagactgaagagggcagacaggcactggaaccgctgccccagggtatccaggaaagtttaaacaattctagccccggagaccttgaggaggtggtgaagatggaacccgaagatgctaccgaggagataagtggatttctttag

SEQ ID NO: 28738 - DNA, 1575 bp, synthetic construct
  source 1..1575: mol_type = other DNA; note = Synthetic coding sequence
atggccggaggagcccgagaggtgcttacattgcagctcggacactttgctggctttgtgggggcacattggtggaaccagcaggatgctgctctgggacgagccactgatagcaaggagccgcctggagaattatgccctgatgtgctgtaccggacgggaaggactctgcacgggcaggaaacatacacccctcggcttatcctgatggatctgaaaggctctctgtcttcgctgaaagaagaaggcggactctatcgggataagcagttggacgccgctattgcctggcagggcaaactgacaacccacaaaggaagtagtccattgcccaccgctaccacacctaaacctctcatacccaccgaggcatccatccgcgtatggagtgactttctaagagtccatctgcacccgcgaagcatctgtatgattcagaagtataaccatgacggcgaagctggccgtctggaagcttttggccagggggagtcagtcctaaaagaaccgaaataccaagaagaactggaggaccgtttacacttctatgtggaggagtgcgactacctacaaggcttccagatactatgtgatctacacgacggattttctggcgtgggtgctaaggctgctgaactgctgcaagacgaatatagtggtagggggatcatcacatggggtctgctccctggaccttatcacagaggggaagcacagcgaaacatttataggttattgaacaccgcctttggattagtccatttaactgcacacagcagtctggtgtgccctctgagtctgggcggttccctgggactcagaccagaaccccctgtcagctttccctatctacactacgatgcaaccctgccttttcactgttccgccatcctcgccactgcgctggacactgtcacggtaccatacaggttatgctcgtctcccgtttctatggtgcacctggccgatatgctttcattttgtggaaaaaaggtggtcaccgcgggtgccattattcctttccctcttgctcctggtcaatcattgcccgatagtcttatgcagttcgggggtgccactccgtggactcctttgtcagcttgcggcgagccctctggaacacgatgctttgcccaatctgtggtgttacgaggaatcgatagggcatgccacactagccagctgacgcctggaacccctcctccttccgcgctgcatgcttgtacgactggggaggaaattctggcacagtatttacagcagcaacagcctggcgtcatgagctcctcccacctccttctgactccctgccgggtcgcgcctccgtacccccaccttttcagcagctgtagtccgccagccgtagaatcaattcccgtattcggcgctctctgcagttcttcctcacttcaccagacactcgaggcccttgcacgggatcttacaaaattagacctccgtagatgggcttcgttcatggatgcaggcgtggagcacgacgatgtagctgagctcctacaagaactgcagtctctcgcccagtgttatcaaggtggggactcactagtagactag

SEQ ID NO: 28739 - DNA, 1479 bp, synthetic construct
  source 1..1479: mol_type = other DNA; note = Synthetic coding sequence
atgcccccaacctgtagccctgggctcaggcgacaagactgggcgcctggcaggtgtgctggactgcatctacctccacgggctccatccagtcctgcactccaggccctagccggacaggccggagtaaggtcatcctggtcctttgccggtgtgccaggggctcagaggctgtggatggccgaggcccaatcaggtaccggtcagcttcaagagcagaaaaagggcctccttatagcggtgtccgtgtctgtggataagattatcagccattttggtgccgctcgaaatctggtgcagaaggcccagctaggggactctcgtctctcacctgatgttggacacctggtgcttaccaccctctgtccggcattgcatgctttagtggcagacgggctgaaaccatttcggaaggacttaataactggccagcggagatcttccccatggtctgtcgtggaggcaagtgtgaaaccgggaagtagtacccgatcgctaggcaccctttattcccaggtcagtagattggccccactctcctcttcaagatctcgcttccatgcgtttatcctggggttgttgaacactaagcagcttgaactgtggttttcatcccttcaggaggacgcgggactgctgtcccttttgtatctgcctacaggatttttctctttggcgagggggggatgccctagtcttagtaccgaattattgttgctgctgcagcctctgtccgtgctgacattccatctggatctgctcttcgaacatcatcatcatctccccctcggaccgcctcaggccccagctccacccggtccaccacccgctctccagcagacaatgcaagcaatgctccatttcgggggacggctggcccaatcactgcgcggtaccagcaaggaggccgcatcagatccatctgactctcctaacctccctacacctggcagttggtgggaacagttgacacaggccagccgtgtatatgctagcggtgggactgaaggttttccgctaagcagatgggccccaggcaggcatggcactgctgccgaagagggtgcccaggagcgcccactgcccaccgacgagatggccccaggaaggggcctctggcttgggaggctgtttggagtgcctggcggtcctgcggagaacgagaacggcgctctgaaatccagacgtccttcaagctggttgcctcccaccgtgtctgttctcgctttagtgaagaggggtgcgccaccagaaatgccttccccccaggaattagaggccagtgcgcctagaatggtccaaactcaccgtgccgttcgggctctctgtgatcatactgcagcccgaccagaccaactgagctttagacgaggggaagtgctccgcgtaattacgacagtggacgaggactggctcagatgcggccgtgacggtatggagggattagttccagtgggctatacttctctggtattgtag

SEQ ID NO: 28740 - DNA, 1302 bp, synthetic construct
  source 1..1302: mol_type = other DNA; note = Synthetic coding sequence
atggcggaagctcagagtggaaccggtcaacttcaagaacagaagaaaggactcctgatcgccgtttctgtgtcagtggacaagatcatttcgcactttggggcagcgaggaacttagtgcagaaagctcagctcggcgactctcgcttgtctcccgatgtggggcaccttgtgctgaccaccctgtgcccagcgcttcatgcactggtagccgacgggttgaagcccttccgcaaggaccttatcactggccagcgcaggagcagtccctggagtgtggtggaggcaagcgtgaagccaggaagctcaacacgcagtctcggaactctgtactctcaggtaagccgcttggccccattatcatctagtaggtcccgcttccacgcctttatcctcgggttactcaatacaaaacagctagagttatggttctccagcctgcaggaggatgccggactactcagccttctgtatctgcctactgggtttttctcgctagctagaggcggatgcccttcactgagcaccgaactgctcctgttgttgcaaccactgagcgtgctcaccttccacctggacctgttatttgagcaccaccatcacctgccactcggccctccacaggcacccgctccgcctggcccacccccagccctgcagcaaaccatgcaggcaatgctccattttggaggcagactggcccagtccttgagaggaactagcaaggaggccgcatccgatccctccgatagtcctaatctcccaacgccaggttcctggtgggagcaactcacccaggcaagcagggtgtatgcctcagggggaaccgaaggcttccccttgtctcgatgggccccagggagacatggaacagcagcggaggagggggctcaggagaggccactgcctaccgatgagatggcccctggcagagggctgtggctcggcaggctgttcggagtacctggagggccagccgagaatgaaaacggtgcactgaagagcagaaggcccagctcttggctgcccccaaccgtctcagtccttgctttggtcaagagaggggctccccctgagatgcctagtcctcaagaattagaggcatcagccccaagaatggtgcaaacgcaccgcgctgtgcgtgcactctgtgaccataccgccgctcgacccgatcagctgtcatttcggaggggagaggtgttaagggtgatcactacggtggacgaggattggctgagatgtggacgcgacgggatggagggactcgtgcccgtgggctataccagcttggtgctatag

SEQ ID NO: 28741 - DNA, 2709 bp, synthetic construct
  source 1..2709: mol_type = other DNA; note = Synthetic coding sequence
atgctcagtccccagcgcgctctgctgtgtaacctgaatcatattcatcttcaacacgtctctctgggcttgcatctcagtagaagacccgaactgcaggagggccctctgtctacgccccctccccctggagatacggggggtaaggaatcccgaggtccatgctccggtaccctcgtcgacgccaactccaatagccccgctgtcccctgtcgctgttgccaggagcatgggccagggttggagaaccgtcaggatcccagtcaagaggaagaaggtgcagcctcaccttccgatccagggtgcagttcatccctatcctcctgttccgacctgtctccagatgagagccccgtcagcgtttacctgcgggatttacccggagacgaggacgcacatccgcagccttcaatcatccccttagaacagggctcccccctagccagtgcaggcccaggcacttgctcgccagactccttctgctgttctcctgacagctgcagcggtgcgagctctagtcctgaccccggactcgatagtaattgtaacgcgctcacgacatgccaggacgttcctagcccagggttggaagaggaagatgagagggcagaacaggatctccctacgtctgagctgctggaagcagatgacggcaagatcgatgccggaaaaaccgaaccttcctggaagattaacccgatttggaaaatcgataccgagaagaccaaagccgagtggaagaccaccgagaacaataacactggctggaagaacaacggcaacgtgaacagctcatggaagtcagagcctgagaaatttgacagtgggtggaagacaaacacacgaattacagatagtggcagcaagaccgatgccggtaaaattgacggagggtggcggtccgacgtttccgaggaacccgtgccgcaccgcactataacctccttccacgagctcgcccagaagcggaaaagggggccaggtttgcccctcgtgcctcaagccaagaaggatcgatccgactggttaatcgtgttttctcctgatacggagctccccccaagtgggtcacctgggggaagttctgcccctcctcgagaggtgactactttcaaggaattgagatcgcgctctagggccccagcccctcctgttcctcctcgtgatcccccagtgggctgggccctggtgcccccaagaccacccccacctccagttccgcctcgaagaaaaaagaatcggcctggcttgcagcccatcgctgaggggcagagtgaagaaggccgagccgtaagtcccgctgcaggcgaagaagccccagcagcaaaagagccaggtgcgcaagcagggcttgaggtgcgcagttcatggtcctttgccggagtgccaggcgcacaacgactctggatggctgaggcacagtctggcacaggacagctgcaggaacagaagaagggactgctgatcgccgtgagtgtgtccgtggataagatcatctcccattttggggcagcgaggaacctggttcagaaagcccagttaggagacagtagactgtcacccgatgtgggacacttggtcctgactaccctatgtcccgctttgcacgccctggtcgcggatgggctcaagccgttcagaaaggacctgatcactgggcaacggagatcaagcccatggtccgttgtggaggccagcgttaagcctggaagctcaactagatccctcggaaccttatattcccaagtctcacgtctcgcccctctctcctccagccgtagccgattccatgccttcatattgggcctcttgaacacaaagcaactcgagctttggtttagttcactgcaggaggacgcaggccttcttagtttgctgtacctaccaacagggtttttttccctggccagaggcggatgcccttccctttctaccgaactgttgctcctgctgcagccacttagcgttcttactttccaccttgacctactgtttgagcaccaccatcacctgcccctaggtccaccgcaggcacccgctcctccgggtcctccaccggctctccaacagacaatgcaggccatgctacactttggtggtaggcttgcacagagccttcggggaaccagtaaggaggccgcttctgacccctccgacagccccaacttacccactccgggtagctggtgggagcagttaacccaggcctctagagtatacgcctctggcggaactgagggcttcccactgtctaggtgggctccaggccgacatggcacagcagccgaagagggtgctcaggagcgaccgctacccactgatgaaatggccccaggacgaggactttggcttgggcgactttttggggtccccggaggccctgccgagaatgagaacggggctctgaaaagtcgcagaccctcgagctggctgcctcctactgttagtgtcctggctctggtgaagagaggtgcccctccagagatgccgtccccgcaggagctggaggcttccgcacctcgtatggtgcagactcatcgggctgtgcgagcactgtgtgaccataccgctgcacgacccgaccagctgagctttagacggggtgaagtacttagggtgatcacgactgtggatgaagactggctccggtgtggaagagatggcatggaaggactggtgccagttggatatacatcactggttctttag

SEQ ID NO: 28742 - DNA, 2391 bp, synthetic construct
  source 1..2391: mol_type = other DNA; note = Synthetic coding sequence
atgcttagtccccagagagccctcctgtgcaacctcaatcacattcatctgcagcacgtgagcttgggtctgcatctctcccgccgtccagagctgcaggagggacccctgtcaacaccaccaccccctggggatacaggagggaaggagagcagagggccatgttccggtaccttagtagacgcaaactcaaactcacctgctgtaccctgtcgatgttgccaagagcacgggccagggttggaaaatcggcaggatccatcacaggaagaggaaggtgctgcaagtcccagcgatcccggatgtagctcatcactttcgtcctgttcagacctcagtccagatgagtctccagtgtctgtctatctgcgcgacctgccaggggatgaagatgcacacccacaaccatctataattccattggaacagggctcccccctggctagcgctggccctggaacatgctcccccgacagcttttgttgttcaccagattcctgctccggggcttcctcctcccccgatcctggcctagactctaattgcaacgcccttacgacgtgtcaggatgtcccctccccgggactcgaggaagaagacgaacgggctgaacaagacctgcccacttcagagcttctggaagcagacgatggcaaaatcgacgccggtaaaacagaaccgagctggaagatcaatcctatttggaaaatcgacacagagaagactaaggcggagtggaaaaccactgaaaataacaacacaggttggaagaataacggcaacgttaactccagttggaaaagcgagcccgaaaagttcgatagcggttggaagacaaataccaggattacggacagcggaagtaagactgatgcgggtaaaatcgacggtgggtggcgatcggacgtgagtgaggaacctgtgccccatagaacaattacgtctttccatgaattggctcagaagcgaaagcgcggtcctgggctgccactcgtgcctcaggctaagaaggaccgtagtgactggttaatcgtcttttcacctgataccgaactcccaccctccggctccccaggaggatcctccgcccctccaagagaggtcaccacttttaaggagctgcgctcaaggtcgcgcgctccagctcccccagtcccaccacgggatcctcccgtcggctgggctctggtgcccccacggcctccccctcctccggtgcccccaagacggaagaaaaacaggcctgggctccaaccgatcgccgaaggacagtccgaggagggccgtgctgtgtccccggctgccggtgaggaggccccagccgcaaaggaaccgggagcccaggcaggactggaggtgagatcttcctggagttttgcgggtgtgcctggagctcagcgcctatggatggcagaggcccagtctggcactggtcagctccaggagcagaagaaaggcctgttgatagccgtatctgtttctgttgacaagattatatcccacttcggagctgcaaggaatctagtacagaaagctcagctcggcgatagtaggctgtcccccgatgtagggcacctcgttcttactaccctttgcccggctttgcacgcactagttgctgatggcctgaaacccttcagaaaagatctgattaccgggcaaagaagatctagtccttggagcgtggtggaggcgagcgttaagccagggtcttctacccggagcctgggtacgctatattcacaggtgtcacgcctcgcccctctatcatccagtcggtctagattccacgccttcatcctggggctgctgaatacaaagcagctggaactgtggttctcttcattgcaagaagacgccggaagttggtgggagcagctgactcaggctagccgcgtgtacgcctcaggcggaactgagggcttcccgttgtctcgttgggcgccaggaaggcacgggacagccgcagaagaaggcgcacaggagagacctctcccgactgacgaaatggcacccggaaggggcttgtggctaggtcggctgtttggtgtcccgggtggtccagccgaaaatgagaatggcgcactgaaatctcgtagaccatcgtcctggctgcccccaacagtatccgtgctggccctggtcaagagaggcgctcccccagagatgcccagcccccaggagctggaggccagcgctccacgcatggtacagactcacagggcagttagggccttgtgtgatcacactgctgcccgtccagaccagttatcttttcggcgtggagaagtactccgagtgatcaccacagtggatgaagattggctcagatgcggacgggatgggatggagggactcgtcccagtgggctatacctccctcgttctgtag

SEQ ID NO: 28743 - DNA, 513 bp, synthetic construct
  source 1..513: mol_type = other DNA; note = Synthetic coding sequence
atggcaagtgtcagctccgccacattctccggacacggcgcaaggagtctcctccaattcttgaggttggtggggcagttgaaacgggtgcccagaaccggatgggtgtatcgcaatgtccagaggcctgagtctgtgagcgatcacatgtaccgcatggccgttatggccatggttatcaaggacgatcgcctgaataaagaccgggaggccatgaagcaaattacgcagctgctaccagaggatctccgaaaagaactgtacgaactctgggaggagtatgagacccagtcaagtgcagaagctaagtttgtgaagcagctggatcagtgtgagatgattttgcaagcatctgagtacgaggatctggagcacaagcctggtcgattacaggatttttacgacagcacagcgggtaagttcaatcaccccgagattgtgcaactcgtgagtgaattagaggccgagagatctaccaacattgcggctgccgcaagcgaaccccattcctag

SEQ ID NO: 28744 - DNA, 396 bp, synthetic construct
  source 1..396: mol_type = other DNA; note = Synthetic coding sequence
atggaggcccaggctcagggccttctggagacagaacccttgcagggcaccgatgaggatgcagtagcttctgccgacttttcatcgatgttaagtgaggaggaaaaggaagagttaaaagctgaacttgtacaattggaggatgaaataactaccctcagacaagttctctccgccaaagaacgccacctcgtcgagatcaagcaaaaactgggaatgaacctgatgaacgagctgaagcagaatttttcaaaatcctggcatgatatgcagacaactacagcttataaaaaaacacacgagacattgagccacgccggacagaaggccaccgccgcatttagcaatgtgggcacggccatcagcaagaagttcggcgatatgcgccgaaagtag

SEQ ID NO: 28745 - DNA, 435 bp, synthetic construct
  source 1..435: mol_type = other DNA; note = Synthetic coding sequence
atggaagctcaagcccagggccttttggagaccgaacctttacaggggacagatgaggatgcggtcgctagcgccgatttttcctccatgctgtccgaggaagaaaaggaagagctgaaggcggagctcgtgcagctcgaggacgagatcactactctgcgtcaggtgttgagcgctaaagaaaggcatctggtggagatcaagcagaaacttgggatgaaccttatgaatgagcttaagcagaacttcagtaaatcttggcatgacatgcagactactacggcctacaaaaaaactcacgaaaccctgtcgcatgcagggcaaaaagctacggccgcattcagcaacgtgggcaccgccatcagtaagaaatttggggatatgtcctattcaattcgacattcaatatcaatgccagccatgagacgaaagtag

SEQ ID NO: 28746 - DNA, 948 bp, synthetic construct
  source 1..948: mol_type = other DNA; note = Synthetic coding sequence
atggcctcctgtcccgacagcgacaactcgtgggtacttgccggaagtgagtcccttcccgttgagacactaggacctgcgtctcgcatggatcccgagtcggagcgcgcactacaggctccccattcaccctctaaaactgatggcaaggagctggcagggacgatggatggtgagggtaccctgtttcagaccgaatctcctcagtctggctccatactgacagaggagactgaagttaagggtacattagaaggtgatgtttgtggcgtggagccgcctggcccaggcgataccgtagtccagggagatttgcaggagacaacggtcgtcaccggccttgggcctgatacacaggatctggagggccaatcaccacctcagtccttgcccagtacccctaaggcggcttggattagagaggaagggaggtgtagttcaagtgacgatgacacggatgtggatatggaaggtctcaggagacgaaggggcagggaggccggtccccctcaacccatggtacccctggcagtggaaaatcaggccggaggtgggctgtccgagagtgaaacagggccaatggaagaagtagaacgacaggttctgcctgacccagaggtcttggaggccgttggagatcgacaggatgggcttcgggagcagctccaggccccagtaccgcctgactccgtaccctcactccagaacatgggtctgctactggataaactcgcaaaggagaaccaggatataaggctactgcaagcccaactgcaggttgggaccggcaggagaggttgggccagggtgacccacctcggacaggcaagcgtgttggcaagttctcccaagcgcaacgtgtcgtacctgcctacacatccggaccctccactcagccactattcccagggtgtttttcccgtgttgggttcacaccctctctgctag

SEQ ID NO: 28747 - DNA, 2196 bp, synthetic construct
  source 1..2196: mol_type = other DNA; note = Synthetic coding sequence
atggccagctgcccagatagtgacaactcatgggtgctagcaggctcggagtccctgcctgtcgaaacgctcggcccagcatcgcgaatggaccctgagagcgaaagggctctccaggctcctcattcaccttctaaaacggatggcaaagagctggctggaacaatggacggcgagggaaccttatttcagactgagagcccccagtccggcagcatcttgactgaagagacagaggtcaaaggaacgctcgagggggacgtgtgtggtgtcgaaccacccggacccggtgacacagtggttcaaggcgacctccaggaaaccaccgtcgttaccggactgggacccgatactcaggatctggaggggcagtctcctccccagtctctgccttccacacccaaagccgcttggattagggaagaggggagatgttcgtcctcggacgacgacactgacgtggatatggagggacttcggagacgaaggggcagagaggcaggccctcctcaacctatggtccctcttgccgtcgaaaaccaagctggcggagaaggggctgggggagagctgggcatatcactaaacatgtgcttactgggagccctggtgctgcttgggttgggagtgctcctgtttagtggcggtcttagcgaatccgaaactggccctatggaagaggtggagaggcaggtgctgcccgaccccgaagtgctagaggccgtaggcgatcggcaggatggcttacgagagcagctccaggcaccagtccctcctgatagcgtgccatcccttcagaatatggggctcctgctggacaagctggctaaagagaatcaggacatcagactgttgcaggcccaactccaggcacagaaggaggagttgcagtctctcatgcaccagcccaagggactagaagaagagaatgcacagctgaggggtgccctacagcagggtgaggccttccagcgtgcactggagagcgagctgcagcagttaagggctcgcctccaggggctagaagcggactgcgtcaggggacccgatggcgtgtgtctgagcggtggacggggaccccagggagacaaggccatcagggagcaggggcctagagagcaagaacctgagctgagcttcctcaaacaaaaagagcagttggaggcggaggcccaggccctgcgtcaggaactcgaacgccagcgtagattactggggtctgtgcagcaagatctcgagcggtctcttcaggacgcttcgaggggtgaccctgcccatgctgggctggcagaactgggccatcggctggcacagaagctacaagggctggagaattggggccaggaccccggagtgtcagcgaatgccagcaaagcctggcatcagaaaagtcatttccagaacagtagggaatggtcaggcaaagaaaagtggtgggacggccagcgggaccgtaaagcggagcactggaaacataaaaaggaagagagtggcagggagaggaagaagaactggggtggccaggaagaccgcgaacccgctggaagatggaaggaaggacggccaagggttgaggagtccggatctaaaaaagagggaaagcgccaaggccctaaggagccaccccgaaagtcgggcagcttccacagtagcggtgaaaagcaaaagcaacccaggtggagagagggcactaaagacagtcacgatccattgccctcttgggccgagctgctaaggccaaaatacagggcccctcaaggatgcagtggagtggacgaatgcgcacgccaagaaggactcactttttttggcaccgagctggcacctgtgcgccaacaagaacttgcctctctactcaggacatatttggcccgattgccatgggctggacagctgactaaggagctgcctctcagtcctgcattttttggagaagacggaatctttcggcacgaccgccttcggttccgagattttgtcgatgccctcgaggattccctggaagaggtagcagtgcagcagaccggggacgatgacgaagttgacgacttcgaagatttcatatttagccatttcttcggggacaaggctctcaaaaagaggtccggaaagaaagataaacattctcagtcgccaagagccgcagggccacgtgaaggacactcccatagccatcatcaccaccataggggctag

SEQ ID NO: 28748 - DNA, 2109 bp, synthetic construct
  source 1..2109: mol_type = other DNA; note = Synthetic coding sequence
atggacccagagtcagagagagcgcttcaagcaccccacagtccctccaagactgacggaaaggaactggccggaaccatggatggcgaaggaactctgtttcaaactgagagccctcagtcaggatccatacttacagaggaaaccgaggtaaaggggaccttggaaggtgacgtgtgcggcgtcgaacctccaggtcctggcgacacagtagtgcagggcgacttgcaggaaacaaccgtcgtcaccggactgggcccagacacccaggacttggagggccagtcacccccacagagcttgccaagtacacctaaggccgcatggattagggaagagggcagatgcagctcatcagatgacgacacagatgtcgacatggagggtctgcgaagaaggagaggacgggaagctggacccccacagcccatggtcccactcgccgttgagaaccaggccggaggggaaggggctggtggagaactcggtatctctcttaatatgtgtctgctgggggctctcgtcttactaggcctgggagtgctccttttctctggagggctatcagaatccgaaaccgggccaatggaggaagtagagcgacaggtcctgcccgatccagaagttcttgaagctgtcggagatcgacaggacggccttagagagcagctgcaagccccagtcccaccagattcggtgcctagtttacagaacatgggtctgctactcgacaagctcgcgaaggagaaccaggacataaggctgttacaagcgcagctgcaggcccaaaaagaggagctccagtccttgatgcatcagccaaaaggcctggaggaggagaatgctcaattaagaggagcacttcagcagggggaggcattccagcgggcattggagtctgagctccaacagctgcgtgcacggctgcagggattggaggcagactgcgttcgcggtccagatggagtgtgtctgtcaggtgggagggggcctcagggagataaggcgattcgagagcaaggaccacgtgaacaggagcctgaactgtccttcctcaaacagaaggagcagctcgaggctgaggctcaggctctgcggcaagaactggaaagacagcggcgattgcttggcagtgtccagcaggatctggaaaggagtctgcaggatgcatcaaggggtgaccctgctcatgccggattagctgagctcggtcataggctcgcccagaaactgcagggccttgaaaactggggccaagatcctggagtgagcgcaaacgcaagtaaagcctggcatcagaaaagtcatttccagaattctagagaatggtcaggaaaggaaaagtggtgggatggacagcgcgacagaaaggccgagcactggaagcacaaaaaggaggaaagcggccgagaaaggaagaaaaactggggcggtcaggaggatcgcgagccagccggaaggtggaaggaaggcagaccacgcgtggaggagagcgggagtaaaaaagaagggaagcgtcaggggccaaaggaacctcccagaaagtcggggtctttccatagctccggagaaaagcagaagcagcccaggtggcgcgagggaacaaaggacagccacgatcctttgccatcctgggctgaactactgcgcccaaagtatcgagccccacaagggtgctccggggttgatgaatgtgccagacaagaagggctgactttctttggcacggagctcgcccctgtgcgacagcaagaactggcaagcctgctgaggacatacctcgccagactgccatgggccggtcagctgacaaaagagctgcctctgtctccagccttttttggtgaagacggcattttcagacacgataggctgcgcttccgggattttgtcgatgcgttggaggacagccttgaggaagtcgctgtgcagcagactggcgatgatgacgaagtggacgattttgaagacttcattttctcccactttttcggagacaaagccctaaaaaagagatctggaaagaaggataagcactctcagtcaccccgagcagccggacctcgtgaagggcattcccatagtcaccatcaccatcatcgcggttag

SEQ ID NO: 28749 - DNA, 2427 bp, synthetic construct
  source 1..2427: mol_type = other DNA; note = Synthetic coding sequence
atgatctggcgaaacaattggaagtccactacaggcagattaaacgtgaaactacagtccgataaactgcagcacggctgtgggcctgactactcctccgcctggctgcctgcaaatgagagcctttggcaggcaaccacagttccttccaatcaccggaataatcatattcggaggcattcgatcgcctcagacagcggagatacggggattggcacatcatgcagtgactccgtggaggaccactcaacttccagcgggaccctttcctttaaacccagccaatctttgatcactctccctaccgcccacgtgatgccttcaaattcctccgctagcatctccaaactgcgggagtccctgaccccagatggtagcaaatggtcaaccagcttgatgcagacccttggcaatcactcaaggggggaacaagattccagtctggatatgaaagattttagacctctacggaagtggagttccctgtcaaaactgactgcccctgataattgcggccagggcggtacagtatgtcgagaagaatcacggaatggcctcgagaagatcggcaaagctaaggccctgacttctcagctgcgcacgatcggcccttcatgtcttcatgacagtatggagatgttgagacttgaagataaagagattaacaagaagcggagctcgaccctcgattgtaaatacaagtttgagagctgcagtaaggaagatttccgggctagctctagcacactcagacggcagccagtcgacatgacttattcagcattgcccgagtccaaacccattatgacaagctcggaggcgttcgagcctccaaagtacctcatgctcggacaacaggctgtgggcggtgtacctattcaaccttcagtgagaacacagatgtggctgacagagcaactgaggaccaaccccttggagggaaggaataccgaggactcctattcactcgcaccttggcagcaacaacagattgaggatttccggcagggctcagaaacacctatgcaggtactcaccggcagttctcgccagtcctactctccaggctaccaggattttagcaagtgggagagtatgctgaagatcaaggaaggcttgttgcgtcaaaaagagatcgtgatcgaccggcagaagcaacagatcacccatctgcatgagcggatcagggacaatgagctgcgcgctcagcacgcaatgttgggccattatgtgaactgcgaggactcctacgtggccagcctccagcctcagtacgagaatacaagtttgcagactcctttttcagaggaatccgtgtctcatagtcagcagggagagttcgaacagaagttagcaagcaccgagaaagaggttctccaactgaatgagttcctgaaacagagactgtctctgttttctgaggaaaaaaagaaacttgaagagaaactcaagacacgggaccgttacatctcttcactgaaaaagaagtgtcagaaagaaagcgaacaaaacaaagagaagcagcgtcgaatcgagaccctggagaagtatctggcagacctgcctaccctggatgacgttcagtctcagtctttgcagcttcagatactcgaggaaaagaataagaatctgcaagaggcactcatcgacaccgagaaaaaactggaagaaatcaagaaacaatgccaggacaaggaaacccagctgatctgtcagaagaaaaaggaaaaggagcttgttaccacagttcaaagcctccaacaaaaggtggaacggtgtctggaggacggtattagactgcccatgttggacgctaagcaactgcagaatgagaatgacaatttacgccagcagaatgaaactgccagtaaaatcatcgattcccagcaggatgagattgaccggatgatcctcgagatacaaagcatgcagggcaagctttccaaggaaaagcttaccacacagaagatgatggaagagctggagaaaaaagagaggaatgtgcagcgtcttacgaaggcactgttggagaaccagcggcagaccgacgagacatgttccctcctggaccaggggcaagagcccgatcagtccaggcagcagacggtgctgtccaaacgccctttgttcgacctaaccgtaattgatcaactcttcaaggagatgagctgttgcttgtttgatctcaaagcactctgctctatactgaaccagcgcgctcagggtaaggagcccaatcttagccttctgttaggcatcagaagcatgaactgcagcgcagaagaaacagagaacgaccactctaccgagacacttaccaaaaaactgtctgacgtctgtcagttaagacgcgatatcgacgaactaagaactacaatcagcgatagatacgcccaggacatgggagacaactgtatcactcagtag

SEQ ID NO: 28750 - DNA, 2418 bp, synthetic construct
  source 1..2418: mol_type = other DNA; note = Synthetic coding sequence
atgtgggggagatttttggctccggaggctagcgggagggatagcccagggggtgcgagaagtttcccagcaggacccgattatagctcagcatggctgcctgccaacgaatcattgtggcaggcaacaaccgtgccttccaaccaccgcaataaccatataagaagacactccattgcatctgattcgggcgacacagggatcggcacctcctgctccgattcagtggaggatcatagtacaagctctgggacactgtcattcaaacccagccaaagccttattacacttcctaccgcccacgtgatgccctccaactcctctgcctccattagcaagctcagagagtctctcactccggacgggagcaagtggagcacatcattaatgcagaccctcggaaatcacagtcgcggagaacaagactctagcctcgatatgaaggactttcgcccactgagaaagtggtcatccctcagcaagctgaccgccccagacaattgtgggcaaggcggaactgtttgccgcgaggagagtcgcaatggtctagagaagatcggaaaagccaaggctctgacgagtcagctccggaccatcggacctagttgtttacacgactccatggagatgctacggctggaagataaagagatcaacaagaagaggagctcgaccctggactgtaaatacaaattcgaatcctgtagtaaagaggattttagggcctcctcctccaccctccggcgacagcccgtggacatgacttattccgccctccccgagagtaagcccattatgacaagctcggaggccttcgagccccctaagtacttgatgctgggtcaacaagccgtcgggggtgtccccatccagccatctgtgagaactcagatgtggttgacggaacagctaagaacgaaccccctagagggcagaaacacggaggatagttattcacttgcaccctggcagcagcagcagatcgaggactttaggcaggggagcgagacaccaatgcaggtccttaccggaagttctcgacagtcctactctccaggctaccaggattttagtaagtgggagtcaatgctgaagattaaagagggactcctgcgccagaaggaaattgtcattgatcgccagaaacaacagattactcatcttcatgaacgcataagagacaatgaactgagagctcagcacgccatgctcggacattatgttaattgcgaggatagctacgtcgcttcactgcaaccccagtacgaaaacacaagtctgcagactcccttttcggaggagtcagtttctcacagtcagcaaggcgagttcgagcagaagctggcaagtacggaaaaggaagtcttgcagctaaacgagtttctgaagcaacgcctttctctgttttcagaggaaaaaaagaagctggaagagaagctgaaaacaagggacaggtacatcagcagcttaaaaaagaagtgtcagaaagaatccgaacagaacaaagagaagcagaggagaattgagacgctggaaaaatatctggcagatctcccaaccctggatgatgtccagagtcagagcctccagctgcagatactggaagagaagaataaaaacctccaggaagcattgatcgacacagagaaaaagttggaagaaatcaagaaacagtgccaggataaagaaacacagctgatctgccagaaaaagaaagagaaagagctggtgacaaccgtgcagtcactccagcagaaggtggaacgttgcctggaggatggcattcgcctgcctatgttagacgcaaaacagctgcagaatgagaacgacaaccttagacaacaaaacgagacagctagcaagatcattgactcgcagcaggatgagattgaccgcatgatcctggagatccagtcgatgcaggggaagttgtcaaaagaaaagctgaccacccagaaaatgatggaagaacttgagaagaaagagcgtaacgtccagcgcctcactaaagcactccttgagaatcagagacaaacagatgaaacgtgcagcctgctggaccagggtcaggaacccgaccaatcacgacaacagaccgtcttatcaaaacggcctctcttcgatctgacagtcattgatcaactgttcaaggagatgtcctgctgcctatttgacttgaaggcactgtgtagcattctgaaccagagggcacagggaaaggagcccaacttatccctgttactagggatccgctctatgaactgctcagctgaggagactgaaaacgaccacagtacagagacgttaacaaaaaagctgtcagatgtctgtcagttgaggcgggacatcgacgaacttagaacaaccatttccgaccgctatgctcaggatatgggcgacaattgtattacccagtag

SEQ ID NO: 28751 - DNA, 1488 bp, synthetic construct
  source 1..1488: mol_type = other DNA; note = Synthetic coding sequence
atggtggaagaacacgaactgagaaaggagcggatacaggaggactataatgacaaatattgggatcaacggtacaccattgtgcagcagcagattccatcctttcttcagaagatggccgacaagatcctatcaacaggaaagtatctgaatgttgtaagggaatgtggccatgatgtgacatgccccgtggccaaggagatcatttataccttaaaagagcgtgcctacgtagagcaaattgaaaaagcttttaattatgctagtaaagttctgcttgatttcctgatggaggaaaaggagctggttgcccatttacggagtatcaaacggtacttcctcatggaccagggagacttttttgtgcattttatggacctcgcagaggaagagctgaggaagcctgttgaagacataaccccgccaaggttagaagcactgctggagctggctcttcgaatgtcaactgctaacactgacccattcaaggacgatttaaaaatcgatctgatgccccacgatttaatcacccagttactgcgcgtgctcgctatcgagactaaacaggaaaaggcaatggcgcatgcagatccaaccgaactcgctttatcgggtctagaagcatttagttttgactatatcgtaaagtggcccctgtctcttatcattaatcgcaaagctttgactcggtaccagatgttatttaggcacatgttttattgcaagcatgttgagcgccaattgtgttccgtgtggatcagtaacaaaaccgccaaacagcactcccttcattccgcccagtggttcgccggtgctttcacactaaggcagaggatgcttaacttcgtgcagaacatccagtactatatgatgttcgaggtgatggagccaacctggcacatcctggagaaaaacctaaagagtgcttctaatatagacgacgtcctgggccatcacacaggattcttagacacgtgcttgaaggattgcatgttaaccaatccagaactgctgaaagtttttagcaagctgatgtctgtgtgtgtaatgtttaccaattgtatgcagaaattcacccagtcaatgaagctggacggcgagctcgggggacagaccttggagcattccactgtcttaggcctgcccgctggcgctgaagagcgtgcgagaaaggaactggctcgtaagcacctcgctgagcacgctgatactgtgcaactggtctcggggttcgaggccactattaacaagtttgataagaatttctctgcgcatttactggacttactggcacggctctccatatacagtacctcagactgtgaacacgggatggcttcagtgatctctcgcctggatttcaacgggttctacactgagcgcctggaacggctgagtgcggagcgctcacagaaggctaccccgcaggttcccgtgctgagggggcctccagctccagcccctagagtcgcagttacggctcaatag

SEQ ID NO: 28752 - DNA, 2709 bp, synthetic construct
  source 1..2709: mol_type = other DNA; note = Synthetic coding sequence
atgtccgagttcagaattcaccacgacgttaatgaactgttgagtcttctgagggtccatgggggagatggcgcagaggtgtacattgacctgctgcagaagaaccgaacaccatacgtgaccaccacagtgagtgctcatagcgcgaaagtcaagattgcagagttctcaagaacccctgaggactttctcaaaaaatacgacgagctcaagtccaagaacaccagaaatctcgatccactcgtctacttgctctccaaactgaccgaggacaaggaaacactgcaatatttgcagcagaacgcgaaggaaagagccgaactggcagccgcagctgttggtagttccactacaagcataaatgtgcccgcagctgcatccaaaatcagcatgcaggagttggaggagctgcggaaacagctgggatccgtggcaaccgggtctaccttacagcagtcgcttgaacttaaacgcaagatgcttcgagacaaacaaaataagaagaattccggccagcatttgcctatctttccggcatgggtatatgagcggcctgctcttattggcgacttcttgatcggggcaggcatttcaactgacaccgccctgcctatcggaacattgcccttggcgtctcaagagtcagcagtcgtcgaggatctgctgtatgttctagttggagtggatggacggtatgtgtctgcacagcccctggccggtaggcagtcaaggacgttcctggtggatcctaacctcgatctctctattcgggagcttgtacatcggatcctcccagtcgccgcaagttactccgcagtgactagatttattgaggagaaaagtagtttcgagtatgggcaggtgaaccacgcacttgccgctgcaatgaggaccctcgtcaaggaacatctgatcttggtctcacagctggaacagctgcatcgacagggtctcctgagcttgcagaagctgtggttttatattcagccagctatgaggaccatggacattctagctagtcttgcaacaagtgtggacaaaggagagtgccttggcggttccaccctgtccctgttgcatgacagatcttttagttacacgggcgactcgcaagctcaggaactgtgcctctaccttaccaaagccgcttccgctccctatttcgaggtgctggagaagtggatctaccgagggatcattcacgacccttattctgagttcatggtggaggagcatgaactgaggaaggaacgcatacaggaggattacaacgacaaatactgggaccaacgatacaccatagttcagcaacaaataccatcatttctgcagaagatggcagacaagatccttagtaccggaaagtatctcaatgtggttagagagtgcgggcatgatgttacttgccctgttgcaaaggaaatcatttacacactcaaagaaagggcctacgtcgaacaaatagaaaaagcgttcaattacgcctccaaagtgctgttggactttctcatggaagaaaaggagttagtcgctcatctgaggtccattaagagatattttctcatggatcagggggatttttttgtgcatttcatggatctggctgaggaagagttgcgtaaaccagtggaggacattacccctccgcgtcttgaggccctgctggagctggcattgaggatgagtaccgccaatacagatccttttaaagatgatcttaagatcgatctgatgccccacgacctcatcacgcagctgcttagggtcctggccattgaaaccaagcaagagaaagccatggcccacgctgacccaacagagcttgcactgtcagggctagaagcattctcctttgattacatagtgaagtggcccctatctctgattatcaaccggaaggcactcacacgatatcagatgctgtttaggcacatgttctactgtaagcacgtggagcgacaactgtgctccgtgtggatctctaacaaaaccgcaaagcagcatagcctgcattctgcccagtggtttgcgggtgctttcacactgaggcagagaatgctgaacttcgtgcaaaacattcagtattatatgatgttcgaagtcatggagccgacctggcacatcttggaaaagaatctgaaatcagccagtaacattgacgatgttctgggccaccatacagggtttctcgatacctgtctgaaggattgtatgctcaccaaccccgaacttcttaaagtgttctcaaagctcatgtctgtatgtgtcatgttcaccaattgcatgcaaaagttcacacaaagcatgaagctggacggagagctgggagggcagacattggagcacagcactgtgctgggtctgccagcaggagcagaagagcgggcacgaaaagagttagcacggaagcatttggcggaacatgccgacacagtgcagctcgtgtccgggttcgaagccactatcaataagttcgataagaatttcagtgcccatctactcgacttgttggcacggctcagcatatactcaaccagcgactgcgagcatggaatggcttccgtgatttcacgcctcgactttaacggcttttatacagaacgtctcgaaaggctcagtgccgagcggtcgcagaaggctacaccacaggttccagtccttcggggacctcccgctcctgcccctcgggttgccgttacggctcagtag

SEQ ID NO: 28753 - DNA, 1620 bp, synthetic construct
  source 1..1620: mol_type = other DNA; note = Synthetic coding sequence
atggatgcaatggcgtcacctggaaaggataattacagaatgaaatcctacaaaaataaagccttgaatccccaagaaatgagaagaaggagagaagaagaaggaatacagctgcgcaaacagaagcgcgaggagcaactttttaaacggagaaatgtctatttacctagaaacgatgaaagcatgcttgagagccccattcaggatcccgacatttcgagcactgtccccattccagaggaggaggtggtgaccaccgacatggtgcagatgatcttttccaacaatgctgaccagcagctcaccgcgactcagaagtttcgcaaactgctgagtaaagagcccaaccctcctattgatcaggtgatacaaaaacccggagtggtacagagattcgtgaagttccttgagcgcaacgaaaactgtactctacagttcgaggccgcttgggccctgactaatatcgcatccggaacattcctgcacacgaaggtcgtcatcgagactggagcagtcccaatatttatcaagctcctgaattctgaacacgaggacgtacaagagcaagcagtgtgggcactgggtaacatcgccggagataacgcggagtgtcgggatttcgtactaaattgtgaaatcctcccacccctcctggaactactgacaaattcaaaccgtttgacgacgacacgcaatgccgtgtgggcgctctcaaatctgtgcaggggcaagaatcctccgccaaacttctcaaaagtttcgccatgcctaaatgtgctgtctcggctcctgttttcgtccgatcccgatgtgctggccgatgtttgttgggctttgtcctatcttagcgatggacccaacgataaaatccaggccgtgatcgattcaggcgtctgcagacggctggttgagctcctgatgcataacgattataaggtagtgtctcctgcactccgggcagtagggaatattgtgaccggcgatgatatccagacccaggtgatcctcaactgcagcgcactcccatgcctactgcaccttttatcatcccccaaagagtccatcagaaaggaagcctgttggacagtgagtaacatcacggcgggaaatagagcacagatccaagctgtgatcgatgcgaacatatttccggttttgatcgagatcctgcaaaaagccgaatttaggacacggaaagaagcagcctgggccatcacgaacgccaccagcggcggaacacctgaacagatcaggtatctcgtggcgcttggatgtattaagccgctctgtgatctgttgactgtcatggacagcaaaatcgtacaagtagccctgaatggcctggagaatatccttcgcctcggcgagcaggagtctaaacagaacggaattggcatcaatccctactgcgcacttattgaggaggcctacggcttagataagatagaatttctccagagtcacgaaaaccaggaaatataccagaaggccttcgacctgatcgaacactacttcggtgtagaggaagacgacccatcaattgttccacaggtggatgaaaaccagcagcaattcatttttcagcaacaggaagctcctatggatgggtttcaattatag

SEQ ID NO: 28754 - DNA, 453 bp, synthetic construct
  source 1..453: mol_type = other DNA; note = Synthetic coding sequence
atgcgtggagaccggggacggggaagagggggacgtttcggcagtagaggaggtcctggcggtgggttccgcccttttgtacctcacattcccttcgatttctatctctgtgaaatggcctttcccagagtcaagcccgctcccgacgaaacctcattcagcgaagccctgcttaaaagaaatcaggatctcgctcctaactccgctgaacaagcctcaatcctgtcactggtgacaaaaatcaacaatgtgatcgataacttgattgtagctcctggaacatttgaagtccagattgaggaagttaggcaagtaggcagctacaagaaaggtaccatgacaaccggacacaacgtcgcggaccttgtcgttatcttgaagattctcccgacttgtgagtgcgcttgcttctggtcttgggagcagaacattgcactcggcctgggggtttag

SEQ ID NO: 28755 - DNA, 348 bp, synthetic construct
  source 1..348: mol_type = other DNA; note = Synthetic coding sequence
atggcatttccacgagtaaagcccgctcctgatgagacgagttttagtgaggcactccttaagcgaaaccaagacctcgcccctaattctgccgagcaggcctccatcctcagtctggttacgaaaataaataatgttatagataacctgatcgtggcccctgggacgtttgaggtgcagatagaggaggtaaggcaggtcggaagttataagaagggcactatgacaaccggccacaacgtggcggatctcgtggttatcctaaaaatcttgcccaccctggaggcagtggccgcacttggcaataaagtggtggaaagcttgagggcacaggatccctccgaatag

SEQ ID NO: 28756 - DNA, 312 bp, synthetic construct
  source 1..312: mol_type = other DNA; note = Synthetic coding sequence
atgtctgattgttacaccgaattagaaaaggccgtaattgtcctcgtggagaatttctataaatacgtgtctaagtacagcttggtaaaaaataaaattagtaaatctagcttccgcgagatgctgcagaaggagctgaatcacatgctaagtgacactggcaatcgaaaggctgccgataagctgatccagaatctggatgccaaccacgatggcaggataagttttgatgaatactggactctcataggagggataacaggcccaattgcaaagttaatccacgaacaggaacagcaatccagttcctag

SEQ ID NO: 28757 - DNA, 312 bp, synthetic construct
  source 1..312: mol_type = other DNA; note = Synthetic coding sequence
atgagcgactgttataccgaacttgagaaggccgttatagtgctggtggagaatttctacaaatatgtctccaagtatagccttgttaagaacaaaatttcaaagagttcattcagggagatgctgcaaaaagagcttaatcacatgctctctgatacgggtaaccgaaaagctgccgataaactcattcagaacctagacgccaaccacgatggccgtattagcttcgatgagtactggacactgattggaggcatcacagggccaatcgccaagttaatccatgagcaagaacagcagtccagcagctag

SEQ ID NO: 28758 - DNA, 312 bp, synthetic construct
  source 1..312: mol_type = other DNA; note = Synthetic coding sequence
atgtcggactgctatactgagctggaaaaagccgtgattgtgctggttgaaaacttttataaatatgtcagtaaatattccctcgtcaagaacaaaattagcaagagtagttttcgggagatgctccaaaaggaactgaaccacatgctttcagatacgggcaatcgcaaggcagccgacaaactgatacagaacctggacgctaaccacgacggcaggatttcctttgatgagtactggacactcatcggagggattaccggacctatcgccaagcttatccatgaacaggagcagcagtctagtagctag

SEQ ID NO: 28759 - DNA, 312 bp, synthetic construct
  source 1..312: mol_type = other DNA; note = Synthetic coding sequence
atgtcagactgttatacagaactcgaaaaagcagtgatcgtgcttgtggagaacttttacaagtatgtgtcaaagtactccctagtgaagaacaaaatatcaaaatcatcctttagggaaatgctccaaaaggaactgaaccacatgctgtccgacacgggtaaccggaaggccgcagataagttaattcagaacctcgacgctaaccatgatggtagaatctcctttgacgaatattggactctgataggtggcattaccgggcctattgccaaactcatacacgagcaagaacagcagtcaagctcttag

SEQ ID NO: 28760 - DNA, 306 bp, synthetic construct
  source 1..306: mol_type = other DNA; note = Synthetic coding sequence
atgagcaatacacaggctgagcgcagcatcatcggaatgatcgatatgttccataaatatacaggcagggacggaaaaatagagaaaccttcactgttaactatgatgaaagagaacttccccaatttcctttccgcatgtgacaagaaggggatccattacttagcaaccgttttcgagaagaaggacaagaacgaggacaagaagatagacttttctgagtttcttagcctcctgggggacatagctgctgactatcacaagcagtcacacggggcagctccttgttcaggcggatcacagtag

SEQ ID NO: 28761 - DNA, 306 bp, synthetic construct
  source 1..306: mol_type = other DNA; note = Synthetic coding sequence
atgagcaatacacaggctgagagatccatcattggaatgattgacatgttccacaaatacactgggcgagacgggaaaattgagaaaccctctttgcttacaatgatgaaggaaaacttcccaaactttttgtctgcctgcgataagaaaggcatacattatctagccaccgtgtttgaaaagaaagataaaaatgaggacaagaaaattgatttttccgaatttctgtcattactgggcgatatagcggctgactatcataaacaatcgcacggcgcagctccatgctcaggaggatcacaatag

SEQ ID NO: 28762 - DNA, 222 bp, synthetic construct
  source 1..222: mol_type = other DNA; note = Synthetic coding sequence
atgtcctaccaacagcagcagtgtaagcaaccctgtcagcctccccctgtgtgccccacacccaaatgccccgagccttgcccacccccaaaatgtccggaaccttacctacctcctccctgccctccagagcactgcccccctcctccgtgtcaggataagtgcccacccgtgcagccttaccccccttgtcaacagaaatacccgcctaagtccaagtag

SEQ ID NO: 28763 - DNA, 219 bp, synthetic construct
  source 1..219: mol_type = other DNA; note = Synthetic coding sequence
atgagttaccaacagcaacagtgtaagcagccatgccagccccctcccgtgtgcccgaccccgaagtgcccggagccttgcccaccgccaaagtgcccggaaccgtgcccgccacccaaatgccctcagccctgcccaccgcagcagtgtcagcaaaagtgcccccctgttaccccgtccccaccctgccagccgaaatgccccccaaaaagtaagtag

SEQ ID NO: 28764 - DNA, 219 bp, synthetic construct
  source 1..219: mol_type = other DNA; note = Synthetic coding sequence
atgtcataccagcaacagcaatgcaagcagccttgccagcctccacctgtgtgccctaccccaaagtgtccagagccgtgcccaccccctaaatgccctgagccttgtccacctcctaagtgcccgcagccatgtcctccccagcagtgtcagcagaagtgcccacctgtcaccccaagccctccttgccaacctaagtgccctcctaagtcgaagtag

SEQ ID NO: 28765 - DNA, 219 bp, synthetic construct
  source 1..219: mol_type = other DNA; note = Synthetic coding sequence
atgtcgtaccagcagcagcagtgcaaacaaccttgccagccgccacccgtttgccccacgcccaagtgcccagaaccatgtcccccacctaagtgcccggaaccctgcccctcacctaagtgccctcagccctgcccacctcagcagtgtcagcaaaaatatcccccagttaccccatcccctccttgccagcccaagtgtcctccaaagagcaaatag

SEQ ID NO: 28766 - DNA, 219 bp, synthetic construct
  source 1..219: mol_type = other DNA; note = Synthetic coding sequence
atgagctatcagcaacagcagtgcaagcaaccgtgtcagcccccaccagtatgtcctactcccaagtgcccagagccctgtccgcctccaaaatgccctgaaccttgcccatctccaaagtgtccgcaaccatgtcccccacagcagtgtcagcaaaagtaccccccagtgaccccatccccaccatgtcagcctaagtgcccacctaagagtaaatag

SEQ ID NO: 28767 - DNA, 219 bp, synthetic construct
  source 1..219: mol_type = other DNA; note = Synthetic coding sequence
atgagttaccagcagcaacaatgtaagcagccctgccagcctccccctgtttgccccactccaaagtgtccggagccatgcccaccccctaaatgcccagaaccctgcccaagccccaagtgtccacaaccatgtcctccacaacagtgtcagcaaaaatacccgccagtgacaccctcacctccgtgccagcctaaatgtcctccaaaatccaagtag

SEQ ID NO: 28768 - DNA, 8552 bp, synthetic construct
  source 1..8552: mol_type = other DNA; note = Synthetic coding sequence
atgcctaaactgctgcaaggggtgatcacagtaatcgatgtcttctaccaatatgcaacccagcatggtgagtatgatacgctgaataaagccgagctgaaggagctgctcgagaacgagtttcatcagattctgaagaaccctaacgatccagacactgtggatataatcctgcaaagtttagatagggatcataacaaaaaagttgacttcaccgaatacctcctgatgattttcaagcttgttcaagcaagaaataagataatcggcaaggactactgtcaggtgtctggcagtaagctcagagacgacactcaccaacatcaggaggagcaggaagagaccgagaaggaggaaaataagaggcaggagagtagcttttcccactcttcctggagtgctggagagaatgactcctatagcaggaacgtgcgcggatcgttgaagcctgggaccgagagcatctccaggcggctatcctttcagcgggatttcagcggccagcataacagctatagtgggcagagctctagttacggggaacagaacagcgattctcatcaaagtagcggtcgtgggcagtgcgggagtggcagtgggcagtctcctaactacggtcaacatggctctggctccggtcagtcatccagtaatgacacacacggcagcggatcaggccaatccagcgggttctcacaacataagagttccagcgggcagtcctccggatatagtcagcacggcagcggcagcggacactcttctggatacggtcagcatggatcacgctccggccagtcgtctagaggggagcgccaccgcagctctagcgggtctagctcctcatacggacagcacgggagcggctctaggcaatcattaggacacggcagacaagggtcagggtcccggcaatcgcccagccacgttcgccacggatctgggtccggacactccagctcccacggacagcatgggagtggctcctcatactcctatagccggggacactatgagtctggtagcggacagacgagtgggttcggacagcatgagagcggcagcgggcagtcttcgggatattcaaagcacggatctggcagcggtcactcatcttcccagggccagcatggctcaacctctgggcaagcgagtagttccggccagcacggtagcagcagtagacagagttcgtcatacggccaacacgaaagcgcttcaaggcactcttcaggcagaggacaacacagttcaggcagcgggcagagccctgggcacggtcaacgtggctccggcagcggacagtctccatctagtggccagcatggtacaggtttcgggaggtcaagctcctcaggaccatatgtgagcggctcgggttactcatctgggttcgggcaccacgaaagttctagtgagcattcatccgggtacactcagcatggctcagggtccggacacagctcaggccatggacagcacgggtcacgctcaggacagtcctcacgcggagagcgtcagggatcttctgctggctcttcctcctcctatggccaacatggctccggatctcgccagtccttaggtcactccaggcatgggagcggctcaggacagtcccccagtcctagtcggggacgtcatgagtccggatccaggcaatcctccagctacggcccacatggctatgggagcggacgaagttcttcacggggtccttacgagagcggcagcggacattcgtctggtttggggcatcaggaaagcaggtccggtcaatcttcaggatatggccagcatggttcttcttccggtcactcttctacacacggccagcacggcagcacatcagggcagtcctccagctgtggacagcacggcgctacatcgggccagtcatcctcccacggacaacacggaagcggaagctcacaaagcagtagatatggccagcagggctctgggagcggtcagagtccatcacgcggacgtcacggcagtgatttcggccattctagctcttacgggcagcacggctcaggatccggctggtctagcagcaatggaccacatggatctgtgagcgggcaatctagcggattcgggcacaagagtggctccggacagagtagcggctatagtcagcacggcagcgggtcttcacacagttccggctatagaaagcacggtagcaggtccggtcaatcctcaagaagcgagcagcacggatcctcttccgggcttagctctagctacgggcagcacgggagtggatcccaccagagctcaggacacggcagacagggatccgggtccggtcacagtccatctcgggtgaggcacggctcttcatccggccactcttccagccatggacaacacggcagcggcacaagctgcagtagctcctgtggtcactatgaaagcgggagcggccaggcttccggctttggtcagcatgagagcgggtccggccagggttatagccagcacggatccgcgtccggtcacttctccagccagggccgacatggctccacctccggccagagcagctcgtctggtcagcacgattcatccagcggtcaatcctcgtcgtatggccagcacgagtcagcatcacaccacgcatctgggaggggccgacacgggagcggttccggccaatcacctgggcacggccaacgtggctcgggaagcggacagagcccttcttacgggcgacacggcagtggctcagggaggagcagctcaagcggcagacatgggtccggctctggtcagtcaagcggcttcgggcacaagagctccagtggccagtcgtcggggtacacccaacacggttccgggtcggggcactcttcttcttatgaacagcatggcagcagatctggacagagtagcaggtcagaacagcatggatcctcctccgggtcctctagttcctatggacaacacggtagtggctcgagacaatctctcgggcacggccagcatggaagtgggtccggacagagcccctctccgagccggggaagacacggaagtgggtccggccaatcaagctcctacgggccataccggagcggctccggctggtcgagctctcggggaccgtatgagagtggaagcggccattcttccggacttggtcatcgcgaaagtaggagtggtcagtcgagcggatatggccagcacgggtccagcagcggccactctagcacccatggccagcacgggtcaactagtgggcagtcttcaagctgcggacaacacggagcctcatccgggcagtcaagcagccacggccagcacggctctggatcatcccagtcctctggatacggcaggcagggttctggctcagggcagagccccggacacgggcagagaggctctggctctagacagagtccatcttacgggcgacacggcagtggcagcggtcgcagcagcagtagcggccagcacggatctggcctcggcgaaagctccggctttggacaccacgaaagctcctccggtcagtcatcctcctacagtcagcatgggtctggcagcggtcacagttccggatacgggcagcacggttcacggtccggtcagtcaagcaggggggaaagacacggtagttcttcgggcagctccagtcactacggtcagcatggatccggttcccggcagagctcgggccatggcagacaaggcagtgggagcggacattccccgtcaaggggcaggcacggtagtgggttaggccactcttcctcacatggccaacacggctcaggatctggaagaagtagtagccgcggtccatatgaatcgcgttctgggcattcgtccgtgtttggccagcacgaatccggctccggacacagctcagcttactcccagcacgggagcgggtcgggccatttctgcagtcaaggccaacatggatcaacaagcgggcagtcttcaactttcgatcaggaaggcagtagcactggtcagagctcgtcctacggacaccgagggagcggctctagccagagctctggatatggacgccatggcgcaggttctggacagagcccaagccgcggtcgccacggttccggctccggtcatagctcatcctacggccagcacggaagtggtagcggctggtcttcctcgagcggcagacacggaagtggttcgggccagtcgtccgggtttgggcaccacgagtctagttcatggcagtcgtcaggttgcacgcaacacgggtccggctctggccattcaagttcatacgagcagcatggctcccgttccggccaaagctctaggggtgagaggcacgggtcatcaagcggcagttcttcaagctacggccagcatggctcaggctcccggcaaagtttgggacacggccagcatggtagcggctcgggtcagtcaccttcaccatctcgcggtaggcatggaagcgggtctggccaatcaagtagttacagcccttatggatccggctcaggctggagcagttcccggggaccctacgagtccggcagttcgcacagtagcggcctgggtcacagggagagccgttctggacaaagctctggttacggccaacatggatcaagctccggtcactcatcaacccacggacaacatggctctacctctggacaaagtagctcttgcggacagcatggcgcttcaagtgggcaaagttcgagccacggacagcatgggtccgggtcatctcagtcaagcggttacggcaggcaaggcagcggcagcggccagtcccctggacatggacagcggggatccgggagtcgccagagtccttcctatggaaggcacggttcaggttcaggacggtctagcagcagtggccagcacggatctggactgggggagtcctccgggttcgggcatcatgagagtagtagcggccaatcaagctcgtatagccagcatggcagtgggagcggacacagctccgggtatggccagcacggctcccgctccggacagtcgagtaggggtgagcgccacgggtcatcttcacggtcatccagcagatacggacagcatggctcaggtagccggcagtccagcggacacgggcgtcagggtagtggctctgggcaatcgccttcccgtggacgacacggatccggcctggggcactcatcctcccacggacaacacgggtctgggtccggtagatcttcttcgagaggcccatatgagagcagatctggacactcctcggtgtttgggcagcacgagtccggatcaggacactcatcagcatactcacagcacggttctgggagcggccacttctgttcccagggtcagcacggcagtaccagcggccagtcttcaacatttgaccaggaaggatcctccaccggtcagagctcatctcacggacaacacgggtcgggtagctcccaaagctctagttatgggcaacagggttctgggagcggccaaagtccttcaaggggccgtcacggcagcggctccggacactccagctcatacggtcagcacgggagtggctccggctggtcttcatccagtggtcggcacggatctggatccggacaatccagcggcttcggtcatcatgagtcaagttcctggcagagctccgggtacactcaacatgggtccgggtctggacattcctcttcctatgagcaacatggctctcggtcggggcaaagttcccgtggggagcagcacggatcctccagtggcagtagcagctcgtacgggcagcacggatccgggagtaggcagtctctcggacacggacaacatggttcagggagcggacagtccccaagtccttcccgtgggcgacacgggtcaggttctgggcagagcagcagttacggcccttatggctctggaagtggttggtcaagtagcagaggaccttacgagagcgggagcggacattcttctggacttggccaccgggagtcaagaagcggacagtccagtgggtacggtcagcacggatcctccagcggccatagctctacacacggacagcacggatccgctagcggtcagagttctagttgcgggcagcatggagcatcctctggccagtcatcgtcccacggacagcacgggagtggctccagtcaatcctccggttatggcagacagggaagcggctctggacagtcccccggtcacggccagcgagggtctggcagccgtcagtcgccaagctacgggagacatggcagcggcagcgggagaagctcctcatctggccagcacggcccaggcctgggcgaaagtagcggatttggccaccacgaaagctcttcaggtcaatcatcttcatactcccagcacggcagcggcagcggccacagttccggatacggacaacatgggtcccggagtggccagagttcacgaggcgaaagacatggcagctccagcggaagcagcagtaggtacggccagcacggctccggcagcagacagagttctgggcacggacggcagggatctggatcgggccattcaccctctcgcggaagacatgggagcggcagtggccactcgagcagccatggccaacacggcagtgggagcgggagatctagtagccggggaccgtacgaatcccgtagtggtcattccagcgtgtttggccagcatgaatcaggaagtggccattcttcggcttattcgcaacatggcagtggcagcgggcatttctgtagtcagggccaacatgggtctacctcaggacaatcttccactttcgatcaggaagggtctagtactggtcagtcatcatctcatggccaacacggttctggctcatcccagagctctagctatgggcagcagggctcgggctcggggcagtctccctcacgaggccgtcatggaagcgggagtggccattccagctcctacgggcagcatggatcgggctcgggctggagttcttcaagtggccgtcacggatcgggcagcggccagtcaagcggatttggacatcacgagtcatcatcctggcagtccagtgggtacacccagcatggcagcgggagcggacattcaagcagctatgaacagcacggaagtaggtctgggcagtcaagtagaggggagcggcacgggtcttcctccggctccagtagctcctacggccagcatggatccggaagccgccagtctctgggtcacggacaacatggctctgggagcggacagagcccgtcgccatctcgcggtagacacggctccggatccggtcaatcgagctcatattctccgtacggcagcggaagtgggtggtccagctctcgagggccatatgaaagcggctcaggtcacagtagcgggcttgggcatagggagtcaaggtcaggccagagttcgggttacggacaacacggttccagctccgggcattcttcaacccacggacagcatgggagcacttccggccagagctcgagctgcgggcagcatggggcaagcagcggccagagcagctctcacggccaacatggttcgggctctagccagtcaagtggctatggtaggcaggggtccggctcaggccaatctcctggccatggtcagcggggatcaggaagccgacagtctccctcatacggaagacacggctcgggatccggaagatcttcatccagcggccagcacggttctggacttggcgagtcctcaggcttcggtcaccacgagtcatccagtggacagagttccagctattcacagcatggttccggttcaggtcatagctctggatacggtcagcacggttcaaggtcaggtcagagtagcagaggagagagacacggatcttcctctggatcctctagccattacggacaacatggctcggggagcaggcaatcctcagggcacggacggcaagggtcagggtcagggcagagcccctcacgagggcgtcacggctctggcttgggtcacagcagttcgcacggccagcacggctcgggctcgggaaggtcttcttctcggggaccctatgaaagccggctaggtcatagcagtgtcttcggccagcatgagagcgggagtgggcactcttccgcctacagccagcacgggagcggttctggccatttttgtagtcaaggccagcatgggtccacttctggtcaaagctcaacatttgatcaggagggatctagtaccggacagtcatctagctatgggcacaggggctcaggttcttcccaatcctccggctatggacgtcatggggctgggagcggccagtctctctcacacggcaggcatggatccggctccggccagagcagcagttacggacagcacggcagtggctctggccagtcctcagggtattcacaacatggctccggtagcggccaggacggatatagctattgtaagggtggcagcaatcatgacgggggatcctccggctcgtattttctgtcatttccttcctcaacttctccttacgagtacgtccaagaacagaggtgctacttctaccagta

SEQ ID NO: 28769 - DNA, 876 bp, synthetic construct
  source 1..876: mol_type = other DNA; note = Synthetic coding sequence
atgagtagtggtgccgatgggggtgggggagccgctgtcgccgctcgatctgacaagggttccccaggtgaagacggatttgtgccttccgcccttgggacccgcgagcactgggatgctgtttatgagcgcgagctgcagacctttcgggagtacggagatactggagagatttggtttggagaagaaagtatgaaccgccttatccggtggatgcaaaaacacaagatccccctggatgccagcgtgttggatattggcacaggcaatggcgtgttcctggtggaactggccaagtttggattcagtaatatcactggtatagactactctccctctgctattcagctgtctggctctatcatcgagaaggagggactctctaacattaagctcaaggtggaggattttctgaatttgtccacacagctctccgggttccatatatgcatcgacaagggaacttttgatgccatcagcctgaaccccgataatgctattgaaaagcgcaaacagtacgtgaagtccctaagcagggttctgaaggtgaagggtttcttcctgatcacttcttgtaattggacgaaggaggagctcctcaacgaattttctgaaggttggtcaactgtggccggtttctggctgactgccgctcttacctcatgggcccaagccatcttcagtaccagcgcgtcccgggtaggaggcacaaccgggactcatcaccacgcctggatcatctttgttttcctcgctgagacacggttctgccacgtggtgcaggccggattagagctgttgggtagctcggactctccaacgtggccgccaaaggtgctgggactgtatcacgcgagaccgagtctggcattctag

SEQ ID NO: 28770 - DNA, 633 bp, synthetic construct
  source 1..633: mol_type = other DNA; note = Synthetic coding sequence
atggcgccatggggcaagcggctggctggggtgcgtggagtgcttctcgacatttccggcgttctttacgattcaggcgcaggcggagggactgctatcgccggtagtgttgaggccgtggccagactgaaacgaagcaggctgaaagttagattttgtacgaatgaaagccaaaaatccagggccgaacttgtgggacagctacagaggctcgggttcgatatctcggaacaagaagtcacagcaccagcccctgccgcttgccagatactaaaggagcaaggattgcgaccatatctgctcattcacgacggggtgcggagcgagttcgaccaaattgatacttctaaccccaattgcgtcgtgattgctgacgccggagaatccttttcatatcagaacatgaataatgcgtttcaggtgctcatggagctggagaagcccgttttgattagcttgggcaagggtaggtactataaagagacatccgggcttatgctggatgtgggcccatacatgaaggccctcgaatatgcctgcggcatcaaagccgaagtggtcggaaagccctccccggagttcttcaagtccgcacttcaggctataggtgtggaagcccaccaagctcaatag

SEQ ID NO: 28771 - DNA, 813 bp, synthetic construct
  source 1..813: mol_type = other DNA; note = Synthetic coding sequence
atggccccttgggggaagcggctggcaggcgttaggggagtgctgctcgacataagcggagtgctgtacgacagtggagccggaggcggaactgcaattgctggtagcgtagaggcggtggcacgtctcaaaagatcccggctgaaggtacgattctgcacaaatgagagccaaaagtccagggctgagctggtaggtcaactgcaacggcttggtttcgatatctctgagcaggaggtcaccgccccagcgcctgccgcttgccagatcctcaaggagcagggattacgcccttaccttttgattcatgatggggtccggtccgaatttgatcagatcgatacgagcaatcctaactgcgttgtgatcgccgacgcgggtgagtcattttcctatcagaacatgaataacgcctttcaggtcctcatggagctcgagaagcctgtgctcatttcactgggaaagggtaggtattataaagagactagtgggttaatgctggatgtgggcccttatatgaaagcgctcgagtacgcttgcggaatcaaggctgaggtggtgggcaagccttcacccgagttctttaaatcagccttgcaagctatcggcgtggaagctcatcaggcagtgatgatcggggacgacatcgtgggcgacgtgggaggggctcagcggtgcggcatgagggcgctgcaggtccgtactggcaaatttagacctagcgacgaacaccatcccgaagtgaaggccgacggttacgtagataatctcgccgaggctgtggatctcttactgcagcacgctgataagtag

SEQ ID NO: 28772 - DNA, 3948 bp, synthetic construct
  source 1..3948: mol_type = other DNA; note = Synthetic coding sequence
atggccgataccgacctgttcatggagtgcgaggaggaggaactggaaccttggcagaagatctctgacgtcatcgaagactccgtcgtcgaggactataactccgtggacaagacaaccacagttagtgtcagccaacagccggtaagcgcccctgtgcctatcgcagctcatgcctccgtggctgggcacctttcaacatccacgaccgtcagcagctctggcgctcagaacagtgattcaacaaagaaaacattagtgacactcatcgctaataataacgcacccggtactcaatttgtaaagcccaccgtgggggtgccacaagtcttttctcaaatgacaccggtcaggcccggttctaccatgcccgtgcgtcccacaacaaacacatttacaacggtaatccctgcgaccttaaccattagatccaccgtgccgcagagtcagtcccagcagacaaagagtaccccgagcacatccaccacccccactgccactcagcccaccagcctgggacagctcgcggtccaatcccccggacagtctaatcagacgaccaaccccaaattagcgccttcctttccttcccccccagctgtgagcatcgccagttttgtgaccgtaaagcgacccggtgtgacaggagagaatagcaacgaggtcgccaaactcgtgaacactctaaacactatacctagcttgggtcagagccccggtcctgtggtggtcagtaacaatagcagcgcgcacggttcacagcgtacatctgggccagaatccagtatgaaggttacctcttctattccagtgtttgaccttcaggatggcggacgcaagatctgccctcgctgtaatgctcagtttagggtcaccgaggcattgcggggacacatgtgctattgctgtcccgaaatggtggaataccagaagaaaggcaaaagtctggacagcgagccttccgtcccaagcgccgctaaacccccaagccccgaaaagaccgctcccgttgcgtcaaccccttccagcactcctatcccagctcttagtccccctactaaggtgcccgagcctaatgagaacgtgggagacgccgtccaaactaaactcattatgctggttgatgatttctattatgggagggacggcggtaaggttgctcagctgactaacttcccaaaggtagcaacctcgttcagatgccctcactgcactaagaggctgaagaacaacattcggtttatgaatcacatgaaacaccatgttgagctggatcaacagaatggagaagtggatgggcatacaatttgtcagcattgctacaggcagttttccactcctttccagttgcaatgccatctggagaatgttcattccccttatgaatccacaacaaagtgcaaaatctgtgagtgggcgttcgagtcggagcccctgttcctccagcacatgaaggacactcataagccaggcgagatgccgtacgtttgccaggtttgtcaatacagaagttccctctattctgaggtggatgtccactttcgcatgattcatgaggacaccaggcacttattgtgtccgtactgcctgaaagtgttcaagaacggaaacgcctttcagcaacattacatgcgccaccagaagcgaaatgtttatcattgcaacaagtgcaggctgcagttcttgtttgcgaaagataagatcgaacacaagttacaacaccataaaacattcaggaagcctaagcagctggaggggctgaaacccggaactaaggttacgatccgcgcttccagaggccagccaaggaccgttcccgtaagctctaacgacacacctccctcagcactgcaagaggcggctcccttgacatcatctatggatcctctgcccgtgtttttatacccgcctgtccagaggtctatacagaaacgggctgtgcgcaaaatgagcgttatgggcaggcaaacatgtctggagtgctcttttgagatcccagattttcccaaccactttccaacctacgttcattgttctctttgtagatacagcacctgctgtagccgagcgtatgctaaccacatgataaataaccacgtgccccgaaaatcgcccaagtatctggccttgtttaaaaactcagtctccggaatcaaactggcatgcacctcttgcaccttcgtgacctccgtcggagacgcaatggcgaagcacctcgtttttaatccctcacaccggtcatccagcattctacctagaggcctgacttggatcgcgcacagccggcacgggcagacacgagatagagtccacgatagaaacgtcaaaaacatgtacccccctcctagcttccctactaataaggccgcaaccgtcaagagcgctggcgctacccccgctgagccagaagagttacttactcctttggcccctgcactcccttcgcccgcttccacagcaacacctcccccaactcccacccaccctcaagctctcgctttaccacctctggccactgaaggcgcagaatgccttaatgtcgatgaccaggacgaaggaagcccggtcacacaggaacctgagctcgcttctgggggtggcggttccgggggtgtcgggaaaaaggagcagttgtccgttaaaaaactgcgagttgtactctttgctctttgctgcaatacagaacaggccgcagaacatttcaggaaccctcagagacggattcgtaggtggctgcgcagattccaagccagtcagggtgagaacctggaggggaagtatctcagctttgaggctgaggagaagctcgccgaatgggtactgactcagagagaacagcagctgccagttaatgaggagaccctctttcaaaaagctaccaaaatcgggcgtagcctggagggcggattcaaaattagctacgaatgggccgtgcgattcatgcttcgacaccatttgactccgcacgcgaggcgcgcagtagctcataccctcccgaaggatgttgccgagaacgctggattgtttattgacttcgtgcagcggcagatccataatcaggatctgcccctgagcatgatcgtcgccatagacgaaatttccttatttttagatacagaagtcctctcttccgacgatagaaaggagaacgctctccaaactgtgggcactggtgagccatggtgtgacgttgtgctggcaatcctggcggacggaactgtgttgcctaccctggtattttacagaggacagatggatcaaccggctaatatgcctgactccattctgttggaggccaaggagtctggctattctgacgacgaaatcatggaactctggtctacacgagtctggcagaagcatacggcatgtcagcgctcaaagggcatgctcgtgatggattgtcaccggactcacttgagtgaagaagttctcgcaatgctgtctgctagttccacgctgcctgccgtggtccctgctgggtgctcgagcaagattcagccgctggacgtctgcattaaaagaactgttaagaacttcctgcataaaaaatggaaagaacaggcccgagagatggcagacacagcctgcgattccgacgtgcttctgcagctcgtgctggtctggctgggagaagtgcttggagtgattggggactgcccagaattggttcagcggtccttcctggttgcgtcggtgctcccaggaccagacggaaacattaattcacccacacgcaatgccgatatgcaggaggaactgatagcctctctagaggagcagctcaagttgagcggagagcacagcgagtctagcactcctcgtcccaggagttcccccgaggagaccatcgagcccgagagtctccatcagctatttgagggagagagcgagacggagagcttctatggtttcgaggaagcagacttggatctgatggagatctag

SEQ ID NO: 28773 - DNA, 2406 bp, synthetic construct
  source 1..2406: mol_type = other DNA; note = Synthetic coding sequence
atgggggataccgtcgtggagcccgctccactaaagcccacctccgagcctacaagcggacctcccggtaacaatggcggaagtctgctgagtgtcatcaccgaaggcgttggagagctatccgtgattgacccagaggtggcccaaaaggcctgtcaggaggttctggaaaaagtgaaactccttcacgggggagttgccgttagcagccgcggtacaccccttgagctagtgaacggcgacggtgtggacagcgaaatcaggtgtctggatgacccccctgctcagatcagggaagaggaagacgagatgggtgctgctgtggccagtggtacggcaaagggcgctcggcgacgcaggcagaacaactctgcgaagcagagctggttgttacggttgtttgagagcaaattgttcgacatctcgatggccatctcctacctgtacaattccaaggagcccggtgtgcaggcatacattggcaatcgcctcttctgtttccggaatgaggatgttgacttttatttgcctcagctcctgaatatgtatatacatatggacgaggatgttggggacgcgattaaaccctatatagtgcatagatgccgccagtctattaacttttcattgcagtgcgccttattactaggggcatactctagtgatatgcacatctccacccagagacacagccgtgggactaaactccgcaagttgattttgtcagatgagctaaagcctgcccatcgcaagagggagctgccctccctttcccctgctcccgataccggcttaagtccctctaagagaacacatcaaagatcaaagagcgatgctaccgcaagtatctcattgagcagcaatcttaagagaacagccagcaaccccaaggtggagaatgaagacgagcctgttcggttggccccagaacgagaatttattaagtcacttatggcaatcgggaagcggcttgctacactgccgaccaaggagcagaagacccagcgcctgatttccgagctcagcctgcttaaccacaagttgccagcccgtgtatggttgcccaccgccggattcgaccaccatgtcgtcagagtgcctcatacccaggctgttgtgcttaacagtaaggataaagcaccttatttgatttacgtggaggtgcttgaatgcgaaaattttgacacaacatcagtgcctgcacggatccctgagaatcggatacgctcaaccaggtcagtggagaatttgccagagtgcgggattacacatgagcagagagccggaagcttttccacggtgccaaattatgacaacgacgacgaggcttggtctgtagacgacattggtgaactgcaggtggagctgcccgaagtgcatacaaattcctgtgataacatttctcaattcagtgtcgatagtatcacgtcccaagagtcgaaggaaccggtgttcatagccgctggggatataagacggagattatcggagcagctggcccatacccccactgcgtttaagcgtgatccggaagaccctagcgctgttgcactgaaggagccttggcaagaaaaagtccgtcgaattcgggaaggcagtccctatggccatctgcctaactggaggttactgagtgtcatcgtcaaatgcggagacgacctgagacaggaattgctagccttccaagtactgaagcaactgcaatccatctgggagcaggagagagtcccactgtggattaagccatacaaaattcttgtgatctctgcggattcgggtatgatcgaaccagttgttaatgctgtgagcatccaccaggttaaaaagcagtcgcaactaagcctgctcgattactttctgcaggaacacggttcttacaccaccgaggctttcctgtcagcccagagaaattttgtgcagtcttgtgccggatactgcctggtgtgctatctcctgcaggtcaaagataggcataacggaaatattctgctggacgccgagggtcacatcatccatatcgacttcgggttcattctgtcctcttcacccaggaaccttggcttcgaaacctcagcatttaaactgacaaccgagttcgtggatgtgatggggggtctggatggagatatgttcaactattacaaaatgctgatgctgcaggggctgatcgctgcacggaaacatatggataaggtggtgcagatcgtggagatcatgcaacaggggtcacagctgccatgttttcatggatcttccaccattaggaacttgaaggaaaggtttcacatgagcatgaccgaagagcaactgcagctgctcgttgagcagatggtggatggcagtatgcggagcatcacaaccaagctctatgacgggtttcagtacttgaccaacggtattatgtag

SEQ ID NO: 28774 - DNA, 2451 bp, synthetic construct
  source 1..2451: mol_type = other DNA; note = Synthetic coding sequence
atgggtgacactgtcgttgagccagcacctcttaaacccacatccgaaccaacctctggaccccctgggaataatgggggaagtctactttctgtaatcaccgaaggggtgggagagctgtcggtaatcgacccagaagtcgctcagaaggcctgccaggaagtgctagaaaaagtaaagttgcttcatggcggtgttgctgtgtcatcgagaggcacacctctagaacttgttaacggcgatggggtggattccgagataagatgccttgacgacccccctgcccaaattagagaagaagaggatgaaatgggtgcggcagtggcctccggcactgcgaagggggcacgccgtcgacgccaaaataacagcgctaagcagtcatggctgttgcgcctgtttgaatcaaaactgtttgacatttccatggctatcagctacctgtacaacagcaaagagcctggagttcaggcatacatagggaatcgactattctgctttcgaaacgaagacgttgatttttacttacctcagttactgaacatgtatatacatatggacgaagatgtaggggatgcaattaagccctacattgtacaccgctgtcgacagagtatcaactttagtctgcagtgtgccctgctgctgggcgcatattctagtgacatgcacataagcacccaacgtcactcaagaggcactaagctcagaaagcttatcttgtctgatgagttaaaacctgcccaccgtaaacgcgagttacccagtctttctcctgccccagacactggcctgtctccgtcgaaacgcacccaccagcggagtaagtcagacgctacagcctctatctctctgagtagcaatttgaagcgcaccgcgagcaatcccaaagtggagaatgaagatgaagaacttagctctagcactgagtccattgacaactctttcagtagtcccgtgcggctggcaccggagcgggagttcatcaagagtctgatggccattggaaagcggctagcaactctccccactaaggaacaaaagactcagcggttgatatcagaattgtcactgcttaaccacaagcttccagcacgagtgtggttgccgacagcgggatttgatcaccacgtggttagggtgcctcatacccaggccgttgtgctgaattccaaggataaggcaccttacctcatttacgtggaggtcctcgagtgcgagaacttcgacacaacctcagtccctgcccgaatccccgagaaccgaatccgctccaccagaagcgtcgagaacctgcctgaatgcggaatcacacacgaacagagagctggctcatttagcactgtgcctaactacgataatgatgatgaagcctggtcagtcgacgacataggcgaacttcaggtggaattgccagaggtgcatacaaattcctgcgacaacatcagccagtttagtgtggattctatcacgtctcaggagtctaaagagcctgtgttcattgccgcaggcgacatcagaaggagacttagcgaacaactcgcgcacacacccacagccttcaagcgagacccagaagaccccagcgccgtggccttgaaggaaccttggcaggagaaggtacggagaatacgggagggctctccgtacggccacctgcccaattggcgcctgctcagcgtcatcgtcaagtgcggcgatgatctaagacaggaacttctggcattccaggtgctcaagcagctccagtctatttgggaacaggaacgggtacccctatggatcaaaccttataagattctcgtaattagcgctgactccggtatgatcgaacctgttgtcaatgcagtttcgatacatcaggtgaagaaacagtcccagctgagtctccttgattatttcttgcaggagcacggcagctacaccaccgaggccttcctgtctgcccagagaaatttcgtgcagtcttgtgcgggatattgcctcgtctgttatcttttgcaggttaaagaccgacataatggtaatatactcctggatgccgagggccacataatccatatcgattttggcttcatcctgagttcatctccacgcaatctgggattcgaaacatctgcttttaagttgactaccgaattcgtagacgttatgggcggactggatggcgatatgttcaattactacaagatgctgatgctccagggtctgatcgccgctcggaagcatatggataaagtagtccagattgtggagatcatgcagcagggtagccagctgccctgttttcacggaagctcgactatccgaaatctgaaggagcgcttccatatgtcgatgacagaggaacagctgcagttgttagtggaacagatggtagatgggtccatgcggtccatcaccaccaagctgtacgacggattccagtatctcactaacggcatcatgtag

SEQ ID NO: 28775 - DNA, 2406 bp, synthetic construct
  source 1..2406: mol_type = other DNA; note = Synthetic coding sequence
atgggggataccgtggtggagccagctccacttaaacctacgagtgagcctacctcaggaccacccggtaacaatggaggttcccttttgagcgttattaccgagggcgtgggcgaactctccgtgatagatccggaggtcgcccagaaagcctgccaggaagttctggagaaagtgaaattgctgcatggaggggtggccgtctcatcaagagggactccgctggaattagtcaatggtgacggcgttgactctgagatccgctgtcttgatgaccctcctgctcaaattagggaggaagaggatgaaatgggggcagccgttgcaagcggtaccgcaaagggcgcacggaggagacggcagaacaattcggcaaagcagtcttggctcctaaggttgtttgaatccaagttatttgatatttcaatggctatctcttatctgtacaacagcaaggagcccggagtccaggcatatatcggcaatcgactgttttgctttcgtaacgaggacgtggatttctacttaccgcaattgcttaatatgtacattcacatggacgaggacgtgggagatgcgattaagccttatatagtccatcggtgtcggcagtctatcaatttctcactccagtgtgcgctgctactcggggcatacagttctgatatgcatattagcactcagcgccattctaggggcacgaaattgcggaagctaattcttagcgatgaacttaaaccagctcatagaaagcgcgagctgccatcattaagtccagcccctgacacagggctgagcccttctaaaagaacgcatcagcggtccaagtccgatgccacggcttctatttcactctcatctaatttaaaacggacagccagcaaccctaaagtggagaatgaagacgaaccagttaggctggctccagaacgggagtttattaaatctttgatggccattgggaaacgcctcgctacactgcccactaaagaacagaagactcagagactgatttccgaactgtctctgctaaatcataaacttcctgcccgagtgtggctaccaacggcaggcttcgaccatcatgtggtgcgggtgccccacactcaggccgtcgtcctcaatagcaaggacaaggccccatatctgatttacgtggaggtgctcgagtgcgagaattttgataccaccagtgtccctgcacggatccccgaaaaccggattcgttcaactaggtcagttgagaatcttccggagtgcggcattacccacgagcagagagccggttcctttagtacggttccgaattacgacaacgacgacgaggcgtggtctgtggatgacattggggagttgcaggttgagctgccggaggtacacactaactcttgcgacaatatctctcagttttctgtggactctattacctcacaggaatctaaggagcccgttttcattgcggcaggcgacattcgtagaaggctgtcagagcaactggcccatactcctacagccttcaaacgagatcccgaagatccttcagcagtagctctcaaggagccgtggcaggagaaagtgaggagaataagggagggcagcccttatggacatctcccaaactggagactgctgtcagtgattgtcaagtgcggagacgatttgaggcaggaactgcttgcctttcaagtcctaaagcagttacagtctatatgggagcaagagagagtccctctgtggataaaaccgtacaagattctggtaatcagcgccgattctggcatgatcgagccggtggtgaatgccgtgtcaatccatcaagtgaaaaagcagtcacagctgagcctgctcgactactttttgcaggagcatggcagctatacgaccgaagccttcttgtccgcacagcggaattttgtacagtcgtgtgccggatactgtctagtatgctatcttttgcaggtcaaggacagacataatgggaatatcctgcttgacgccgagggtcatataattcatattgacttcggcttcatcctaagtagctctccgagaaatctgggttttgagacctctgcctttaaactgacaaccgagtttgtggacgtgatggggggtttggatggcgacatgtttaactactacaagatgctgatgcttcagggacttatcgcggcacgcaagcacatggacaaggtggttcagattgtcgaaatcatgcagcagggctcccagctgccttgctttcacggcagtagtaccatcaggaacctcaaggaaaggtttcatatgagcatgaccgaggagcagttgcagttgttagttgagcaaatggtcgacggctctatgaggtctattactacaaaactgtatgacggctttcagtatttgactaacggcataatgtag

SEQ ID NO: 28776 - DNA, 2487 bp, synthetic construct
  source 1..2487: mol_type = other DNA; note = Synthetic coding sequence
atgcgcttcctggaggccaggagcttggctgtggccatgggcgacaccgtggtggagccggctcccttaaagcccacttcagagccaacgagtggtccaccgggaaataacggtggcagtctgctgagcgttatcacggaaggcgtgggggagttgtcagtaattgatccagaggtcgcccagaaggcatgtcaggaggtgcttgagaaggtgaaactgttacatggcggagtcgctgtgtccagtcggggtacccctctggaactcgtcaatggggacggagtggactcagagatccgctgtttggacgacccacccgctcagattcgggaggaggaagacgagatgggggcagccgtggcaagtggtactgccaaaggcgctaggcgcagaagacagaacaattctgccaaacagtcttggcttctgcgattgttcgagtctaagctgtttgacatcagcatggctatcagctatctgtacaatagcaaagaacccggtgttcaagcatatatcggcaacaggctgttctgctttcggaacgaggacgtcgacttttacctgccccagcttctcaacatgtacatacatatggatgaagatgtgggcgacgccatcaaaccatatattgttcaccggtgccggcagtctataaacttcagcctccaatgcgctctccttttgggtgcttatagctccgatatgcacatctctactcaacgccattcacgaggtacaaagcttcgcaagcttatattgagcgacgagctgaaacccgcacaccgaaagcgggaattgccatctttgagccctgcgcctgacactgggctgagccccagcaagaggacccatcagaggagcaaatctgatgccacagccagcatcagcctctcctcaaacctcaaacgcactgcctctaacccaaaggtagaaaacgaggatgaggaactgtcatcctccacagagagcattgataattcattcagtagcccagtacgtctggcgccagagcgcgagttcattaagtccctgatggccattggcaagagactcgcgacactgcctactaaggaacaaaaaacccagagacttataagtgagttgtccctcctgaaccacaaactgccagcaagggtgtggctgccaacagcaggttttgatcatcatgttgtgcgagtgccccacacccaggccgtggttctgaattcaaaagataaagccccatatctgatttacgtggaggtcctggaatgcgagaactttgacactacttccgtacccgcaagaattcccgagaaccggattagaagcactcggtccgtcgagaaccttcctgagtgcgggattacccatgaacaacgcgcaggctcgttctcgaccgtgcccaattatgataacgacgacgaggcgtggtcagtagatgacatcggcgaactccaagtggagctgcctgaggttcataccaacagctgtgacaacatatcacagttctccgtcgattccatcacctcccaggagagtaaggagccagtgttcattgcagccggtgatattcggcgtagactgtcagaacagcttgcacatacccccacagcctttaaaagggacccagaagacccatccgccgtggcgttgaaggagccttggcaggagaaggtaagaagaatcagggagggcagtccctatggccatctgcctaactggcggctgctgagcgtgattgttaaatgtggggacgacttacggcaggagttattggccttccaagtcttgaagcagctccagtctatctgggagcaagaacgggtgcccctgtggatcaaaccctataaaatcctggtgatttctgccgattccgggatgattgaacccgtggttaatgccgtatcgattcaccaggtaaagaaacaatcacagctgtctctgttagactactttctgcaggagcatgggtcttatacgacagaggcctttttgagtgctcagcgaaatttcgtccagagctgcgccggatattgtttggtgtgttacctcttgcaggtaaaagatcgccacaacggaaacattttgctagatgctgaagggcatattatacacatagactttggtttcatcctgagctcttctcctcgcaacctcgggtttgaaacctcggctttcaaattgacaacagagtttgttgacgtcatgggcggtctggatggagacatgttcaactactacaagatgctcatgctacagggcctgatcgccgcacgcaagcacatggataaggtcgtgcagatagtagagataatgcagcagggctcccagttaccttgtttccacggatccagcaccatccgtaatctgaaggagcgattccacatgagcatgacagaggaacagctgcaactgctcgttgagcagatggtcgacgggtctatgcggtcgatcacgaccaaactgtacgatgggttccaatatctaaccaacggcatcatgtag

SEQ ID NO: 28777 - DNA, 1143 bp, synthetic construct
  source 1..1143: mol_type = other DNA; note = Synthetic coding sequence
atggtgcttgagagcacaatggtctgtgttgataattcggaatacatgaggaatggcgattttctgcctactagactgcaggctcagcaggacgccgtgaatatcgtttgccacagcaaaactcggagtaatcctgagaataatgtggggctcatcacactggcgaacgactgtgaagttctgactactttgacacctgacacgggcagaatcttgtccaagcttcatactgttcagcctaaaggaaaaataaccttctgtaccggcattagggtggcccatctggccctgaagcaccgccagggcaagaatcataagatgaggatcatcgcgtttgtggggagccccgtggaagataacgaaaaggatctagttaaactcgctaaaagactgaagaaagaaaaagtcaacgtcgacataattaacttcggcgaagaagaggtcaatacagagaagctcactgcttttgttaacacactaaacgggaaggatggcaccggttctcatttagtgacagtcccgccaggtccaagtttggctgacgctctgataagttcccccatactggctggcgagggcggagcaatgcttgggctcggggcaagtgacttcgaattcggggtggacccatccgccgatccagaactggctctggctttgcgcgtttccatggaggaacagcgccagcgccaggaggaggaagctcggagggcagctgccgcatcagctgcggaggcaggcatagctaccacggggaccgaaggtgaacgcgatagcgacgacgcacttctgaagatgactatttctcagcaggaattcggtcgcacaggtttacctgaccttagctctatgacggaggaggagcaaatagcctatgctatgcagatgagcctgcagggcgctgaattcggacaggccgagtctgcagatattgatgcgtcttcagcgatggacacgtctgagcccgcaaaggaagaggacgactacgacgtgatgcaagaccccgagtttctccagagtgtgcttgaaaatcttcccggagttgaccccaataatgaggctattaggaatgcgatgggcagtctggcaagtcaggcgacgaaggacgggaagaaagacaagaaggaggaggacaaaaagtag

SEQ ID NO: 28778 - DNA, 1134 bp, synthetic construct
  source 1..1134: mol_type = other DNA; note = Synthetic coding sequence
atggtgctggaatctacaatggtctgcgttgataattccgaatatatgcgtaacggggacttcttgcccacccgactgcaggcccagcaggacgccgtgaatatcgtctgccattccaagacacgcagtaacccggagaataatgtcggactgatcacgctcgccaatgactgcgaggtgctgaccaccctgacaccagatactgggcgtatcttatccaagctgcataccgtgcagccgaaaggcaagattactttttgcaccgggatccgggtcgcgcacctggctctgaaacaccgacaaggaaaaaaccacaaaatgaggattattgcttttgtggggtcccccgttgaggataacgagaaggacttagtgaagctggctaaacggctgaagaaggaaaaggtaaatgttgacataattaatttcggtgaggaggaagtaaatactgaaaagctgaccgcatttgttaacacactaaacggcaaggacggcaccggctcccacctcgtgaccgtgccacccggaccaagcctggccgacgctctgatctcttcacctatactggctggagaaggcggagctatgctgggcctcggcgcatctgactttgagtttggggtcgatccctcagctgatccagagttagcccttgcattacgtgtgagcatggaggaacagcgccaaaggcaggaggaggaggccagacgcgcagcggctgccagcgccgcagaggctggcattgccacaaccgggacggaggatagcgatgatgccttactcaagatgacgatctctcagcaggaatttggcagaactggcttgccggacctgtccagcatgactgaagaggaacaaatcgcctatgctatgcagatgtcactgcaaggggcagagtttggtcaggcagagagcgcagatatcgacgcttcttctgctatggacacctctgaaccagctaaggaagaagacgactatgatgtgatgcaagaccctgagtttctgcagagcgtgcttgagaatttgccaggagtggaccccaacaatgaggccatcaggaacgcaatgggatcgctggccagccaagctaccaaagacggaaagaaggacaagaaagaggaggataaaaaatag

SEQ ID NO: 28779 - DNA, 933 bp, synthetic construct
  source 1..933: mol_type = other DNA; note = Synthetic coding sequence
atgagaccagctagacactgggagacgaggttcggcgcacgggattttggaggatttcaggactgcttctttcgcgaccgactcatggatacggcacgcatcgccgtggtcggggctggcgttgtcggactgagtaccgccgtgtgcattagtaagttggtcccgcgttgctctgtgactatcatatcagataagtttactcccgataccaccagcgacgtggctgccggtatgttaatcccacatacatatcctgacacaccaattcacacacaaaagcagtggtttagagaaacgtttaatcatctgtttgccatcgccaactcagccgaagccggtgacgctggagtgcacctcgtcagcgggatcaagggtagcggcggatggaccctgaccaggagaattgaggacctgtgggagttgcacccctctttcgatattgtcgttaactgtagcggtctcggaagtcggcaactggcaggcgacagcaagatcttccctgtcaggggtcaggtcttacaagtacaggccccttgggtggaacatttcataagggacggctcaggactcacatacatctaccctggaacatcacacgtgacactcggcggtacaaggcagaaaggcgattggaacttgtccccggatgcagaaaatagtcgggaaatcctttccagatgctgcgctttggagcctagcttgcatggggcatgtaacatccgcgaaaaggtgggcctcaggccttatcgacccggagtacggctgcagactgagttgctggctcgcgatgggcagcgactgccagtggtgcaccactacggacacgggtccggcggtatctccgtgcactgggggactgcactagaggcggcaagactggtaagcgagtgtgtacacgccctcagaacaccaattccgaaatccaacctctag

SEQ ID NO: 28780 - DNA, 1110 bp, synthetic construct
  source 1..1110: mol_type = other DNA; note = Synthetic coding sequence
atgcgccctgcaagacactgggaaacccggttcggagcgagggatttcggaggattccaggattgcttctttagggaccgcctgatggatacagcacgaattgccgtggtgggtgccggagttgtgggactgagtacagccgtgtgcattagcaaacttgtgccccgttgcagcgtgacaatcattagcgataagttcacgcctgataccacctcagatgttgccgctgggatgctcattccccacacatacccagatacacctatccacacccagaaacaatggttccgcgaaaccttcaaccaccttttcgccatcgcgaattccgcagaagccggtgacgccggagtgcacttagtctctggatggcaaatatttcagtccaccccgacagaggaggttcccttctgggcggacgtcgttctgggcttccgtaaaatgacggaggccgagctgaagaaattcccccagtatgttttcggtcaagcctttactacactgaaatgtgagtgtccggcttacctgccgtggctggagaagcgcatcaagggaagcgggggttggacattgacgcggcgtatcgaggacctgtgggaactccacccttcattcgatattgttgtgaactgctctggcctcggatctaggcagctggcaggcgattccaagatcttccctgtgaggggccaggttctgcaggtgcaggctccatgggtggaacactttattcgggatggcagtggtctgacatatatatacccgggaaccagccatgtgacgttgggtggcacccgtcagaagggcgactggaatctgtcacctgatgcagaaaacagccgcgaaatcctgtctcgatgttgtgctctcgagccttccctccacggcgcttgtaatatcagggagaaggtggggcttcggccttacaggccaggtgtcagattgcagactgagttactggcaagggatgggcaacggctacccgtagtccaccattacggccacggatcggggggaatttctgtgcattggggcaccgctctggaggcggctaggctcgtgtctgaatgtgtgcacgctttaaggacaccgataccaaaatcgaacctgtag

SEQ ID NO: 28781 - DNA, 1026 bp, synthetic construct
  source 1..1026: mol_type = other DNA; note = Synthetic coding sequence
atggacaccgcgcgtattgctgtcgtaggagcaggggttgtcgggctgtctacagcagtgtgcatctctaaactggtacccagatgcagtgtgaccataatctctgacaagtttacgccagatactacatcagatgtggccgctggaatgcttatcccacatacttaccccgacacacctatccatacccagaagcagtggttccgcgaaaccttcaatcacctgttcgccatcgctaattctgccgaggctggagatgccggtgttcacttagtgagcggctggcagatatttcagtctacacctaccgaagaagtgccgttctgggcagatgtcgtgctaggcttccgtaaaatgacagaagctgagctgaagaaatttccccagtacgtgttcgggcaggctttcacaaccctcaagtgcgaatgccctgcctacctgccgtggcttgagaagagaattaagggaagtggcggttggaccttgacccgacgcatcgaagacctgtgggagctccatccttcattcgatattgtagtgaactgcagcgggctgggatcccggcagctggcaggggacagcaagatttttccagtccggggacaggtgttacaggtgcaggcgccttgggtggagcattttattcgtgacggatcaggactgacatacatatacccaggtaccagccatgtgacactgggaggaacacgccagaagggagactggaacttgagccctgatgcggagaatagcagggagattttgagtcggtgctgtgccctcgaaccatccttacacggagcctgcaatataagggaaaaagttggcctgaggccgtacagaccgggtgtgcgtctgcagaccgaacttcttgctcgggacggtcagcgccttcctgtggtgcatcactacgggcatggctccggcggtatctcagtccactggggaacagcacttgaagctgcaaggctagtttccgagtgtgtccacgcccttagaacccccattccaaaaagtaacctctag

SEQ ID NO: 28782 - DNA, 1074 bp, synthetic construct
  source 1..1074: mol_type = other DNA; note = Synthetic coding sequence
atggggacaattcaggaggctggcaaaaagaccgacgtaggcgtgagagaaatcgccgaggccccagaactaggcgctgccctcaggcatggtgagctggagcttaaggaggagtggcaggacgaggagttccctcgactcttacccgaggaagctggcacttccgaagacccagaggatccaaaaggagatagccaggccgctgcaggcacccccagcaccttggcgttatgtggacagcggcctatgagaaaacgcctcagtgcccctgagttgcgactgtctttaaccaaaggacctggtaatgatggagcatccccgacacagtccgcccctagtagcccggacgggtcctcagacctggagattgacgagctggagacacccagcgattcagaacagctggactccggtcacgagttcgagtgggaggatgaactgcccagagccgaaggactgggaacgtctgaaacggccgagaggctcggcagaggatgtatgtgggatgttacgggcgaagacggacaccactggagagtgttccgtatgggccctcgcgagcagagggtcgacatgactgtcatagagccctataaaaaggtgctatcgcacggtgggtaccacggtgacggccttaacgccgtgatactgtttgcttcctgctacctcccacggtcgagcattcccaattacacttacgttatggagcatctcttccgctacatggtcggcaccctcgagttgctagtggccgaaaactatctactcgtgcacctttctggaggaacaagccgcgctcaggtgccaccactttcttggattagacagtgctatcgaacgttagacaggagacttagaaaaaacctcagagcactagtcgttgtacacgctacctggtacgtgaaggctttcctcgccctcctacgaccgttcatatctagtaagtttactcgaaagattcgatttttggattccctaggcgagttggcacagctcatcagcctggatcaggtgcacatacctgaggccgtccgccaacttgaccgcgacttgcacggaagtggtggcacttag

SEQ ID NO: 28783 - DNA, 1269 bp, synthetic construct
  source 1..1269: mol_type = other DNA; note = Synthetic coding sequence
atgcttaagttcctcgcaaagggcgaggttccaaaaggctcatgcgaggacgagccgatggactctaccatggatgacgctgtggccggagattttgccctcatcaataaattagatatacagtgcgacctcaagactctgagcgacgacataaaggaatctctagagagcgaaggtaaaaacagtaagaaggaggagcctcaggaacttttgcagagtcaagactttgtaggcgagaagctcggatccggcgagccttcacactcagtcaaggtgcacacagtgccaaaacctggcaaaggagccgatttaagcaagcccccttgtcggaaggctaaggagattcgcaaggagaggaaaaggctcaagctgatgcagcagaaccctgccggagaacttgaaggttttcaggcccagggccatcccccttcccttttccctcctaaagctaagagcaaccagccgaagtctctggaggacctgatttttgagtctctgccagaaaatgcaagtcacaagctcgaggttcgcctggtgccagtgtcctttgaggaccccgagttcaaatcctctttctcccagtcttttagcctgtatgttaagtatcaggtggctatccatcaggatccacctgatgagtgtggtaaaaccgaatttaccagattcctatgttcatctccactggaagccgagactcctcctaacggccctgattgcgggtatggcagctttcaccagcagtactggctcgatggcaagatcatcgccgttggagtgattgatatccttcccaactgtgttagctcagtatatttgtattacgatcccgactactcgttcctgtcactgggtgtttattctgcactgcgggagatcgccttcaccagacagttgcacgaaaagacgagccaactttcttattactatatgggcttctacatccatagctgtcccaaaatgaagtacaagggccagtatcgacccagcgatctgctgtgccctgagacatacgtgtgggtgccgatcgagcaatgtttacctagcctggagaatagcaagtattgtcggttcaaccaggaccccgaggccgtggatgaggatcgcagcaccgagcccgataggctgcaagtgttccataaacgggcaatcatgccttatggcgtatataaaaaacaacagaaggatccctccgaggaggcagctgtgctgcaatatgcctcattggtgggccagaagtgctctgaaagaatgctgttgtttcggaattag

SEQ ID NO: 28784 - DNA, 1557 bp, synthetic construct
  source 1..1557: mol_type = other DNA; note = Synthetic coding sequence
atggccttctgggcaggagggtcccctagtgtggttgattacttcccatctgaggacttttatcgatgtggttattgcaaaaacgagtcaggttcacgctctaacggcatgtgggcccattccatgaccgtgcaagattatcaggacctcatcgaccgcggatggcggagaagcggtaagtacgtatataaaccagtaatgaaccagacttgctgcccccagtacacgattcggtgccggcctctgcaatttcaacctagtaagtcccacaagaaagttttaaaaaagatgttaaaattccttgccaaaggagaagtgcccaaaggttcatgtgaagacgaacctatggatagcactatggatgacgccgtcgccggtgattttgctctcattaataagctcgatattcaatgtgatctgaaaacactctccgatgacataaaggaaagtttggagagcgaggggaagaattcgaagaaggaggagccccaggagctgctgcaatcccaggattttgtaggagagaaactgggctccggggagccatcccattcagttaaagtgcataccgtgcctaagccaggcaaaggagccgacctgtcaaagcccccttgtcgcaaggcgaaggaaataagaaaagagcggaagagactgaagttgatgcagcaaaacccggctggagagctggaagggtttcaagcacaaggtcaccctccaagcctttttcctcccaaagctaaaagcaatcagcctaagtctctggaggacctaatcttcgagagcctgccggaaaacgcctcacataaactcgaagtccgactggtacccgtctcatttgaagaccctgaattcaagtcctcattctcccaatccttcagtctctacgtcaaatatcaagtggctattcatcaggacccgcctgatgagtgcggcaaaacagaattcactagatttttgtgtagctcccccttggaagccgaaactccccctaatggacccgattgtggctatggcagctttcaccagcaatactggctcgatggaaaaattatcgctgttggcgtgatcgacatactgccaaattgtgtgtcctctgtgtacctctattacgatccagactacagctttctgtctcttggcgtgtacagcgctttgcgcgagatcgcgttcacacgccagctgcacgagaagacttcgcagcttagctattactatatgggtttttatatccatagctgccctaagatgaagtacaagggacagtataggcccagcgacctgctctgcccggagacgtatgtgtgggtgccgatcgagcagtgcttaccatctctcgagaatagcaagtactgtcggttcaaccaagatcctgaagccgtggatgaggatcggagcacagaacctgaccggctgcaagtgtttcataaacgggctatcatgccatacggcgtgtataaaaagcagcagaaggatcccagcgaggaggccgcagtgttgcagtacgcaagcttagtgggccagaagtgtagtgaaagaatgctcctgttccgtaactag

SEQ ID NO: 28785 - DNA, 3003 bp, synthetic construct
  source 1..3003: mol_type = other DNA; note = Synthetic coding sequence
atggccgagcgcaagcccaacggcggatcaggcggagcttccacctcatcaagcgggactaatctgttgtttagcagcagtgcgacggagtttagcttcaacgtccctttcatacctgtgacacaggcctctgccagccctgcatccctgctgctgccaggggaagacagtacagacgtgggcgaggaggatagttttctggggcaaacttccattcatacttccgctccccagaccttttcttactttagccaggtcagttcttcctcagacccattcggaaacattggacagtcgccccttactactgccgcaacatctgtgggccagtctgggttccccaagccactcaccgcgctcccattcaccacaggcagtcaggatgtgtccaatgccttctcgccgtctataagcaaggcacaacctggcgcaccaccaagctctttaatgggcataaactcctatctgccatcgcaacctagttccctgcccccatcttatttcggcaaccagccccaggggatcccgcagcctggatacaatccataccgccatacaccagggtccagccgggctaacccctatatcgctcctcctcagctccagcagtgccagactcccggtccccctgcccaccctcctccctccggccctcctgtgcaaatgtatcaaatgcctcctggaagtctcccacccgtccctagctctgtgcaaagccccgctcagcaacaggttcctgcaaggccgggtgccccttcagtacaggtcccctcaccctttttgctgcagaaccagtacgagcccgtccagccacattggttctactgtaaggaagtagagtacaagcagctttggatgcccttcagtgtattcgattctttgaatttggaggaaatttataactcagtgcagccggaccccgagtctgttgtgttgggcaccgatggcggacgctatgatgtctatctgtatgaccggatacgcaaggcggcttactgggaggaggagcctgctgaggtacgcaggtgtacttggttctacaaaggggatacagattcccggttcatcccttatactgaagagtttagcgagaagctggaagccgaatacaaaaaagccgttacaactaaccagtggcataggaggctggaattcccaagcggagaaaccatcgtgatgcacaatcctaaagttatcgtacaattccagccttccagtgtgccagacgagtggggcactacccaggatggccagacccgcccaagagtggtgaaacgtgggatagacgacaacctcgacgaaatcccagacggcgaaatgccccaggtcgatcatctggtctttgttgtacatggaatcggcccagtatgcgacctgcggtttagatctatcattgagtgtgtcgatgactttagggtcgtgtcgctgaaactcctgcgcacgcactttaagaaatctctcgatgatgggaaggtatctcgcgtagagtttctacctgtgcactggcacagcagcctaggtggggacgctaccggagtcgacaggaacatcaagaaaatcacccttccttccattggccgtttcaggcatttcacaaatgagaccctacttgatattctgttttacaatagcccaacttactgccagaccatcgtggaaaaggtgggaatggagataaaccacctgcatgccttattcatgtcccgaaatcctgatttcaagggtggagtgtccgtcgctggccactctctcggaagtctgattctgtttgacatactctccaatcagaaggatctgaatttgtccaagtgtcccggaccactagcagtggccaatggcgtcgtgaagcagctgcacttccaggagaagcaaatgcctgaagagcccaaattaaccctggatgaatcatatgatttggtggttgagaacaaagaggtcctcaccctgcaggagaccttagaggcgcttagcctcagtgagtacttcagcacctttgagaaggaaaaaatagatatggagtcgctgcttatgtgtaccgtcgacgatcttaaggagatgggtatccctttaggacccagaaagaagattgccaacttcgtagaacacaaggccgctaagcttaagaaggccgcatccgaaaagaaggctgtggctgccaccagcaccaaggggcaagagcagtctgcccagaagactaaggacatggccagtctaccatccgagtccaacgaaccgaagcgtaaactgccggtgggcgcttgcgtgtcgtcggtgtgtgtcaattatgaaagttttgaggtgggggctggacaggtgagcgtggcgtacaattcactggatttcgagcctgaaatcttcttcgccctgggatctcccatcgcaatgttcctgacaataagaggggttgacaggatcgacgaaaattattcgctgccaacctgtaaaggattttttaatatctaccaccccctagacccggtggcctatcgcctggaaccaatgatcgtgcctgatctggatctcaaagccgtgctgattccccaccataaaggtaggaagaggctgcatctggagctaaaggaatctcttagtcggatggggagcgatctgaaacagggatttatctcatccctgaagtcagcgtggcaaactctgaacgaatttgctcgtgcgcacacctcttctactcagcttcaggaagaactggagaaggtagccaaccaaataaaagaagaggaagaaaaacaagtggtcgaggccgagaaggtggtcgaaagccctgatttctccaaggatgaggactacctcgggaaggtgggaatgttaaacggtgggaggcgcattgattatgtactccaggagaaaccaattgagtcctttaacgaatacttatttgctctgcagagtcatctgtgttattgggagtccgaagataccgccctcctgctgctgaaagagatttacagaaccatgaatatctctcctgagcagccccagcactag

SEQ ID NO: 28786 - DNA, 495 bp, synthetic construct
  source 1..495: mol_type = other DNA; note = Synthetic coding sequence
atggttaactcagtggtcttcttcgacatcacagtagacggaaagcccctgggcaggatcagtatcaaactttttgcggataaaatcctcaaaacagcagaaaactttagggcactgtcaaccggggagaaaggctttcgttataaaggcagttgtttccacagaatcattcctggattcatgtgccagggaggagacttcacccgtcacaacggtactggagacaagagcatatatggcgagaaatttgatgatgagaatctcatccggaagcacaccggcagcgggatcctgtccatggctaacgccggacctaataccaacggcagccagtttttcatttgtgcggcaaagaccgaatggttggacggcaagcacgtcgcttttggcaaggtgaaagaaagagtgaacatcgtcgaggctatggaacactttggatacaggaacagcaaaaccagcaagaaaatcaccattgctgactgcgggcagttttag

SEQ ID NO: 28787 - DNA, 426 bp, synthetic construct
  source 1..426: mol_type = other DNA; note = Synthetic coding sequence
atgaagatcctggacgtgggttgcggaggaggcctgctgacagagcccggaggatctctcttcatcactaccatcaacaaaacccagcttagctacgcattgggaatcgttttttcagaacagattgcttccatcgtgccgaagggcacccacacttgggagaaatttgtgtccccggagactctggagtctatcttggaatctaacggcctttccgtgcagaccgtcgttgggatgttgtacaatcccttttccggatattggcattggtctgaaaacacctcacttaactatgccgcatacgcggtcaagagtagagttcaggaacaccctgctagcgccgagtttgtgcttaaaggggaaacagaggagctccaggctaacgcctgcacgaatccagctgtccacgagaagttgaagaagtag

SEQ ID NO: 28788 - DNA, 426 bp, synthetic construct
  source 1..426: mol_type = other DNA; note = Synthetic coding sequence
atgaaaatcctcgacgttgggtgtggaggcggactgctgactgaacctggaggaagcctatttattacgaccatcaacaagacacagctgagttatgcactgggcatcgtttttagcgaacagattgcttctatcgtgcccaaaggaacgcacacatgggaaaaattcgtgtccccagagactctggagtccattctggagtctaatggcttatccgttcagactgtagtcggcatgctctacaatcctttctctggctactggcattggagcgaaaatacttctctcaactacgccgcatatgccgtgaagagtagagtccaggaacatcctgccagcgccgaattcgtcctgaagggggaaactgaagagctgcaagcaaacgcttgtacaaatccagccgtccatgaaaagttaaagaaatag

SEQ ID NO: 28789 - DNA, 2157 bp, synthetic construct
  source 1..2157: mol_type = other DNA; note = Synthetic coding sequence
atgttaatgaccctggagatgaccgaactcactgatcctcaccacactatgggtgactataaagtcgcccatcctcaggacccacatcacccatctgaaaaaccagtgatccattgtcacaaatgtggggagccctgtaagggtgaagtgctgagagtacagaccaagcatttccacattaagtgttttacttgtaaagtatgtggttgcgatctggcacaggggggatttttcattaagaacggggagtacctgtgcactctggactatcagcggatgtatgggactcgctgtcatggttgtggggaattcgtggagggtgaggtggttacagccctcgggaagacctaccaccccaattgcttcgcctgtactatctgtaagcgccctttcccacctggtgacagggtaacttttaatggtagggattgcctatgtcaactgtgtgcccagcctatgagcagctctccgaaggagacaactttctcttcaaattgcgcagggtgtgggagggatattaaaaatgggcaggcgctcctagcccttgacaagcagtggcatctgggatgttttaaatgcaaatcttgtggtaaggttttgacaggagagtacatcagcaaggatggggctccatattgtgagaaggactaccagggcctgttcggggtgaaatgcgaggcctgccaccaatttattacgggaaaagtgctggaggccggtgataaacactatcatcccagctgcgcccgatgcagccggtgtaaccagatgtttaccgagggcgaggagatgtacttacagggtagcacggtgtggcacccagactgtaagcaatcgacaaagacagaggagaagctgcggccaacacgtacttcctcggaatccatttacagcagaccgggatcctccataccagggagccctgggcacacgatttatgctaaggttgataacgagattctggattataaagacctggccgcaattcccaaggtgaaggctatttacgacattgagcgtcctgatttgatcacatacgagcctttttatacctccgggtacgatgataagcaggagagacagagcctgggcgagagtcccagaacactgtctcccaccccttccgctgaaggctaccaggatgtgcgagaccggatgattcatcgatctacatcacaaggttctatcaattccccagtgtattcacgccattcctacacaccaacaacatcgcgctcaccacagcatttccaccggccaggtaatgaaccatcttcagggaggaactccccacttccatatcgtcccgactcccgcccactgaccccgacttacgcacaggccccaaagcactttcacgtgcctgaccagggcattaacatatatcgaaagccacccatttataaacagcacgctgctttggcagcccaaagtaagtctagcgaggacattattaagttttctaaatttcccgctgcacaggccccagatccaagcgaaacccccaagatcgagaccgatcactggccaggacccccttctttcgctgtcgtcgggcctgacatgaagcgaagaagcagcggtcgcgaagaggacgacgaggaacttctgcggaggcgccagctacaggaggaacagctcatgaaactgaacagcggcttgggacagctcatcctaaaggaggagatggaaaaggaaagcagggagcggtcttctctgctggcgtccagatacgactccccaataaattcggcctctcatatcccatctagtaaaacggccagcctacccggatacgggagaaacggcctgcacaggccagtcagcactgacttcgcccagtataattcctacggcgacgtgagtggtggcgtaagagattaccagacattgccagacggtcacatgcctgccatgcgcatggaccggggtgtgagcatgcctaatatgctcgagccaaaaatctttccatatgagatgctaatggtgacaaaccggggtcggaataaaattctgagggaagtggacaggacacggcttgaaaggcatctggccccagaagtctttcgagaaattttcggtatgtccatccaggaattcgaccgactgcctctctggaggcgaaacgacatgaagaaaaaggctaagctgttctag

SEQ ID NO: 28790 - DNA, 1593 bp, synthetic construct
  source 1..1593: mol_type = other DNA; note = Synthetic coding sequence
atgttcacagaaggagaggaaatgtaccttcagggaagcaccgtgtggcaccccgattgcaaacagtctacaaaaacggaggagaagctccgactgccaaatatccggagaagttccagtgacttcttttattccaaaagtcttatccgtagaactggaagaagcccatcactccagccgacgcggacctccagcgaaagcatatactctcggcctggttcatcaatccccggatcccccggacatacaatttacgccaaggtggataacgaaatcctcgactataaggatttggccgctattccgaaagtgaaagctatttacgacattgaacgtcccgatttgattacctacgagcctttctatacgtccgggtacgacgacaagcaagagcgccagtccctgggggaatcaccacggactttgtctccaacgccctcagcagaaggataccaggatgtccgggatcggatgatccacaggagcacatcacagggaagtattaactcgccagtgtacagccgccattcttacacccctacaacgagccgcagccctcagcattttcatcgaccagaactgctctccccaggcgtgcagcgattgagttacctgcgcacatccagtctcagccctacacacagcgattcccggcctaacccgcctttcaggcaccatttcatccctcatattaagggcaacgaaccgtcaagtggcaggaacagccctctgccgtatcggccagactcccgacccctgactccaacctacgctcaggctcctaaacactttcacgtgcccgaccaagggatcaatatctacagaaagccccctatatacaagcagcacgcagcgctcgccgcacaatctaaaagttcagaggacattatcaaatttagcaagtttcccgctgcacaggcccctgacccatcagagacccccaagatcgagacagaccactggccgggacccccatcattcgcagtggtcggtcctgacatgaagcgcaggtccagtggacgtgaggaagatgacgaggagctactacggaggaggcagctgcaagaggagcagttgatgaaactcaatagcgggttggggcagctgatacttaaggaagaaatggagaaggaaagtagggagagatcttcgcttctggcatcacgttatgactctccaattaactccgcatcacacatcccgagcagcaagaccgcctctctaccaggctacggtcggaatgggctccacagacctgtgtctacagatttcgctcaatacaacagctatggcgatgtaagcggaggggtccgcgattaccagacattgccagacggacatatgccggctatgagaatggataggggcgtttctatgcccaacatgctcgaacctaaaatattcccctacgagatgttgatggtaacgaaccgcggaaggaacaagatactcagggaagtagaccggactcgcctcgagcgccacctagcccctgaggtgtttcgcgaaatcttcggaatgagtatacaggagttcgaccgactcccactttggcgccgaaatgacatgaagaagaaagctaagttgttttag

SEQ ID NO: 28791 - DNA, 2109 bp, synthetic construct
  source 1..2109: mol_type = other DNA; note = Synthetic coding sequence
atggttaaggaaaaggtggctcaccctcaggacccacaccacccatccgaaaaacctgtgatccactgccataagtgcggcgagccttgtaagggagaagtgctgagggtgcagaccaagcacttccacataaagtgcttcacatgcaaggtgtgcgggtgcgatcttgcccagggcggatttttcataaaaaacggcgaatatctgtgtaccctggactaccagaggatgtacgggacgcggtgtcacggatgcggcgagttcgtcgaaggcgaggtggttacagccctgggcaaaacttatcacccaaactgcttcgcgtgcacaatatgtaagagacctttccctcctggagatcgggttacgttcaacggacgcgattgcctgtgccaactttgcgcccagcccatgagcagttcaccaaaggagacaaccttcagcagcaattgtgcagggtgcgggcgagatattaaaaacggccaggccttactggcactggacaagcagtggcaccttggttgttttaagtgcaaaagttgcggtaaagtcctaacaggcgagtacatctctaaggatggggctccctattgcgaaaaagattatcagggcctgttcggggtgaaatgcgaagcttgccaccaattcattacagggaaggtcttagaggccggtgataagcattatcatccctcctgcgctcggtgtagtcggtgcaatcagatgtttaccgaaggcgaagaaatgtatctgcagggctccaccgtttggcacccagattgtaagcagagcacaaagactgaggagaaactgagacctactcgcacatcctctgagtccatttactctagacctggttccagcattcccggttcacctggtcacacaatctatgcgaaagttgacaatgagatcctggactacaaggatctggccgctatccctaaagtgaaggccatctacgatatagaacggcctgaccttatcacctacgagccgttctacaccagcggctacgatgacaagcaagagcgacagagcttgggcgagtcccccaggactctgagtccaactcccagcgcagagggttaccaggacgtgagagaccgaatgatccatcggtctacctctcaagggagtatcaattctcccgtttacagcagacacagttatactcccaccacgagtagaagtccccaacattttcaccgcccaggaaacgaacccagttctggacgtaattcacccctcccctataggcccgactcacgccctctgacacccacgtacgcccaagccccaaagcacttccatgtgcctgaccaagggataaatatctatcgcaagccccctatttataaacagcacgccgcattggccgcacagtctaagtcttcagaagacatcatcaagttctcgaagtttcctgctgcccaggcccctgacccctctgagacccctaaaattgagacggaccactggcccggacccccttcatttgccgtggtgggaccagatatgaaacggaggtcgtctggcagagaggaggacgacgaggagctgttgcgtagaaggcagctgcaagaagagcagttgatgaagctcaattctgggctcggccagctgattcttaaagaagagatggagaaagaatctcgcgaacgcagctcccttcttgcgtctcgttacgatagtcctattaatagcgcaagccacattcccagttctaaaactgcatccctcccagggtatggcaggaacggactgcacaggccagtgagcaccgatttcgcccaatacaacagctacggcgacgtatcaggcggagtgcgcgattaccagaccctgccagatggacatatgcctgcaatgaggatggatcggggagtctccatgccaaacatgttagaaccgaagatcttcccatacgagatgctcatggtgaccaatcgcggacgcaacaagatcctgcgcgaggtggatcgtacccgactcgagagacacttggctcctgaggtctttagggaaatcttcggaatgtcaatacaggagtttgatcgcctcccactgtggcggaggaacgatatgaaaaaaaaagccaagctgttctag

SEQ ID NO: 28792 - DNA, 1206 bp, synthetic construct
  source 1..1206: mol_type = other DNA; note = Synthetic coding sequence
atgttcaccgagggagaagagatgtatctgcagggtagtaccgtgtggcaccctgattgcaagcagagcaccaagacagaggagaagctccgggctaaggtggataacgagatcctggattataaggatttggccgctatcccaaaagtgaaggcaatctatgacatcgaaagacccgatcttattacctacgaaccattttacacaagcggctatgatgacaaacaagagaggcagtcattgggagagtccccccgaacacttagccctacgcctagcgcggagggttatcaggacgtgagggacaggatgatacaccgtagtacgtcccagggtagcatcaacagccctgtgtactctcggcattcatatacccccactacaagcaggagcccgcagcacttccaccgacccgatcagggcattaacatctacaggaagccacccatctacaaacagcacgctgcactcgcagcccagtctaaatcatctgaggacattatcaagttctctaagtttcccgctgcgcaggcgccagatccctctgaaacccccaaaatcgaaaccgaccattggcccggaccccctagcttcgctgtagttggacccgacatgaaaaggcggtctagtggacgcgaagaggatgacgaagagttgctgcgcaggaggcagctacaggaggagcagctcatgaagcttaactctggcctggggcagcttatcttgaaggaggaaatggagaaggagagtagagaacggagctctctcctcgcctctcggtacgattcacctattaactccgcatctcacatcccgtcttcaaagactgcgtcgctgcccggatacggcaggaatgggctgcacagacccgtgagtaccgattttgctcagtacaactcatatggtgatgtgtcaggcggagttcgggactatcagacattaccagatggccacatgccagctatgagaatggatagaggtgtaagcatgccaaacatgctggaaccaaaaatattcccgtatgagatgctgatggtcacaaacaggggcaggaacaagatcctcagggaagtggatcggacaagacttgagcgtcatctggctcccgaggtgttccgcgaaatctttggcatgagtatccaggaatttgacagacttcctctctggaggcgcaatgatatgaagaagaaagcgaagctcttctag

SEQ ID NO: 28793 - DNA, 1968 bp, synthetic construct
  source 1..1968: mol_type = other DNA; note = Synthetic coding sequence
atggtcaaagagaaggtagcccacccacaggacccccatcacccatctgaaaaacccgtcatccattgccacaagtgtggggagccgtgcaaaggcgaagttctcagagtgcagacaaagcactttcacatcaaatgctttacgtgtaaagtgtgcggatgtgatctcgctcaggggggtttcttcattaaaaatggtgagtacttgtgcaccctggattaccaacgcatgtacggcactcggtgccatggttgtggagagtttgtggaaggcgaggtcgtgacagcacttggcaagacttatcaccccaactgcttcgcctgcactatctgtaagaggcccttccctcctggggatcgtgtaactttcaacggccgtgactgcctgtgtcagctctgcgcccagcccatgagctcatcacccaaagagaccacattctcaagtaactgtgcgggatgtggaagggacatcaagaatggccaggccctgttagcgctggataagcagtggcatctgggatgctttaagtgcaaaagctgcggaaaagtattaactggagagtacatctccaaggacggagcaccctactgtgagaaagactatcaggggcttttcggcgttaaatgcgaggcatgtcaccagttcatcaccggcaaggtcttagaagcaggcgacaagcattaccacccaagttgcgccagatgcagccgctgcaaccagatgttcaccgaaggcgaggagatgtatcttcaaggctccacagtgtggcaccctgactgtaagcagagcactaaaactgaagaaaagctaaggccaactcggacttcctcagaatccatctattccaggccaggaagcagcattcctggctcccctggacataccatctacgccaaggttgacaacgagatccttgactacaaggacttagcagctatcccaaaagtcaaagctatatacgacattgagcgacccgacctgatcacatatgaacccttctatactagcggctatgacgacaaacaggaaagacagtccctaggagagtccccccgaacattgtccccaacaccgagcgccgaggggtatcaggatgtgcgcgaccgtatgatccaccgttccaccagtcagggaagcatcaactcgccggtatactctcgacactcgtatacacccacaacatctcggtcaccccagcactttcatcggcctggtaatgaaccaagctccggcagaaatagccccctgccgtaccgacccgactctcggcctttaacaccaacttatgcccaagccccaaagcattttcacgtgccggaccaggggatcaatatctacaggaagcctccaatctataagcagcacgggccagacatgaagcgcagaagttctggccgagaagaagatgatgaggagctgctgcgcagacgacagctacaagaagaacagctcatgaaactgaactcgggactaggtcagctgatactcaaggaggaaatggagaaagagagtcgcgagcgctcttctttgttggcgtcacgctacgattctccaatcaattctgcctctcatatcccgtcttctaaaaccgctagcttgcccggatatggccgaaacggcctgcatcgtccagtgtctacagacttcgcccagtacaacagttacggggacgtgagcggaggtgtgagggatttccagaccctgcccgatggccacatgcccgcaatgaggatggatcgcggtgtcagcatgccaaatatgctggagcctaagatatttccatatgagatgttaatggtgacgaatcgcggtagaaacaagattttgcgagaagttgacagaacccggctggaacgccaccttgccccagaagtttttagagagatctttggcatgtcgattcaggagttcgaccgactcccattgtggcgccgtaacgacatgaagaagaaagcaaagcttttctag

SEQ ID NO: 28794 - DNA, 2541 bp, synthetic construct
  source 1..2541: mol_type = other DNA; note = Synthetic coding sequence
atgcccgctttcctaggcctcaagtgtctgggtaaactttgttcttccgaaaagtctaaggtgacctcctctgagcgcacatccgctaggggcagcaaccggaaaaggttgatcgtggaggataggagggtgagtggaaccagcttcactgctcaccgacgcgcaactatcactcatctgctctatctctgtcctaaggattactgccccagagggcgagtgtgtaatagtgtggaccctttcgtcgcccaccctcaggatcctcaccatccctccgaaaaacctgtcattcattgccataagtgcggagagccatgtaaaggagaagtccttcgggtccaaacaaagcatttccatatcaagtgcttcacctgcaaagtgtgtggatgcgacctggcacagggcggattttttataaaaaacggagaatacttgtgtacgctggactaccagagaatgtacggcaccaggtgccacgggtgtggggagtttgtggaaggagaggtggtgactgcacttggaaaaacttaccatcctaattgtttcgcctgtacgatatgcaaaagacctttcccacctggcgaccgtgtaacatttaatgggagggactgtttgtgtcagctgtgtgcacagccaatgtcttcttcaccaaaggagaccaccttttcatccaattgcgctgggtgcggcagagacattaagaatggccaggcattacttgcactcgataagcaatggcacctgggttgcttcaagtgcaagtcctgcggcaaggtgctgaccggagaatacatcagcaaagacggcgcaccatattgtgagaaagactaccaaggcctattcggagtcaaatgtgaggcatgccatcagtttatcaccggaaaagtactagaagccggagacaaacattatcaccctagttgtgctcggtgctcccggtgcaatcagatgtttacggagggagaagagatgtaccttcagggcagtactgtgtggcacccagactgtaaacaatcaacaaagaccgaggagaagttacggctgccaaatattcgacggtctagctcggattttttttattcaaagagccttattagacgcactgggcgttctccgtcgcttcagcctacacgaaccagcagtgagagcatttattcgcgccctggcagcagtatcccgggaagccccggacacacaatctacgccaaggttgataacgagattctggattataaggacctggctgccatccccaaagtcaaggcaatttatgatatcgaacgacctgacctcatcacctacgagcccttctacacctccggttatgatgacaagcaggagcgccagagccttggagaaagcccgcgaactctttcccctaccccctcggcagaggggtaccaggacgtgcgcgacagaatgatccaccgctccacatcgcaggggagtataaactcgcctgtgtacagtcgtcacagttacacgccgacaacatcccgctcccctcaacactttcaccgccctgagctcctgtctcccggagttcagagattgtcttacctgagaaccagtagcctgagccctactcacagcgattcacgccctaacccacccttcaggcatcacttcatcccgcacatcaaaggtaacgaaccctcctccggcagaaattctcctctcccgtataggcctgactctaggccgctaacccctacctatgcccaggccccaaagcattttcacgtgcccgaccaaggaatcaacatttaccgaaagcctccaatatataagcagcatgcagcactagcggcacagagtaagagcagcgaggacataattaagttttccaagttccctgccgcacaggccccagacccttcagaaaccccaaagatcgagaccgaccactggcccggtcccccttccttcgccgtggtcgggcctgatatgaagcgcagatcctctggtcgggaagaagatgatgaggaactcctgagacgacgccagctgcaagaggaacagctgatgaagttaaatagcggtctggggcagctcatactcaaagaggagatggagaaagaatctcgggaacgcagctcgctacttgctagtcgctatgactcccccatcaacagcgcatcacatatcccttcctctaaaaccgcctccctccccggatacggccgtaatggactacataggcccgtgagcacagactttgcccagtacaacagctatggcgacgtgtcaggaggcgtgcgggagtatcagactttgccggacggacacatgccggctatgaggatggaccgcggagtgtcaatgcctaacatgctagagcccaagatctttccttatgagatgctgatggtgacaaatcgcggaagaaataagatactaagagaagtggaccgaacccgtctggaacggcacttggcacccgaggtttttagggaaatttttggcatgtcaatacaagagttcgaccgcctcccgctctggaggcgcaacgatatgaaaaaaaaagctaaactgttctag

SEQ ID NO: 28795 - DNA, 2109 bp, synthetic construct
  source 1..2109: mol_type = other DNA; note = Synthetic coding sequence
atggtaccggacccagtggctcatcctcaggatccgcaccatcctagtgaaaaacccgtgattcactgccacaagtgtggtgaaccatgtaaaggcgaagtactccgggttcagaccaaacactttcacatcaaatgcttcacatgtaaggtgtgtggatgcgatctagctcagggcggattttttatcaaaaacggagaatacctgtgtaccctggactatcagagaatgtacggcacgcggtgtcacggctgtggcgagttcgtggaaggtgaagtcgtgaccgctctgggaaaaacttatcaccccaattgtttcgcctgcacaatttgcaaacgaccattcccccctggagaccgagtgaccttcaatggaagagattgtttgtgccagctctgtgctcagcccatgtcgtcgagtcccaaggagactacctttagttcgaattgcgccggatgcgggcgagacataaagaacggccaggccctgctggctttggacaagcaatggcatctcggctgctttaagtgcaagtcttgcggtaaagtcctgaccggagagtatattagcaaagatggggctccttattgtgagaaagattaccaggggttattcggggtgaaatgcgaagcctgccatcagttcattaccggcaaggtgctcgaggctggagataagcactaccacccctcctgcgcccgttgttcacgctgcaatcaaatgtttacagagggggaagaaatgtatcttcaaggtagtaccgtgtggcaccccgactgcaagcagtccaccaagaccgaggaaaagcttcgaccaacaagaacgagcagcgaaagtatttattctcggcctggaagcagtatcccaggttcacccggacacacaatatatgccaaagttgataacgagatcttagattacaaggacctggccgctattcctaaagtgaaggctatttacgatattgagcgtccagacctgatcacctatgaacccttctataccagtggatatgatgataagcaggagcgacagtcactgggcgaatcccctaggacactgagccccacccccagcgctgaggggtatcaggacgtacgggatcgaatgatccacagatccacatctcagggctccattaactcacccgtgtatagccggcatagttacacccctacgaccagtagatcacctcagcactttcaccgcccagggaatgagccatccagcggaaggaatagccctctgccatatagaccagattccagacccctaactcctacatacgctcaagcacctaaacacttccatgtccctgaccaaggcattaatatttacagaaagcccccaatatacaagcagcacgcagcccttgctgctcagtctaaatccagtgaagacataatcaagttttctaagttcccggctgctcaggctcccgatccaagtgaaacacccaaaatagaaacagaccattggcccggtcccccttctttcgccgttgtcggcccagatatgaaaaggcgctcttctgggagggaagaggacgacgaagaacttctgaggcgtcgacaactccaggaagagcagctcatgaagcttaattccggcctgggtcaattaatcctcaaggaggaaatggagaaggagagtagagaaaggagctccctgctcgcttcacggtacgactctcctatcaactcagcgtcccatattccttcaagcaagaccgcctcccttcccggatacggcaggaacggtctgcaccgccctgtctccactgattttgctcaatataattcttatggcgacgtgtctggcggagtccgggagtatcaaaccctgcccgacggacatatgcccgcaatgagaatggacagaggcgtgtccatgcctaacatgctggagccgaagatttttccatatgaaatgctcatggtcacaaaccgagggagaaacaagattctgagggaggttgaccgtacacgcctcgaaaggcatctagccccagaggtgttcagagaaatcttcggtatgagcatccaggaattcgatcgtttacccttatggagaaggaatgacatgaaaaaaaaggccaagctcttttag

SEQ ID NO: 28796 - DNA, 1368 bp, synthetic construct
  source 1..1368: mol_type = other DNA; note = Synthetic coding sequence
atgtttaccgagggcgaagaaatgtacttgcaaggttctacagtgtggcaccctgactgcaaacagagcaccaaaactgaggagaaactgcgcctgccgaacatccgacgatcaagcagtgacttcttttacagcaaatcccttatcagaaggacaggtcgctcgccaagcttgcagccaaccaggacttcctccgagagcatttactccaggccaggtagcagcatcccaggtagcccagggcacacgatctacgctaaagttgacaatgagatcctggactacaaagatttagctgctattcctaaggtgaaagccatctatgatatcgaaaggcccgacctcataacctacgagccgttttatacatccggctatgacgacaaacaggaaagacaatcgctgggcgagtcacctcggactcttagtcccacccctagtgcagaaggataccaggacgtgagagacagaatgattcataggtccacaagccagggaagcattaatagccctgtgtacagtcgtcacagctatacgccaactacctctcggtcacctcaacattttcatagacccgaccaggggatcaacatttatcgaaagccccctatctataagcagcatgccgctctggcagctcagtccaaaagctctgaggatatcatcaagtttagcaagttccccgctgcacaagctcctgacccctccgagactccaaaaatcgaaaccgaccactggcccggtcctccaagttttgctgtggtgggtccagacatgaaaaggcgctccagcggaagggaggaagatgacgaggaactcctgcggcgaaggcaactacaggaggagcaacttatgaaacttaattccggtctggggcagctgatcctaaaggaggaaatggaaaaagagtcacgtgaacgcagcagtcttctggcttccagatatgacagtcctatcaatagtgcttcacacatacctagttccaagacagcgagcctgccgggatatggaagaaacggcctgcaccggcctgtctctacagatttcgcacagtacaatagctacggcgatgtgtctggcggagtccgggattttcagactctgccagatggccacatgccggcaatgcgaatggacagaggcgtgagcatgcctaacatgcttgagcccaaaatatttccctatgagatgcttatggtcacaaatcggggacggaataaaatcttgcgcgaggttgatcggacccgactggaacggcatctcgcgcctgaggtgtttcgggaaatctttggcatgagtatacaggaatttgatcgcctgccactgtggaggagaaacgacatgaagaaaaaagccaagctgttttag

SEQ ID NO: 28797 - DNA, 2241 bp, synthetic construct
  source 1..2241: mol_type = other DNA; note = Synthetic coding sequence
atgcttatgacgctggaaatgacggagctcaccgacccccaccacacaatgggcgactacaaggtggctcacccacaggacccgcatcatcccagcgaaaagcctgttatacactgtcacaagtgcggcgaaccttgcaagggcgaagttctccgcgtgcagacgaagcacttccacattaaatgctttacgtgtaaagtctgtgggtgcgatctggctcagggaggcttcttcatcaaaaacggggaatatttgtgtactctcgattaccagaggatgtatggcacgcggtgtcacggatgcggagagttcgtggagggggaagtggtgacagccttggggaaaacctaccatccaaattgcttcgcgtgtactatctgcaaaaggcctttccccccaggcgaccgcgtgaccttcaacggaagagactgtctctgccagctctgtgctcagcccatgtccagttcacctaaggaaacaaccttttcaagcaattgtgctggctgcggcagggatattaagaacggccaggccttactggctctagacaagcagtggcacctgggctgctttaaatgtaaaagctgcggcaaagtgttaactggagaatatatatctaaagatggggcaccttattgcgagaaagattatcaaggcctgtttggcgtcaagtgcgaggcatgccatcagtttattaccggcaaagtcctcgaagctggagataaacattatcaccctagttgcgccagatgcagtaggtgcaatcagatgttcactgagggcgaggagatgtacttgcaaggcagcactgtgtggcacccagactgcaagcaatccaccaaaacagaagagaagctcagactgccaaacatccggaggtcctcttcagatttcttttacagtaaatcgctgatccggcgaaccgggcgaagcccctcccttcaaccgactaggacctccagtgaaagcatctactcacgtcctggtagtagtattcccggtagccccggacatactatttacgctaaagtcgacaacgaaatccttgattacaaggatcttgccgcaattccaaaagtaaaggccatctacgatatcgaacgcccagacctgatcacttacgagcccttttacacgtcagggtatgatgacaagcaggagcgacagagtttgggcgagagccctcgcaccctatccccgacaccctctgcagaaggataccaggatgtccgagacaggatgattcatcgaagcacctctcaaggatccatcaatagtcctgtttacagcaggcatagctacactcctacaacttcacggagcccacagcattttcatcgccctggcaatgaaccatctagcggcagaaacagccctctcccttaccgtcccgattccagaccactcacgcccacctatgcccaggctcccaagcatttccatgtaccagatcaggggataaatatttaccgcaaacccccaatctacaagcagcatgccgctttggcggcacagtctaagtcatcagaggacataattaagttcagcaaatttcccgctgcacaggcgccagaccctagcgagactcctaaaattgaaaccgaccactggccaggtcctcctagtttcgctgtcgtcggtcccgacatgaaacgacgatccagtggacgggaggaagatgatgaggaactcctgcgcaggcgtcagctacaggaggaacagctgatgaagctgaactccggcctcggccaactcattctgaaggaggaaatggagaaagaatcacgcgaaagatcctccctgctagcttcccggtacgatagccctataaactctgctagccacatcccttcaagtaagaccgcctcactgcccggttatggtagaaacgggctccatcggccagtaagcactgattttgcacagtacaactcctacggagatgtttccgggggagtccgagacttccagactctaccagatggacacatgcctgctatgcgcatggatcgcggagtgtccatgcctaacatgttagaacccaaaatctttccctacgaaatgctcatggtgacaaaccggggtcgtaacaagattcttcgggaagtcgatcggaccaggctagagcggcatctcgcgcctgaagtgttccgagaaatctttggaatgagcatccaggaattcgataggctccccctttggcgcaggaatgatatgaaaaaaaaggccaaactgttctag

SEQ ID NO: 28798 - DNA, 915 bp, synthetic construct
  source 1..915: mol_type = other DNA; note = Synthetic coding sequence
atggctgaggcctccgccgctggcgcagacagcggagccgctgttgctgctcaccgattcttctgtcatttttgcaaaggggaagtcagtccaaagctgcccgagtatatttgccccagatgtgaaagcggatttatcgaggaggtgaccgatgattcctcttttctcggaggagggggatccagaatagataataccacgaccacccactttgccgagctttggggccacctggaccatacgatgtttttccaggattttaggcctttcttgagcagcagtccgctggaccaggataatcgagctaacgagcggggtcatcagacgcatactgatttttggggggctaggcccccacgccttccattaggaagaagatatcggagccggggttctagtcgaccggatcgcagccccgcaattgagggaattctacagcacatcttcgcgggattttttgcgaactcagcaatccctgggtctccacatccgttttcgtggtccggaatgctgcacagtaatcctggggactacgcgtggggccagactggcctggatgcgatcgtaacccagttacttggtcaattggagaacacgggccctccacccgctgacaaagagaagattacaagcctacccacagtgacggtgacccaggagcaggtggacatgggtctggaatgccctgtttgtaaggaggactatacagttgaagaagaggtgaggcagctcccttgcaaccacttctttcattcttcttgtatagttccatggctggaactgcacgacacttgtccagtttgccgcaagagtctcaatggtgaggactctaccaggcagtctcagagcaccgaagcttccgcgtcaaatcggttctcaaacgacagccagctgcacgataggtggaccttttag

SEQ ID NO: 28799 - DNA, 636 bp, synthetic construct
  source 1..636: mol_type = other DNA; note = Synthetic coding sequence
atgagttgcacaatagaaaaaatcctcaccgatgcaaaaacccttttagagagacttcgcgagcatgatgccgcagccgaaagtctagtcgatcaaagtgcagcccttcacagacgtgtggcagccatgcgagaggcaggaactgcactgccagatcaggtgcggcagcggtaccaggaggatgccagtgacatgaaggacatgtccaagtacaagccccacattctgctgtcccaggaaaacacacagatacgggacctccagcaggagaatcgggagttgtggataagtctcgaagagcaccaagacgcgcttgagctgataatgagcaaataccggaagcagatgttacagctgatggttgccaaaaaagctgtagacgctgagcccgtgctcaaggcgcatcaaagccactcagccgaaattgagagtcaaatcgatcgtatctgtgagatgggggaggtgatgcggaaggccgtgcaggtcgacgatgaccagttttgtaagatccaggagaagttagctcagctggagctggaaaataaggaattgcgcgagttattgtcgataagctcggaaagcctgcaagcacggaaagaaaatagcatggacaccgcaagccaggccatcaagtag

SEQ ID NO: 28800 - DNA, 2451 bp, synthetic construct
  source 1..2451: mol_type = other DNA; note = Synthetic coding sequence
atggtcctgatgttccaaatcagatacataagccagacacaggggctgccagctgaatatctcctgagcgccggaacaaaaactacccgcttcttcaaccgagatcccaatctcggataccccctgtggcgcttaaaaactcccgaggagcacgagctggagactgggatcaagtccaaggaggcaagaaagtacatctttaattgcctggatgacatggctcaggttaacatgtccacagacttggagggcaccgatatgttggccgagaaggcagataggcgggaatacatcgatctgctgaagaaaatgctcaccatcgatgccgataaacgtatcacaccactcaagactttgaaccatcagtttgttaccatgactcatctactggactttcctcacagtaaccacgtgaagagttgcttccagaatatggaaatctgcaaacggagagttcatatgtacgatacagtgtctcagatcaaatctccctttactactcacgtggcaccaaataccagtacaaatctgactatgagcttcagcaatcaactaaacaccgtgcataaccaagcttctgtcttggccagtagtagcacagctgcagcagctacgctttccctcgccaacagcgacgtgagcctgttaaattaccagtctgcactgtacccttcgagcgctgcaccggtgcctggggttgcacagcagggcgtgtctctgcagcccggaactacacagatttgtactcaaacagatccttttcagcagaccttcattgtgtgtccgcctgctttccagacaggattgcaggccacgaccaagcactctgggttcccagtcagaatggataatgcagtgcccattgtgccccaagcaccagccgctcagcccttgcagattcagtccggcgtactcactcagggatcctgcactcctcttatggttgctaccttacacccacaggttgctaccataactccacagtacgctgtgccttttacactaagctgtgctgcaggcaggccggctctggtggagcagaccgcggctgtgttgcaagcttggcctggaggtactcagcagatcctacttcccagcacttggcagcagctcccgggagtggcgctccataactccgtacagccaaccgccatgatacccgaggcaatgggttctggacagcagctggcagactggaggaatgctcactctcacggaaatcaatactccaccatcatgcagcagccctccctcttgacaaatcatgtcacactggccactgcccagccgctcaatgttggagtggcccacgttgtgcgccagcaacagagctcatcactcccttcaaagaaaaataagcagtccgcccctgtttcctcaaagagtagcttagacgtactcccatcccaagtttacagcctggtcggctccagtcctctgcgtacgacgtcgtcctataatagtctcgtgccagtacaggaccagcatcagcccataatcatcccggacaccccctctccccctgtgagcgtgatcacaatccggtccgacacggacgaggaagaagataacaaatacaaaccctctagcagcggtttaaagccaaggagcaacgtcatctcctatgttacggtaaatgattccccagattcagattcatcactgagctcaccatacagcactgatacactctcagccctgcggggaaattccggatccgtgttggagggacctggaagggtggtggcagatgggaccggtacacgcactatcatcgtcccccctctaaaaactcagctaggtgactgcacagtggccacccaggctagcggactcctctcaaataaaactaagcctgtggctagcgtttcagggcaaagcagcggatgctgcatcactcccactggctacagggctcagcgaggaggcacgtctgcagcacagcctctgaatctgtcacagaaccagcagtcgtcagcagcccctacatcgcaggaacggtcctcgaatccagctcctagacgccagcaggccttcgtggccccactcagccaggccccatacacctttcagcatggatcccccctgcactcgacaggtcaccctcacctggcacccgctcctgcccaccttccctcccaggcccatctctatacctacgccgctccgacatccgctgcagcgctggggtcaacgtcttctattgctcatctcttcagtccccaaggctccagcagacacgctgcagcttatacaacccaccctagtaccttggttcaccaggtaccggtttccgtggggccttctctgctgacttccgcctccgtagctccggctcagtaccagcaccagttcgcaacccaatcctatattggcagctctcgtggctcaacgatttacaccgggtacccactcagccctaccaaaatctcccaatacagctacctgtag

SEQ ID NO: 28801 - DNA, 3498 bp, synthetic construct
  source 1..3498: mol_type = other DNA; note = Synthetic coding sequence
atggccagccagttgcaggtgttttcccctccctcagtttcttcctcagcgttttgctccgctaaaaagctcaagattgagccttcaggctgggacgtgagtggccagtccagtaacgacaagtactatactcattcgaagaccctgcccgctacccagggtcaggccaacagttcacaccaagtagctaactttaatatcccagcgtacgaccaaggactgctgttgcctgctccagctgtggagcacatagttgtaacagctgccgattcatccggctcagcagcaacgagcacatttcagagttcccagaccctgacccatcggagtaatgtgtcactattggagccataccagaagtgcgggctcaagagaaagagtgaggaggtagactctaacggcagcgtccagatcattgaggaacatcctcctctgatgctacagaatcgcaccgtggtgggtgcagctgcgacaactactacagtcacaacaaaaagcagcagcagcagcggagaaggcgattaccagctggtccaacacgaaattctctgcagcatgacgaattcttatgaggtgctggaattcctcgggcgtggcacttttggtcaggtggctaagtgttggaaacgatcaactaaggaaattgtggctattaaaatcctcaagaaccatccgagttatgcccgacaggggcaaatcgaggtgagcattctaagcaggttgtcttccgagaatgccgacgaatacaacttcgtgcggagctacgagtgttttcagcacaagaatcatacgtgtctggtatttgagatgctggaacaaaatttatatgatttcctaaaacagaataaatttagcccattgcctcttaagtacattaggcccatcctgcagcaggtggccacagccctcatgaagctgaagtcacttggattgattcacgccgacctgaaaccggagaatataatgctggtcgatcctgtaagacaaccgtatagggtcaaagtaattgatttcggatccgcgtctcatgtgtctaaggctgtatgctccacttatcttcagagcaggtattaccgggcacccgaaatcatcctgggcctgcccttttgcgaggccatcgacatgtggtctctgggatgtgtgattgctgagctgtttctcggctggcctctgtaccccggagcgagtgaatacgatcagatccgctacatcagccagacgcaaggtctcccagccgagtaccttctatcggctggcactaaaaccactaggttttttaatagagacccaaatctcggatacccactttggcgcctcaagacccccgaggagcacgagctcgagaccggaataaagtcgaaggaggccaggaaatacatcttcaactgtctcgacgatatggcccaggtcaatatgagcacagacctggagggcaccgacatgctggcagaaaaggcggatcgcagagagtatatcgatttattgaaaaagatgttgacgatcgacgcagataaaagaattacaccattaaagactctgaatcaccagttcgttaccatgacccacttgctggactttccgcattctaaccacgtgaaatcttgctttcaaaatatggagatctgcaaacgacgagtccacatgtacgatactgtgtcgcagataaagagtcccttcactacccatgtggctccgaatactagcaccaacctcactatgagcttttctaatcagcttaatacagtacacaatcaggcgtcagtcctcgcatcgagcagtactgccgcagcagccacactgagtctagcaaacagtgacgtctcactcctcaattaccagtccgcgttgtatcctagcagcgccgctcccgtccccggagtggcgcaacaaggcgtcagtctgcagcctggcaccacccaaatatgtacgcagacggaccccttccaacagactttcatagtgtgccctcccgcatttcaaaccggcttgcaggctacaactaagcattctggctttccagtacgaatggacaatgctgtacccatcgtgccccaggcccctgcagcccagcctctgcagattcagtccggggtgctcacacagcaggcttggccagggggaactcagcagattctgctgccctcaacctggcaacagcttccgggagtggcactccataacagtgtgcaacccacagccatgattcccgaggcgatggggagtggccagcagctggccgactggcggaacgctcacagccatggtaatcagtattctacaattatgcagcagccctccttgctaacaaaccatgtaacactggccactgcacagccattgaatgttggagtggctcacgtggtccgccagcagcagtccagcagcctgcccagtaaaaagaacaagcagtccgccccagtctcatcaaaaagctcacttgacgtcttaccctctcaggtctacagtctggtgggatcttcccctctccgcacgactagttcctataattcactggttcccgtgcaggatcagcatcaacccatcattattcctgacaccccctccccaccagtttcggtcattaccatccggagtgacacggacgaagaggaggataataagtacaaaccgagttcctccggactcaagcctcgcagcaacgtgattagctatgtcaccgtcaacgacagccctgattcagattccagcctttcatccccatactcaacagacacactgtccgcactcagaggcaactctggcagcgtcttggagggaccgggaagggtggtggcagatggcactgggacgcggaccattatcgtgcctcctctaaagacccagctgggcgactgtactgtggctactcaggcttctggtctgctgtctaacaagacaaagccagtggcatctgtgagtggacagtctagcgggtgttgcataacaccaaccggctatagagcgcagcgcggtggcacgtctgccgcacagcctctgaacctgtctcagaatcaacagtcatctgccgcacctacttcacaggaacggtctagcaacccagcccctaggagacagcaggctttcgttgctccactgtcacaggcaccttacaccttccaacatggaagccccttgcattccactggtcacccacacctcgccccagctccggctcacctaccctctcaggcacacctctacacatatgcagcaccaacaagtgcagccgctctcggcagcacttcaagcatcgcccacctgttctctccacagggttcctccaggcacgcagctgcctatactacacacccctctaccctcgtccatcaggtgcctgtgtcagtcgggccttctctccttacctcagcctctgttgctccagcacagtaccagcatcagtttgccactcaatcctacatcggcagcagtcgtgggagtacaatatacactggttaccccttgagtcccaccaagataagccaatattcttatttgtag

SEQ ID NO: 28802 - DNA, 3498 bp, synthetic construct
  source 1..3498: mol_type = other DNA; note = Synthetic coding sequence
atggcatcccaactacaggttttctcacctcctagtgtatcctcctcggccttctgtagcgctaagaagttgaagattgagcccagcggatgggatgtctccggccagtctagcaacgacaaatactatacacacagtaagacccttccggcaacccagggccaggctaatagtagtcaccaagtggcgaacttcaacattcccgcatacgaccagggcctgttacttccggcacccgctgttgaacatattgtggttaccgcagccgactcctccggatcagccgcaacatctaccttccagtcttcccagaccctgacccaccgttccaatgtaagcctcctggagccgtaccaaaagtgtgggttaaaaagaaaatccgaggaggtggattctaatggcagtgtacagattatcgaggagcacccaccgctcatgctgcaaaatagaaccgtggtaggggcagcggcaactacaaccaccgtgaccactaaaagttccagctcttctggcgaaggtgattatcagctggtgcagcacgaaatcctgtgctcaatgacaaactcgtacgaagtcttagagttcctggggagggggacattcggacaggtcgctaagtgctggaagagaagcactaaggagatagtggccatcaagattctcaagaatcaccctagctacgcgcgtcagggtcaaattgaagttagcatactttctcgcctcagctctgaaaacgccgacgagtataatttcgtgcggtcttacgaatgcttccagcacaaaaatcacacttgtctggtctttgagatgcttgaacaaaatctgtatgactttctgaagcaaaataagttctctccactcccactgaagtacataagacccattctgcagcaagtggctacagccctgatgaagcttaagtccctggggttgattcatgcagacctgaaacccgagaacatcatgctggtggatcctgtgcgccaaccgtaccgcgttaaggtgatagacttcggctccgcctcccacgtgtcaaaggccgtctgctcgacctatctgcaaagcagatactatagagcccctgagatcatcctcggattgccattttgcgaagcaatcgacatgtggagtctgggctgcgtcatcgccgagctgtttcttggctggcccttgtaccccggtgcgtcagaatatgatcaaatacggtacatttctcagacccagggattgcctgccgagtacttgctgagtgctggaacgaaaactactcggttcttcaaccgcgatcctaatctcggttaccccttgtggcgccttaaaacccctgaggagcatgaattagagacgggaatcaagtccaaagaggccaggaaatatatttttaactgcctggatgatatggcgcaggtcaatatgagtaccgatctcgagggcaccgacatgctcgccgaaaaggctgatcgacgggagtacattgatttgctcaaaaagatgctcacaatcgatgcagataaacgcatcactcctttgaaaacattgaaccaccagttcgtgaccatgacacacttactggatttcccacattctaatcatgttaaatcctgcttccagaatatggagatctgcaaaagaagggtacatatgtacgacacagtgagtcagataaagagcccctttacgacacacgttgccccaaacacatcaacgaacctgacgatgtctttctctaaccagcttaacactgttcacaaccaagcttctgtgcttgcctctagttcaactgcggcagccgctacgttgtctttagctaattcagatgtctctctcctcaactatcagtcagcactgtaccccagcagcgccgcacccgtgcctggcgtagcccagcaaggagtctcgctccaaccaggcacaacccagatctgcacgcagaccgatccctttcagcaaacattcatcgtttgcccacctgctttccaaactggactacaagcgactacaaaacactccggcttccctgttaggatggacaacgccgttccaatcgtccctcaggctcctgctgcccagcctctgcaaatccagagcggagtacttacccagcaagcctggcctggcggaacccaacagatccttctaccttccacctggcagcaactccccggagttgctcttcataactccgtccagccaaccgctatgatccctgaagctatggggtcaggacagcaattggcagattggaggaacgctcattcccatggcaatcagtacagcactattatgcaacagccatctctgctaacgaaccatgtaacattggcaactgcacagcccttgaacgttggcgtcgcccatgttgtgagacagcagcaaagtagtagccttccaagcaaaaaaaacaaacagtcagctccggtgtccagtaaatcgagcttggatgtcctgccctcccaggtgtattcactggtgggatctagccccctccggactacatcgtcatacaattctttggtgcccgtgcaagaccagcatcagcccatcattatccctgatacgccgtccccccctgtgagtgtgatcacaatacgaagcgacaccgatgaggaagaagacaataaatataaaccatcctcttccggtctgaagccaagatccaatgtgatctcatacgttacagtgaatgactctccagatagtgacagctctctgagctcaccctattcaaccgacacgctctctgctcttagagggaactctgggagcgtgttagagggccctgggcgagtggtagcggacggcaccggtacccgaacaattattgtcccccctcttaaaacgcagctgggggattgcaccgttgccacgcaggcttccggcctcctcagcaataagacgaagcctgtggcgtctgtctccggtcaaagctccgggtgctgtataacacccactggctatcgagctcaaaggggagggactagcgcagcgcagcctctgaacctgagccagaaccagcagagcagcgctgccccaacatcacaggagcgcagtagcaacccagcgccaaggaggcagcaagcttttgtagcccctttgagccaggccccatatacgttccaacacggctccccactgcattccacaggtcatccccacctggcccctgctcctgcccaccttccttctcaggcacacctgtacacttacgccgctccaaccagcgctgctgcactgggcagtacgtctagtatcgctcacctcttttcccctcagggcagttcaaggcacgccgcagcctacaccactcacccatctactctcgttcaccaggtccccgtgagcgtcggaccttcattactcacgtctgcctctgtcgcacccgcacagtaccaacatcagttcgccactcaaagctacatcgggtcctcccgcggaagcaccatatacacgggttaccctctctcaccaactaagatatcccagtacagctatctgtag

SEQ ID NO: 28803 - DNA, 3633 bp, synthetic construct
  source 1..3633: mol_type = other DNA; note = Synthetic coding sequence
atggcatcacagctgcaggtgttcagcccaccctcagtgtccagtagtgccttttgttccgccaagaaactcaagattgagcctagcggctgggatgtctcaggccaaagctcgaatgataaatattacacgcactctaagaccctcccggcaactcaaggacaggctaactcttctcatcaagtggctaattttaatatcccggcatatgaccaggggctgctccttcctgcacccgctgtcgagcatatagtggtgactgctgcagatagcagcggatcggccgctaccagtactttccagagttctcagaccttaactcacagaagtaacgtttctctcctggaaccctatcagaaatgcggtttgaaacggaagagtgaggaggtggattccaatggatctgtccagattatagaagagcaccctcctctgatgctgcagaataggacagtcgtgggtgccgcagctactaccacaacggtcacgactaagtcaagcagctccagcggagaaggtgattaccaactcgttcaacatgagatcctttgttcaatgaccaactcatatgaagtcttggaattcttagggaggggcacgttcggtcaagtggctaagtgctggaaacggtccacaaaggagattgttgctattaaaattcttaagaatcacccctcatacgcgagacaggggcagatagaagtctccattctctcacggctgtcaagcgagaatgctgacgagtataattttgtccggagctatgagtgtttccagcacaagaatcacacttgtctggtgtttgagatgctggagcagaacctgtatgacttccttaaacagaacaagtttagcccgctgccactaaaatatatccggcctattctgcagcaggtggctacggcattgatgaaactgaagtcattagggctcatccacgcggatctcaagcccgaaaatattatgctggttgaccctgtgagacaaccttatagagtgaaggttatcgactttgggagcgctagtcacgtatccaaagccgtttgttctacctacttacagtctcggtattacagggcgcctgagatcattttgggcttgcctttctgcgaggctattgacatgtggtcactaggctgcgtaatcgcagaactgttcttgggctggcccctgtaccccggtgcctcagagtatgatcagattagatacattagtcagacacaaggcctccctgccgaatatttgctttccgctggcacaaaaacaacccgattcttcaatagagacccaaacctcggctacccgctctggcggctgaagactcccgaagagcatgagctcgaaaccggaatcaagagtaaagaagccagaaagtatatcttcaattgtcttgacgatatggcgcaggtgaacatgtccaccgacttagagggcaccgacatgctggccgagaaagccgaccgtcgcgagtatattgatctgttaaaaaaaatgttaacaatcgatgcagataagagaatcactccacttaagacacttaatcaccaattcgtcacgatgactcatcttctcgactttccccattctaatcacgtgaaaagctgctttcagaatatggaaatttgcaaaagaagagtacatatgtatgacacagtgagtcagattaagtctcctttcaccacgcacgtggctccaaacacatcaactaacttgacaatgtccttctccaaccagcttaacaccgtccacaaccaggcaagcgtgcttgcgagttcgtccacagccgctgctgccacactctccctggctaattcagacgtttctctactcaactaccagagcgccctgtacccttcaagcgcagcccctgttcccggtgtcgcccagcagggagtgagtctgcagcctggcacaactcagatctgtacccaaactgaccccttccagcagactttcatcgtctgccctcccgcttttcagaccgggctccaggcaacaacaaagcatagtggctttcctgtgcgtatggacaacgccgtgccaattgtgccacaggctccagcagcccagccccttcagatccagtccggggttctgactcagggaagctgcacacccctgatggtggcaacccttcacccacaggtggcaactattacaccacagtatgccgtaccctttacacttagttgcgctgccggtaggcctgccttagtcgaacagaccgccgctgtgctccaggcttggccgggtggaacgcagcaaatcctgctaccaagcacctggcagcagctcccgggagtggccctgcacaacagcgttcagcccactgcaatgattcctgaggcaatgggctcaggccagcaactggccgactggcggaacgctcacagtcacggaaatcagtacagtactatcatgcagcagcctagtttgttgaccaaccacgttactctggccacagcacagccactcaacgttggtgttgcacacgtagttcggcagcagcagtccagcagccttccatcaaaaaagaacaaacagtctgcgcctgtgtctagcaagtcctctctcgacgtgctgccttcacaagtgtattccctggtcgggtcctcccctctcaggacgacatcatcttacaacagcctcgtaccagtccaggatcagcaccagcctataatcatcccagacactccctctcctccagttagtgtgatcacaatccgctccgatactgatgaagaggaggataacaagtataagcctagcagtagcggactgaagccaaggtctaacgtgatcagttacgttacagtgaatgactctcctgacagtgactcgtctctctctagcccatatagcaccgataccctgtctgccctacggggaaactccgggagcgtgctggagggccctggaagagtcgttgctgatggaaccggaacacggactattattgttccccctctcaaaacccagcttggggactgcacagtggctactcaggccagcggactcctgtctaataagacaaaaccagtggcgtcagtaagcggccagtcttccggatgctgtatcacacctacagggtatcgcgctcagcggggtggaacctctgccgctcaacccctgaatctctcccagaaccagcagagttccgctgcaccaacttcacaggagcgcagttctaaccccgcaccccgaaggcaacaggcgtttgtggctccattgtctcaagccccttacacgttccagcacggttctcccctccattctaccggccatcctcatctggccccagcccctgcacacctacctagtcaggcacacctgtatacttatgcggcacccaccagcgctgccgctttgggatctacgtctagcattgctcatttgtttagtccccagggttcctcccgtcacgctgccgcttacacaactcatccctccactctggttcatcaggtgcctgtgagcgttggaccgtctttactaaccagtgctagcgtggccccagcacagtaccaacaccagtttgcaacacagtcctatatcggatcatcacggggttccaccatttacacagggtatcctctgtcaccaacgaaaatcagtcagtactcctatctatag

SEQ ID NO: 28804 - DNA, 3228 bp, synthetic construct
  source 1..3228: mol_type = other DNA; note = Synthetic coding sequence
atggcgagccaattgcaggtgttctcgccaccgtccgtgtccagctcagccttttgcagcgcaaagaagctcaagatcgagcccagcggatgggatgtatccgggcaatcatccaatgataagtattatacccactctaagacacttcctgcaacccagggccaggctaactcctcccaccaggtagccaattttaatattccggcttatgatcaggggttgttgctgcctgcacccgctgtggagcatatcgtcgtcaccgccgctgattcctccggatcggctgccacaagtacatttcaatcctcgcagacattgactcatagaagcaacgtaagcctgctggaaccatatcaaaagtgtggcctcaaacggaagtctgaagaagttgattcaaacggcagtgtccaaataatagaggaacacccacccttgatgctgcaaaatcggaccgtggtgggcgctgcagccacaacgactacggtcacaaccaagagtagctcctcatcaggggaaggtgactaccagctggtgcagcacgagatcctgtgttccatgactaattcctacgaggtactagaattccttggacgaggcacttttggccaggtagccaagtgctggaagaggtcgactaaggagatcgtggcgattaagatcctgaaaaaccatccatcttacgccagacaaggacagatcgaagtgagcattcttagccgccttagtagtgaaaacgctgacgagtataattttgttcgctcatacgaatgcttccagcataaaaaccacacctgcctggtattcgagatgctggagcagaacctgtacgattttctgaagcagaataaattcagccctctccctttgaagtacatccggcctattctgcagcaggtcgcaacagcactcatgaagctcaagtcacttgggctcattcatgccgatttgaagcccgagaacatcatgttggtggatcccgtgagacagccctacagggtcaaagtcattgacttcggatccgccagccatgtatctaaggccgtctgttctacttaccttcaatctcggtattacagggccccagaaattattctcggcttaccattctgtgaggccatcgacatgtggtctctgggctgcgtgatcgccgaactattcctaggatggcccctttaccctggggcatcagagtacgatcaaatccgctacatatcccagacgcagggattgcctgctgagtatcttttgtcagctggaacgaagacaacacggttttttaatagggatcccaacctgggttatccattgtggcgactgaaaactccagaagagcacgaacttgaaactggcataaaaagcaaggaggcccgtaaatatatcttcaactgtcttgacgatatggctcaggttaatatgtctacagatctcgaaggaaccgatatgcttgccgagaaagcagatcgtcgggaatacatcgatctgctgaaaaagatgctcactatcgacgcagacaaacgcattactccgctcaagaccctaaaccaccagttcgtcactatgacacacctgttggattttccgcactccaatcatgtgaaatcttgctttcagaacatggagatttgcaagaggagggtgcatatgtacgacactgtgtctcagatcaagagcccttttactacacatgtcgcccctaacacatccaccaatttaaccatgtcttttagcaaccagctcaataccgtccataaccaggccagcgtgcttgcttcaagcagtaccgcggcagcagccacactaagcctagctaatagcgacgtgtcattactgaactaccagagcgctctgtacccatcctcagctgcacccgtgccgggagtcgctcagcagggagtgtccttgcagccaggtaccacccagatctgcacacaaaccgatccattccagcaaacatttatcgtgtgccccccagcctttcagaccggactgcaggccactaccaaacactccggattcccagtgcggatggataatgcggttcccattgttcctcaagcgccagctgctcagcctcttcaaatccagtcaggggtattgacgcagggttcatgtacacccctgatggtagccacattacacccacaggtggccaccattacaccacagtacgcggtaccttttactctaagttgcgctgccggtagacccgctctagtcgaacaaactgccgctgtgctgcaggcatggcctggtggtacccagcagattctgttgccttcaacctggcagcaactccctggagtggccctgcacaattcggttcagcctactgccatgattcccgaagccatgggatctggccaacagctcgcagattggagaaatgcccatagtcatggaaatcaatacagtaccatcatgcagcaaccttcgcttctgaccaatcacgtgacattagcaaccgcccagccactgaatgttggggtcgcccatgtcgttcggcaacagcagtcatcaagcctacccagcaaaaagaacaaacagtctgccccagtgtcctctaagtcgagtctcgacgtactgccaagccaggtctacagtcttgtgggctcttcgccactgaggactacctcctcatacaatagcctggtgcctgtgcaagaccagcaccagcctattattattcctgacacaccttccccccctgtgtcagtaatcacaatccgcagcgatacagatgaagaagaagataataagtacaagccatcgtcttccggtctgaaaccccgtagcaatgtgatcagttatgtaaccgtcaacgattctcctgattctgactcttccctgtctagtccttactcgactgatacgctgagtgccctgcggggaaactctggcagcgtcctagagggcccaggacgcgtggtggcagacggaactgggacaaggaccataattgtgccgcctctgaaaacacagctcggcgactgcactgttgccactcaggcgagcgggcttctttctaacaagacgaaaccagtggcctccgtgagtgggcagagctctgggtgttgtatcacacctacaggttacagggcccagcgtggtgggaccagtgctgcccaaccgctcaatcttagtcaagtcagtgcgatgggatattgcctcttatttggaccgtgtaccgtggtgaccttttggcgaactctgctgctcgcgggatgctag

SEQ ID NO: 28805 - DNA, 543 bp, synthetic construct
  source 1..543: mol_type = other DNA; note = Synthetic coding sequence
atgcaggcagaagggcaggggacgggcggatcaacaggcgatgccgatggacccggaggcccagggattcctgacggacctggagggaatgccggtggcccaggcgaagcaggagctaccggtggaagggggccaagaggcgcaggagctgctcgcgctagtgggcctagaggcggagcccctcgagggccacacggtggggctgcatctgcccaggacgggaggtgcccatgcggagctcggcgacccgattcccggctcttgcagttgcacataaccatgccattctcctcacctatggaggcggaactcgtaaggcgcatcctgagccgggacgccgcacccctcccgaggccaggagctgtgctcaaagactttactgtatcaggcaatcttctttttatcaggttgaccgccgctgatcatcgccagctgcaactgtctataagcagctgccttcagcagctctccctgctcatgtggattacacagtgctttttgccagttttcctggctcaggcccctagcgggcagcgtagatag

SEQ ID NO: 28806 - DNA, 717 bp, synthetic construct
  source 1..717: mol_type = other DNA; note = Synthetic coding sequence
atgtctgaggacctggccaagcaactggcgtcatataaagcacagttgcagcaggtcgaggctgcattgtccgggaacggagagaacgaagaccttctgaaactcaaaaaggatctgcaagaagtcatcgaactgacaaaagacctgctttcaacccagccttctgagacactggcatcatctgatagcttcgcctcaacccagccgacacatagctggaaagtgggtgataagtgtatggccgtgtggtcagaagatggacaatgttatgaggctgaaatcgaagagattgacgaggaaaatggaactgcagccataacctttgccggttacggaaacgctgaggtcaccccgctattaaacctgaagcctgtcgaggaagggaggaaggcgaaggaagactctggaaataagccgatgagcaagaaagagatgatcgctcagcagcgcgagtataaaaagaaaaaagctctgaaaaaggcccaaaggattaaagaactggaacaggagagggaagatcagaaggtgaagtggcagcagttcaacaatcgcgcatattctaaaaataagaaaggccaagtcaagaggtctatctttgcctctccagaaagcgtgactggaaaggtgggcgttgggacatgcggcattgccgataagccgatgactcagtaccaggatacttcaaagtacaatgtccgacatttgatgcctcagtag

SEQ ID NO: 28807 - DNA, 717 bp, synthetic construct
  source 1..717: mol_type = other DNA; note = Synthetic coding sequence
atgtccgaagaccttgctaaacagcttgcctcatataaggctcagctgcagcaggtggaagctgccctaagtggaaatggcgagaacgaagatctgctgaaactgaaaaaagatcttcaggaagtcattgaattgacgaaggacctgctgtccacccagccatcagagacactggctagtagtgatagtttcgcaagcacacagcctacccactcctggaaggtgggagacaagtgtatggccgtttggtcggaggacggtcaatgctacgaagctgagatcgaggaaatcgacgaggagaatgggacagcagctataacatttgctggttacgggaacgcagaagtcacccccctgttaaatctgaagccagtggaggaagggagaaaggctaaggaagattccggcaacaagccgatgtccaagaaggaaatgatcgcacagcagcgcgaatataaaaaaaagaaagctctcaagaaggctcagcgaatcaaggagctagagcaagaacgcgaagaccagaaagtcaaatggcaacagttcaacaatcgggcatatagcaaaaataagaaagggcaggtgaaaagatcgattttcgcctcccctgaatccgtcacaggcaaggtcggcgttggcacttgtgggattgccgacaaacccatgacgcagtaccaagatacatctaaatacaacgtccggcatttgatgccacagtag

SEQ ID NO: 28808 - DNA, 2229 bp, synthetic construct
  source 1..2229: mol_type = other DNA; note = Synthetic coding sequence
gatttatccagcggtggcggtattgagccacagtgctcatctgaggtgtattttagggccagagaacggggatgcgaaaacgtagcttggtctcttgggctcaggtcgcattgcttcctggaagcagagttgcatcccctgccttggttcctacctactaatgtttgtagccctttgcccggagccgcacacaaattggtttgctacttcactaattgggcccactcaagacccggtcctgcctctatacttccacacgacctagatccctttctatgtactcacctgattttcgctttcgcctccatgaataacaatcagatcgtggccaaagatctccaggatgaaaaaatcctttaccctgaatttaacaagctgaaagagcggatgtggcagcagctgccaacaggcgtgaagaatcctgcccaccaacccagtctctcccaccacagaaatagagagctgaaaaccttgctgtcaatcggcggttggaatttcggaacatctagatttactaccatgctttccacctttgctaaccgggagaaattcattgcttccgttatctccctgcttcgtactcacgacttcgatggactggacctgtttttcctgtatcctggcctccggggttcacctatgcacgatcgctggacgtttctgtttctgatagaggaacttctttttgccttccgcaaagaggctttgctgactatgcggcctagactgttgctgagcgcggcagtttctggcgtgccacacattgtgcagaccagctacgacgtgcggtttctaggacgactgttggacttcataaatgttctgagttacgatctgcatggatcttgggaaagatttactggtcacaactcccccctgttctccctaccagaggaccctaaatctagcgcctatgcgatgaactattggcgcaagctcggggctccttcggaaaagttaataatgggtatccccacttatggcaggaccttccggctcttgaaagcctcaaagaacggacttcaggccagggccattggtccagctagtcctggcaagtatacgaaacaagaaggattcctagcctattttgaaatttgtagctttgtgtggggtgccaagaaacactggatcgattaccagtacgtcccttatgccaataaaggcaaagagtgggtaggatacgataatgcaatctctttttcctataaagcctggtttattcgtagggagcacttcggaggtgctatggtgtggacactggacatggatgacgtccgtgggactttctgtggtacagggccattcccgttagtgtatgtgctgaatgatattctggtgcgagcggagtttagttctacctccttgccacagttctggctatcctcagctgtgaactcctcgagcactgaccctgagagactggccgtgactacagcttggactaccgatagtaaaattctgcctcccggtggagaggcaggggtcacagaaatacatggcaagtgtgagaatatgacgattacaccacgaggaactacagtgactccgacaaaagaaactgtaagcctggggaaacacacagtcgctctgggagagaaaacagaaatcaccggcgctatgactatgacttccgtgggccatcagtcaatgacacccggagagaaggctctgaccccagtgggtcaccagtctgtgaccaccgggcagaagaccctgacatccgttggatatcagtctgtaacacctggcgagaaaacactcacacccgtgggacaccagtcagtgactcctgtcagtcatcaaagtgtttctcccggaggtacaaccatgacccctgtgcattttcagactgagactcttcggcagaacactgtggccccacgacggaaggccgttgccagggaaaaggtaacagtcccctccagaaacatctctgtgactcctgagggccagacaatgcctctgcgaggcgaaaacttaaccagtgaggttggtactcatcctaggatgggaaatctcggacttcagatggaagccgaaaatcgaatgatgctgagtagttctcccgtcatccagttaccagaacagacacctctagccttcgacaataggttcgtccccatctacggcaaccacagcagcgtgaattcagtaaccccacagaccagtccactttccctgaagaaggagataccagaaaattcagccgtggatgaggaggcctag

SEQ ID NO: 28809 - DNA, 2037 bp, synthetic construct
  source 1..2037: mol_type = other DNA; note = Synthetic coding sequence
atgtggaagctgctcctgtgggtgggtctagtgctggtgctgaagcaccatgacggcgctgctcacaaactggtgtgctacttcacaaattgggcccacagccgccctggccctgcctctattctgcctcatgatctggacccatttctatgcacccatctcatattcgctttcgcttcaatgaataataatcagattgtagccaaggacttgcaggatgaaaagatcctttacccagaatttaataagttaaaggaaaggaatcgcgaattaaaaacgctgttgagcatcggcggatggaactttggaacaagtaggtttacaactatgcttagcacgttcgccaatcgcgagaagtttatcgcctcggttatcagtttgcttaggacccatgatttcgacggcctagatctgttcttcctgtatccaggcctgcggggttcccccatgcacgatagatggacattcctctttctcattgaagagctgttgtttgcttttcgcaaagaggctctgctcaccatgcgccctcgactgctgctgagtgcagctgtgtccggtgtgccacacatcgtacaaacctcatatgacgtgcgcttcctcgggaggctgctagacttcatcaacgttctgagctacgacttgcatggctcctgggaacggttcacaggacataattctccattgtttagcctgcctgaagacccaaaatcaagtgcatatgccatgaattattggcgcaaactcggcgctcccagcgaaaagctgattatgggcatacccacctacggcagaacctttcgactcctgaaggcctccaagaatggcctgcaagccagggcaattgggccagcctcccccggaaagtacaccaagcaggaggggttcttggcctatttcgagatatgtagctttgtctggggcgcaaagaaacactggatcgactatcaatacgtaccatacgcaaataaagggaaagaatgggtaggctacgataacgccatttccttttcctacaaagcctggtttattaggcgagagcactttgggggagctatggtgtggaccttagatatggacgatgtgcgcggtactttctgtggtacaggccctttcccactggtgtacgtcctcaacgatatccttgtgagagcggagttctcctccactagtctgccacagttctggctgagttcagccgtgaactctagctcaactgacccggaaaggcttgcagttaccacagcttggacgaccgatagtaagatcctgcctccagggggagaggctggcgtaactgagatccacggcaaatgtgagaatatgaccattacgcctcgaggtacaacagtgacacccacaaaggagacagtctccctcggtaagcataccgtcgctctgggcgagaaaactgagattacaggagcgatgacaatgactagcgtcgggcatcagagtatgactccgggagaaaaagcgctcactccggttgggcatcagagcgtgaccacaggtcagaagactctaacatccgtcggatatcagtcggtgacaccgggagaaaagactctgacccccgttggccaccagtccgtcacaccagtcagtcatcagtcagtgagccctggcggtacaactatgaccccagttcatttccagactgagaccctgcgacagaacactgtggcacccagaagaaaggctgtggccagagaaaaagtcacagttccttcaagaaacatctctgtgacaccagaagggcaaacgatgcccctgcggggagaaaatctgactagcgaagtcggaacgcacccacgcatgggaaatctaggattgcagatggaagctgaaaaccggatgatgctgtcatctagtcccgtcatccagctgcctgagcagaccccactggcattcgacaacaggttcgtcccgatttacgggaatcattcctccgtaaattccgtcacccctcaaaccagcccactcagcctgaagaaagaaatccccgaaaattcagctgtagacgaggaggcttag

SEQ ID NO: 28810 - DNA, 1005 bp, synthetic construct
  source 1..1005: mol_type = other DNA; note = Synthetic coding sequence
atgggaggtgcagtcagcgcgggagaagacaatgacgaactcattgacaatctcaaggaggcccagtacatccggacagagctcgtggaacaagccttccgcgcaattgatcgggcagattattatctggaagagtttaaggagaatgcctataaagacctggcatggaagcacgggaatattcatctgagtgccccttgtatttactcagaggtgatggaagctcttgacctgcaacccggtctgagctttttgaacttggggtcaggcacgggctacctctcaagcatggtgggcttaattctgggcccttttggggttaatcacggtgtggagctccattccgatgtgatcgagtacgcaaagcagaaactcgacttctttatcaggactagcgacagcttcgataaatttgacttctgtgagccctcatttgtgactggaaactgtctggagatatccccagattgtagccaatatgatcgtgtgtactgtggtgctggtgtccagaaggagcatgaggagtacatgaaaaacctattgaaggtgggcggaattctggtgatgcccctggaagagaaaccctgccactctgaatccgggaaatctcgcctggtgcagcttcccccagtggccgttcggtctctgcaagatctggcgcgaatagcaatcagaggaactattaaaaaaataatccatcaggaaaccgtatctaaaaatggtaatggcctcaaaaatacacccagatttaaacggcgacgtgtgagacgccgtaggatggagaccatcgtgttcctggacaaagaggtatttgccagtcggatctcaaatccatctgacgacaatagctgtgaggacctggaggaggagcgccgtgaggaagaggaaaaaactccacccgaaaccaaacccgatcctcctgtgaactttctcaggcagaaggtgctatccctgcccctacctgacccgctgaaatactacctgctctactaccgcgagaagtag

SEQ ID NO: 28811 - DNA, 1785 bp, synthetic construct
  source 1..1785: mol_type = other DNA; note = Synthetic coding sequence
atgtcgagacccagctctcgcgcaatctacctgcacagaaaggagtactcccaaaacctgacctccgaacccacattacttcagcatcgagtggagcacttaatgacttgtaaacaggggtcgcaaagggtccagggcccagaagacgctctccagaagctctttgagatggacgctcagggaagagtctggtctcaggatctgatcctccaagtccgggacggatggctgcagctgctggacatcgagactaaggaagagctggattcctataggctggactcgatccaggcgatgaacgtagctctcaacacatgctcttataactccattctctccataactgtgcaggaacccggtctgcctgggacgtctacgctgctttttcagtgtcaggaggtgggtgccgaaaggctgaaaactagtctccagaaagccctcgaagaagagcttgagcagagcaggcccaggctgggagggttgcaaccagggcaggatcgatggagaggacccgcaatggagcggcctctgcccatggaacaggcacgctacctggagcccggtattcctcctgaacaaccccaccagaggacacttgagcattccctccccccatccccgcgtccactcccgagacataccagtgcacgcgagccgagcgcttttacactacccccaccaagacgctcatcttctcccgaggatcccgaaagagacgaggaggtgctcaaccatgtgctgagggacatcgagctgtttatgggaaaactggagaaggcccaggccaaaacctcgcgcaaaaaaaagttcggcaagaaaaacaaggaccagggcggactaacccaggctcagtacattgattgttttcagaaaattaaacactcttttaaccttcttggccgtctggccacctggttgaaggagacttcagcgcctgaattagtgcatatattattcaagtctcttaatttcatcctggcaaggtgccccgaagccggactcgctgctcaagtaatctctccgctcttgacacccaaagccataaatttgctgcagtcctgcctgtctccccctgagtcaaatctgtggatgggcttaggccctgcatggacaacctcaagggccgattggacaggggatgagcctctgccttatcagcctacctttagcgacgattggcagcttcccgagcctagctcccaggcaccccttggttaccaggaccccgtgtccctgagacggggtagccacagactcgggagtactagtcattttccacaggaaaagacacacaaccacgatccgcaacccggagacccaaacagccgaccatcaagccccaaacccgcacaacccgcactcaagatgcaggtgctctatgagtttgaggcaagaaaccctcgcgagttgacagttgtgcagggagagaaattggaggtactggaccattctaagcgatggtggcttgtgaagaacgaggccggaagatccggttatattccctctaatatcctggaacccctgcagcctggtacgccaggcacgcaggggcagtcacccagtcgagtgcccatgctgcgtctctcctccaggcccgaagaggtgaccgattggttgcaggcggagaacttttccacagccactgtaaggaccctgggaagcctgacaggtagccagcttctgcgaatccggccaggggagctgcagatgctgtgtcctcaggaggcccctcgcattttatccaggctggaggccgttcgtaggatgttggggattagcccctag

SEQ ID NO: 28812 - DNA, 1500 bp, synthetic construct
  source 1..1500: mol_type = other DNA; note = Synthetic coding sequence
atgagttttggaagtgaacattacctctgttcaagcagcagctaccgaaaggtcttcggggacggatcgagactttctgccagactctctggcgcagggggtgccggaggatttcggtcccagagcttgagtcgcagcaacgtggcaagtagcgcagcatgttcctccgcttctagccttggactgggcctggcttaccggagacctcccgcatcagacggtcttgatttgagccaggctgcggctaggacaaatgaatataagatcatccgaactaacgaaaaggagcagctgcaaggtttgaacgatcgcttcgccgtgttcatcgaaaaagtccatcagttggagacgcagaatagagccttggaggcagagctcgctgcacttcggcagcggcacgccgagccatcacgtgttggggagctgttccaaagagaactccgcgatcttagggcccagctcgaagaggcatcctctgcacgcagccaggctctgctggagagggacggcctcgccgaagaggttcagagattgcgcgctcgatgcgaggaggagtctagaggacgtgagggcgctgagcgggcattaaaggctcagcaaagagacgtggacggagcgaccctggccagactcgacctggaaaagaaggtggagagcctactggatgagctcgccttcgtcaggcaagtgcacgatgaggaggttgctgagctgctggcaactctccaagccagttcccaggccgcagctgaggtcgatgtcactgtggcaaaaccggatctcacctcagccctgagagagattcgcgctcagtacgaaagtttggctgcgaagaatctgcagtcggcggaggagtggtacaagtctaagttcgcgaatctgaatgaacaagcagcaagaagtacagaggccatcagagcctcacgtgaggaaattcatgagtatcgacgccagctgcaagcgagaacaattgagatagaggggctgcggggagcgaacgagagcttagaacgacagatccttgaactggaagagcggcattcagccgaagttgcaggataccaagattccattggacagcttgagaacgacctgcgtaacacaaaaagcgagatggccagacatttaagggagtaccaagatcttttgaatgtgaaaatggctctcgatattgaaattgccgcttacaggaagctgctggagggcgaggagactcggttcagcactagcgggctgtctatatcaggccttaatccgctgcctaatccatcctatctcctgcctccaaggatactgtccgcaactaccagtaaggtcagcagtacgggactttctttgaaaaaagaagaggaggaagaggaggcctcgaaagtggcatcaaaaaaaacaagtcaaattggcgagtcctttgaagagattctggaggagaccgtgatctccacaaaaaagacggaaaaatccaatatagaagaaaccaccatctccagtcagaagatttag

SEQ ID NO: 28813 - DNA, 1131 bp, synthetic construct
  source 1..1131: mol_type = other DNA; note = Synthetic coding sequence
atggagagttacgacgtcatcgccaatcagccagtcgtcattgacaacggcagcggggtaattaaggctggcttcgcaggcgaccagatcccgaagtactgcttcccaaactacgtgggacgcccaaaacacgtcagagtcatggctggcgctctggagggcgacatcttcatcggtccaaaggctgaggaacacaggggcttgctctctattcggtacccaatggagcacggcatcgtcaaggattggaatgatatggagcgcatctggcagtatgtctattctaaggaccagctgcagaccttctccgaggagcaccccgtcctgctgacggaagctccgctgaatccccgaaagaaccgtgagcgagcagctgaggtcttcttcgaaactttcaacgttccagcactgtttatttccatgcaagcagtgctctccctatatgcaacgggcagaactaccggtgtggtactggatagtggtgacggcgttacccacgcagtgccaatttacgagggcttcgcaatgccacatagtattatgcggatagatatcgcgggtcgggacgtgtctaggttccttaggctttacctacgaaaagagggatatgattttcacagcagctctgagttcgaaatagtaaaggctataaaggaaagggcttgttacctaagcattaatccacaaaaagacgagactctagagaccgagaaagcacagtattacctgcccgatggctctacaatagaaataggcccttcacgttttagagcccctgagttactcttccggcctgatctcattggggaggaatcagaagggattcatgaggtcctggtgttcgccatacaaaagtccgatatggatctgagacgaactctgttctctaatattgttctaagtggaggctcaacattatttaagggattcggcgatcgcctgctaagtgaagtcaaaaagctcgctcccaaagatgtgaagattcgcatctcagctccacaggaacggctgtattcaacctggataggcggatctatcctggccagcctggatacgttcaaaaaaatgtgggtgtctaaaaaagagtatgaagaagatggcgctcgttcaattcatcggaaaacattttag

SEQ ID NO: 28814 - DNA, 783 bp, synthetic construct
  source 1..783: mol_type = other DNA; note = Synthetic coding sequence
atgtccctacagaagacgccacccaccagggtttttgtggaacttgtgccctgggccgacaggagtcgggaaaacaatctagcctccggcagggaaactctcccgggactgcggcaccctttgagtagcacccaggcgcagaccgccacacgtgaggttcaggtgagtggcacctcggaggtttccgcaggacctgacagggcacaggtggtcgtgcgcgtgtccagcacgaaagaagccgcagccgaagccaaaaagtccgtatgtaggaggctggactatattacccagagcctccagcagcagggtgtgcaagccgagaatatcacagtcacgaaggactttcggagggtggaaaatgcataccacatggaagcagaagtttgcattacctttactgagttcggtaagatgcagaatatatgtaattttcttgtggagaagctggattccagcgtggtcatctctccaccccaattctatcacacacccggatccgttgaaaatctgagaagacaggcctgcctggtcgcagtggagaatgcttggcgcaaggcacaggaggtgtgtaacctggttggtcagacactgggtaagcccctgctcattaaagaggaagagacgaaggagtgggagggccaaatcgacgatcaccaatcaagtcggctcagctcctcactgaccgtccaacagaaaatcaagtccgcaaccatccacgcggcaagtaaagtattcattaccttcgaggtgaaaggcaaggagaagagaaaaaaacacctgtag

SEQ ID NO: 28815 - DNA, 891 bp, synthetic construct
  source 1..891: mol_type = other DNA; note = Synthetic coding sequence
atggagccctcaggaggtgaacaggagccaggggcagtaaggtttctagacttgccttgggaggacgtgctgcttcctcacgtcctcaaccgggtgccactgagacagcttctgaggctccagagagtatctagggcatttaggtccttggttcagctgcacctggccggactgaggcgattcgacgcggcacaagtggggcctcagattccaagggcggctttggcgagactgctgcgagatgctgagggcctccaagagctggctctggcaccctgccacgagtggctcagcgatgaggatttggtccctgtgctggcaagaaacccacaactgcgatcggtcgccctcggcggttgcgggcagttgagcagaagagctcttggagcgctggctgaaggctgtcccagactacaaagactcagcctcgcccattgcgattgggtggatggactagccctccgaggcctggccgacagatgcccagcgttggaggaactcgatctgacagcgtgtcgccagctgaaggacgaggccatagtatatttggcgcagcggaggggcgctggccttcgctccttgtcgttggctgtcaatgccaacgtgggggatgctgccgtgcaggagttagccaggaattgtcccgaattgcatcatctcgatctgaccgggtgtctccgggtcggatcggatggggtgcggactttggctgagtattgtcccgtgctccggagccttcgtgtccggcactgccaccatgtcgctgagtcctcattgagtcggctgcgaaagagaggcgtcgatattgacgtggaacctccactgcaccaggccttggttctcttgcaggacatggccggttttgcaccattcgtgaatctgcaggtttag

SEQ ID NO: 28816 - DNA, 2100 bp, synthetic construct
  source 1..2100: mol_type = other DNA; note = Synthetic coding sequence
atggctgatgctggcattcgcagggtggtgccctctgacctgtacccattggtgctgggcttcctacgcgacaaccagctctccgaggtggccaataaatttgccaaagccacgggtgccactcaacaggacgccaatgcctcttccttgctggacatttacagcttttggctcaaaagtgccaaagtcccggaaagaaagctacaggccaacggcccagtggcaaagaaggctaaaaaaaaggcgtcgagctctgactcagaagattcttccgaagaagaggaggaggtgcagggaccaccagcaaaaaaagctgccgtgccagcgaaacgtgtcggtctccccccagggaaggcggcagcaaaggccagtgaatcctcgagtagtgaggagtcctccgatgacgacgacgaggaggatcagaaaaagcagccagttcagaaaggggtgaagcctcaggcaaaggctgctaaagctcctccaaagaaggccaaatccagtgatagcgacagtgactccagttctgaagatgagccgcctaagaaccagaaacctaagataacacctgtaactgtgaaagctcaaactaaagctcctcccaagcctgctcgagctgcgcctaagatagctaatggaaaggccgcaagctcttctagcagtagcagttccagctcctccagcgatgattcggaggaagaaaaagcagcagcaacacctaagaaaactgtaccgaagaagcaggtggtggcaaaggcgcctgtgaaagcggctaccactccaactcggaagtccagctcaagcgaggactcgagttccgacgaggaagaagagcagaagaaacctatgaaaaacaagcccggtccttactcaagcgtgccacctccatctgccccaccaccaaaaaaaagcctgggaactcaaccaccaaagaaagcagtagaaaaacagcaaccagtggagtcctcagaggatagcagcgatgaaagtgactcgtccagcgaagaagagaagaaacctccaactaaagccgtcgtcagcaaggccacaacaaaaccaccccctgctaagaaggcggctgagagttcgagtgactccagcgactcggactctagcgaggatgacgaagctcccagcaaacctgcaggcaccacaaaaaattcgtccaataagccagctgtaactactaaatctcccgcagttaagcccgctgcagcccctaagcagcccgtgggaggcggtcagaaactgctcacaagaaaagctgatagctcatccagcgaggaggagtcttctagctctgaagaggagaagactaagaaaatggtagcgacgacaaagcccaaagcaactgctaaagccgctctttccctgcctgcgaagcaggcgcctcagggctctagagattcatcctcagactctgactcctcttcttccgaggaagaggaggagaagaccagtaagagcgctgtgaagaagaagccgcagaaggtggccggaggggctgccccaagtaaaccagcgagcgccaaaaagggaaaagcagagtcttccaattcttcatcctccgatgactcctcggaagaggaggaggagaaactgaagggcaagggcagtcccaggccccaagcacctaaagcgaacgggacctctgccttaacagcacagaatggtaaggctgccaaaaacagtgaggaagaggaggaagaaaaaaagaaagcagctgtcgttgttagcaagtccgggtcattaaaaaaaagaaaacagaacgaagccgcaaaagaggctgaaacaccccaagcaaaaaaaattaaactgcagactccgaacacttttcccaaacgtaagaagggagaaaagagagccagctccccttttcgccgagtccgggaggaggagattgaagtggacagtcgagtcgcagacaactcattcgatgcgaaacgcggagcagcaggggattggggggagcgcgctaaccaggtattaaagttcacgaaggggaaatctttcagacacgagaaaactaagaaaaagagggggtcataccgcggtgggtccattagcgtgcaagtgaattcgattaagttcgactcagaatag

SEQ ID NO: 28817 - DNA, 1275 bp, synthetic construct
  source 1..1275: mol_type = other DNA; note = Synthetic coding sequence
atggaggagaacaacctgcagtgttcttcagtggtggatggaaactttgaggaagtcccaagagagaccgccattcagtttaaaccaccgctataccggcaaaggtatcaattcgtaaaaaacctggttgaccagcatgagcccaaaaaagtggctgacctggggtgcggagacacatcactgctgcggcttctgaaagtaaatccttgcatcgaacttctggtcggagtggacatcaatgaggacaagcttagatggaggggggattccctggctccattcctgggagatttcctaaaaccccgtgacttaaaccttaccataactctctaccatggctctgtggtcgaacgagatagccggctcttaggcttcgatttgataacatgtatagagctcattgaacaccttgattcaggcgacctcgcccgtttccctgaggtggtcttcgggtacctgtccccctctatgattgtcattagcaccccgaactccgagttcaaccccctcttcccaagcgtgactctgcgtgattctgaccacaagttcgaatggacacgcatggaattccaaacatgggccctgtatgtggctaatcggtacgactattcggtcgagttcaccggagtaggggaaccccctgccggtgcagagaatgtagggtattgcacacaaatcggaattttcaggaagaatggtggtaaagccaccgagtcgtgcctaagcgaacagcacgatcagcacgtatacaaagccaggcaaggattaaccatgctgcctcggttggtgcttaattttcatcctcaggcgattctccttccccatcttccaaagatgttgaggcttcaggtgttcaccacgagttacccttcacttcagcaggagcgattctttaagctggttcttgttaacgaggtatcccagcaggtggagtcgctgcgagtgtcacacctgcccagaagaaaggaacaggccggtgaaaggggggataagcctaaggacattggcggaagcaaagcaccggtaccatgctttgggcctgtatttacagaggtagaaaaagctaaaattgagaactcccccacccctttctgtgtgggtgataagttctttgttcctctgcagaggctacttgcctaccctaaactaaacaggctgtgtgccaatgaagagatgatgaggtcggtgatcgctgactccataccactgagctcagatgggtccgccgtggtggctgacctccgcaattatttcgatgagcagttcgagttttag

SEQ ID NO: 28818 - DNA, 1182 bp, synthetic construct
  source 1..1182: mol_type = other DNA; note = Synthetic coding sequence
atggaagagaacaatctgcagtgttccagcgtcgtcgatgggaattttgaggaggtccccagggagaccgctattcaattcaagcctccgttgtatcgtcaacggtatcagtttgtaaagaatttagtggaccagcatgagcccaaaaaggttgccgacctggggtgcggagatacatctctcttacggcttttaaaggtcaacccctgtatcgagctgttggtgggcgtcgatattaacgaagataaacttcgctggaggggggatagcctagccccattcctgggtgactttctgaaaccgcgtgatctgaaccttaccatcaccctctaccacggatcagtcgttgagcgggactcacggctcctgggcttcgatctgatcacctgtatcgaacttatcgaacatctggattccggggatctggccaggtttcctgaagtggtgtttggatacctgtctccgtccatgatcgtcatcagtacacccaattccgagttcaacccgttattcccctcagtaaccctgcgagattccgaccacaagttcgagtggacacgcatggagtttcagacgtgggccctctacgtggcaaacagatacgactacagtgtcgaattcacaggggtcggcgagccccctgccggtgccgagaacgtaggatactgcacccagataggcattttccgaaaaaatggcggaaaggctactgagagctgcctgagtgaacagcatgatcaacatgtgtataaggctgtgttcacgacaagttaccccagcctccagcaggagcggttttttaagcttgtgcttgtgaatgaggtgtcacagcaagtcgagtctttaagagttagccacttgccaagacggaaggagcaggctggagaacgaggcgataagcctaaagacatcggtggaagcaaagcccctgtgccgtgcttcggcccagtgtttactgaagttgagaaggcaaagatagagaactcacctaccccattctgcgtgggagacaagttctttgtcccactgcaacgattactagcctatccaaaactaaatcggttgtgcgcgaatgaagaaatgatgcgcagcgtgatcgcagactcgattccacttagtagcgatggctctgccgtggtggccgacttgcggaactacttcgacgagcagttcgagttttag

SEQ ID NO: 28819 - DNA, 1701 bp, synthetic construct
  source 1..1701: mol_type = other DNA; note = Synthetic coding sequence
atgtccgcttcaacgggaggcggtggagacagtggcggtagtgggggaagtagctcgagcagccaagcctcttgcggacccgaaagcagcggatccgagctggctctcgccacccctgtgccacaaatgcttcagggattgctgggctcagatgacgaagaacaggaggatcccaaggactattgcaaaggcggatatcaccctgtcaaaatcggggacgtcttcaatggtcgctatcacgtggtgaggaagttgggttgggggcatttctcgaccgtgtggctttgctgggacattcagagaaaaagattcgttgccctcaaggtggtcaagagcgccggtcattatactgagactgccgtcgacgaaattaaactgctcaagtgtgtcagagattctgatccaagcgacccgaagcgtgaaacaatcgtgcagctgatagacgatttccggatctccggagttaacggcgtgcacgtgtgcatggtgctggaagtgctagggcatcagctgctgaagtggatcattaagtcaaattatcaggggttaccagtgccatgtgtgaagagcattgttcgacaagtactgcacggactggactatctgcatactaagtgtaagatcatacacaccgatattaaacccgagaacatcctgctgtgcgtgggcgacgcatacatcaggaggctggcagcggaggccacagagtggcagcaggccggagcaccccctccttcccgctctattgttagtactgccccacaagaggtactcacagggaagctgagcaagaacaagcggaaaaagatgaggcggaagcgcaaacaacagaagcgattactggaagaaagactacgtgaccttcagcgcctcgaagcaatggaagctgccactcaggcagaagactcaggcctcaggttagatggtggttccgggtcaacgtccagttcaggatgccatcctgggggagctcgcgcaggaccttcccccgcaagcagtagcccggctcccggtggaggcagatccctgtccgccggtagccaaaccagcggtttcagcggctctttattctcccctgcgtcatgttccatcctctccggatccagcaaccagcgcgaaaccggaggccttctcagcccgtctacccccttcggagcgagcaacctgctggtgaatcctctggaacctcagaatgccgacaagataaagatcaaaattgccgatctcggaaatgcttgctgggtccataagcacttcactgaggacatccagactagacagtaccgggctgtcgaagtcttgattggcgctgaatacggccctcctgcagatatttggtctactgcctgcatggcgttcgaactggcaacaggcgattatctctttgaaccacactccggggaagattatagcagggacgaggaccacatcgcgcacatcgtggagctgttgggcgatattcctcccgcatttgccctctctggcaggtatagtagagagttcttcaatcgacgaggagagcttcggcacattcacaacctcaagcattgggggctctacgaggtgctcatggagaagtacgaatggcccctggagcaggcaacgcagttcagcgcgtttctgctgcctatgatggaatatattcccgaaaagcgggcatctgctgccgattgcctgcagcacccatggctgaatccgtag

SEQ ID NO: 28820 - DNA, 150 bp, synthetic construct
  source 1..150: mol_type = other DNA; note = Synthetic coding sequence
atggccggaccacgcgtggaggtggatggatctatcatggaaggcggtggtcaaatcctgagagtgtcaactgccctatcttgcctgctcggattgccactgcgcgtgcagaagatcagggccggtagaagcacccccggtttgagatag

SEQ ID NO: 28821 - DNA, 1101 bp, synthetic construct
  source 1..1101: mol_type = other DNA; note = Synthetic coding sequence
atggccggtccacgagtcgaggtggatggatcaatcatggagggtggtggacaaattctgcgggtgtccactgccttgagctgcctcctagggttacccttacgcgtgcaaaagatcagagccggtaggagcactccaggcttgcgacctcagcatttatccggccttgagatgattcgggatctttgcgatgggcaactggagggtgccgaaattggctcaaccgagatcaccttcacgccagaaaagataaaagggggaattcatacagccgacaccaagaccgctgggtccgtttgtttactaatgcaggtgtcgatgccgtgcgtcctttttgccgcttctccatctgagctgcacctgaaaggcggaactaacgcggaaatggcccctcaaatagattacacagtaatggtgttcaaaccaatagtggaaaaattcggcttcatcttcaattgcgacattaagactagagggtactacccaaaaggcggtggtgaggtgatcgtgaggatgtccccagtgaaacaactgaatcccatcaacctcaccgaaagaggctgcgtcaccaaaatctacggccgtgcgtttgtggccggagtgcttccattcaaggtcgctaaagacatggccgcagccgcagtgcgctgcatccgcaaggagattcgggacctgtacgtgaacattcagcccgttcaggaaccaaaagaccaggcctttggaaatggtaatggcatcattatcatcgccgagaccagcactggctgtctattcgcaggatcctcactggggaaaaggggggttaatgcggataaggtgggaatcgaggccgcagagatgttgctggccaacttgcgacatggtggtacagtggatgaatacctgcaggaccaactaatcgtattcatggcattggctaacggggtgtcacgcattaaaactgggcctgtgaccctgcacactcagactgccatacattttgctgagcaaatcgctaaggccaaattcatcgtcaaaaaatcggaagacgaagaggatgccgcaaaagacacatatataatcgaatgtcagggcatcggcatgaccaacccgaacctatag

SEQ ID NO: 28822 - DNA, 1155 bp, synthetic construct
  source 1..1155: mol_type = other DNA; note = Synthetic coding sequence
atggaggggctgggtagaagctgcctgtggcttagaagagaactctctccacctcgcccacgcctgttgctgctcgattgtcgcagtagggaactgtatgagagcgcgcgtatcggaggagcactgagcgttgcgctgcccgctctcctgctccgcagattacggaggggaagcctaagcgtgagggctctcctgccaggcccacccctccaacctccaccgccagcccctgtcctgttgtacgatcaaggcggaggtcgccgacggaggggcgaagcagaagctgaagcagaagaatgggaggccgaatccgtgctaggcaccctcctgcagaagctgagggaggaaggttacttggcctactatctccaggggggattcagccggtttcaggcagagtgcccgcacttgtgcgagacaagcctcgccggtcgcgcaggatcatcgatggcgcctgtgccaggtcctgttccagttgtaggactcggttccctctgtctgggttccgactgctccgatgccgagtccgaagctgatcgggacagtatgagttgtggcttggacagtgagggagccactcccccacctgtgggcctcagagccagttttcccgtccagatactacctaacttgtatttaggctccgccagagatagtgcaaacctggaatccttagccaaactggggataaggtacatactgaatgttactcctaatctccctaacttttttgaaaaaaacggggatttccactataagcagataccaatcagtgatcactggtcacagaacctttcacgcttttttcctgaagccatagagtttatagacgaggcattatcccaaaattgcggagtgttagtgcactgcctagctggcgtatccaggagtgtgaccgttacagtggcatacctgatgcagaaactccacctgagtctgaacgacgcgtacgatctagtgaaacggaagaagtctaacatttctcctaacttcaattttatgggtcaactgctggacttcgaaagaagtctgcgtttagaggagaggcacagtcaagagcagggatccggcggtcaggcttccgccgcaagcaatcctccatccttttttaccactccgactagcgatggcgctttcgaattggcgcctacctag

SEQ ID NO: 28823 - DNA, 804 bp, synthetic construct
  source 1..804: mol_type = other DNA; note = Synthetic coding sequence
atggccgaaccagtgcaggaggagctgagcgtgcttgcagccattttctgccgtcctcacgagtgggaggtcctttctcgtagtgagaccgacggcaccgtattcagaatacacactaaggccgaggggttcatggacgttgacataccgttggagctggtgttccatctgcctgtcaattaccccagctgccttcccggtattagcattaacagcgaacagttaacccgcgctcagtgtgttactgtgaaagaaaacctactggaacaggcggaaagcctgctgtctgagcccatggttcatgagctcgtgctctggatacaacagaacttgaggcacatcctatcacagccagaaacagggtcaggctcagagaaatgtacttttagcacctccaccacaatggacgacggtctgtggatcacgctcttacacttggaccacatgcgggctaaaacgaaatacgtgaagatcgtggagaagtgggccagtgatctgagattaaccgggaggctgatgtttatgggcaagatcatcttaatcctgctgcagggagaccgaaataacctgaaggagtacctgatcttacagaagactagcaaagtagatgtagattccagtggcaagaagtgtaaagagaagatgatttccgtcttatttgagaccaaggtgcaaacagaacacaagagatttttagcgttcgaggttaaggagtactctgcgcttgatgagcttcagaaggagtttgagacagcaggcctcaagaagcttttcagcgaatttgtactggcactggtcaaatag

SEQ ID NO: 28824 - DNA, 2010 bp, synthetic construct
  source 1..2010: mol_type = other DNA; note = Synthetic coding sequence
atggcaatcgtgcagaccctgccagtgccattagaaccagcgcctgaggccgctactgcccctcaggctcctgtgatggggagtgtgtcctccctgatcagcgggaggccatgtcccggtggtccagcaccacctcggcaccacggcccacctggacccactttttttcgccagcaggatggtcttctcagggggggttatgaggcccaggaacccttgtgccctgctgtccctcccaggaaggcagtcccagtaaccagttttacgtacatcaacgaggacttcagaacagagtcccctcccagccccagtagcgatgtagaggacgcccgagagcaaagagcgcacaatgctcacctgagaggaccaccgcctaagcttatccctgtgagtggaaaattggaaaagaatatggagaaaatccttatcagacccaccgcctttaagccagtactcccaaagcctagaggcgcaccaagcctgccaagtttcatgggtccacgggcaacaggattgagcggaagccaggggagtctaactcagctgttcggaggacctgctagttccagctcatcatcttcctcctccagcgccgctgataagccactggccttcagcggctgggcctcaggctgcccatcaggcactctgtccgattccggtagaaactcactgtcctctctccccacctactccactggcggagcggaacctacaacctcctcccctggagggcacctgccttcacacggctctgggcgtggagctctaccgggtcccgcacggggtgttcccactggccctagtcatagtgatagcgggaggagctccagctccaagtcaaccgggtcgttgggaggcagagtggcaggaggcctgcttgggtcgggcactagagcctctccagacagttcatcgtgtggcgaacgtagccccccaccaccccctcccccaccatctgatgaagcactgttacattgtgtccttgaggggaagctgcgagacagagaggctgagctgcagcaactacgcgacagcctggatgagaacgaggccactatgtgccaggcttatgaggagcggcagagacattggcaaagggagagggaggctttgagagaggattgtgcagctcaggctcagagggctcaaagagcccagcagctgctacagctccaggtgttccagctccaacaggagaaacggcaattgcaagacgattttgcgcagctgcttcaagagagagagcaactagaacggcgatgcgctacactcgaacgcgagcaacgcgaactgggcccaagactggaagagaccaagtgggaggtatgccagaagtccggtgaaatctcactgttaaaacagcagctgaaagagagccaggcagaactggttcagaaaggatcggagctggttgcgctgcgggtagccctgagagaagcccgagctaccctccgggtcagcgagggaagggcaagaggcctccaggaggctgctagagctcgcgagctggaattggaagcttgcagccaggagttacagcggcaccgccaggaagccgagcagcttagagaaaaagcaggacaactggatgctgaagcagctggcctgagagagccgccagttccaccagctaccgccgatccatttttgttagcggagagtgatgaggccaaggtgcagagagcggcagctggcgtcggcggttcattacgggcacaggttgagagactgcgggtggagctgcagagagagcgccgtaggggcgaagagcaaagggactcgtttgagggtgagcgtctagcctggcaggccgagaaagaacaagttatcaggtaccagaagcaattacagcacaactacattcagatgtatagacgcaatcgccaactggagcaggagctgcaacagctttcgttagagttggaagcccgtgaactggccgacctgggtctggctgaacaggctccatgcatatgccttgaagaaattacagctaccgaaatttag

SEQ ID NO: 28825 - DNA, 2010 bp, synthetic construct
  source 1..2010: mol_type = other DNA; note = Synthetic coding sequence
atggcgattgtgcaaacattgcccgtgcccctggagccagcacccgaggcagctaccgcccctcaggcccctgtcatgggaagtgtgagcagtctcatctccggacgtccttgccctggcggtcccgcacccccacggcaccacgggcctccgggtcccaccttctttcgccaacaggatggcttgctgagaggaggctatgaggcccaagaaccactgtgtccagccgtcccccctaggaaagccgtgccggtcacgtcgttcacctacataaacgaggattttcgcaccgagtccccgccatctcccagctccgacgtggaagacgcacgggagcaacgcgctcacaacgcacaccttaggggccctcctcctaagctgatccccgtatcgggcaaactggagaagaacatggaaaaaattctaataaggcctacggcctttaagccagtgctcccaaaaccgaggggtgctccttctttacccagctttatgggcccacgggcaacagggctaagcggtagccagggcagcctgacacaactgttcggagggccagctagctctagctccagttcaagctcatcttctgctgccgataagccacttgctttctcgggctgggccagcgggtgcccgagcgggaccctgagcgatagcggtaggaacagcttgagtagcctgcctacctacagcaccggaggggctgagcctaccacgtccagtcccggaggtcatctgccgagtcacggatctggcagaggggcactcccagggcctgcccgaggggtccccaccggcccttcccatagcgatagtggtcgttcaagtagcagtaagagcactggctctctgggaggcagggttgcgggagggcttcttggaagcgggacaagggcatccccagatagttccagctgcggggagcgatccccacccccacctcctccgcctccctcagacgaagctctattacattgtgtcttggagggtaaattaagggatcgcgaagccgagctccaacagctgcgggattcactcgacgagaatgaagctaccatgtgccaggcgtatgaggaacggcagagacattggcagagagaaagagaggccctgcgcgaagattgtgccgctcaggctcaacgggcacagcgggctcaacagttgcttcaactgcaggtcttccaattgcagcaggagaaacggcagctgcaggacgacttcgctcaactcctgcaagaaagggagcagttggagcgcagatgcgcgacattagagagggagcagcgagaactgggtccccgtctggaggagaccaaatgggaggtgtgccagaagagcggagagatctcgttattaaaacagcagctgaaagaatcccaggctgaactagtgcagaaggggtccgagctggttgcgttacgcgtggccttgcgtgaggcacgggctaccctccgcgtatccgaagggagagctcggggactgcaggaagccgctcgggctcgagagctggagcttgaggcctgctcacaggagctgcagagacaccggcaagaggcagaacaacttcgggaaaaagccggtcagctcgacgccgaagcagcaggtctacgggagccccctgtgccccctgccactgccgacccatttttactcgctgagagcgacgaagcgaaagtgcaacgtgctgccgcaggggtgggaggttctctgcgcgctcaggtcgaacggctcagggtggagttgcaacgggagcgcaggcgcggagaggagcagcgggacagcttcgagggggagcggctggcctggcaggcagaaaaggagcaggtaatccgataccagaaacaactgcagcataactatattcagatgtaccggaggaacagacagctggagcaagagttacagcagctcagcttggagctcgaggcaagagagctggctgatctgggcctcgccgagcaggctccctgcatctgtctggaggagataactgccaccgaaatttag

SEQ ID NO: 28826 - DNA, 1059 bp, synthetic construct
  source 1..1059: mol_type = other DNA; note = Synthetic coding sequence
atgaaactgaaagaattggagcggccagccgttcaagcctggtcaccagcatcccaatatcccctttacctggccactggaaccagcgcccagcagttggatagtagtttttccactaacgggaccctggaaattttcgaggtggatttcagggatcccagcctggacctaaaacaccggggagtcctgtctgccctctcccgttttcacaagttggtatgggggagctttgggagtggactcttagaaagcagtggggtcatcgtgggcggaggggacaacggaatgctgattttgtacaacgttactcatatcctgagctctggaaaagagcctgtgatcgcccagaaacagaagcacactggggctgtgcgtgcccttgatctaaatcccttccagggtaatctgttagcttccggggcaagcgattcagaaatattcatctgggacttgaataatctgaatgttcccatgacacttggcagcaagagtcaataccacgagcagccccctgaggatatcaaagctctcagctggaataggcaggcgcagcatatcctcagcagtgcacacccaagcggcaaggccgttgtctgggatttacggaaaaatgaacccatcattaaggtcagcgaccatagtaaccgaatgcactgcagcggtctggcttggcatcccgatattgctacgcaactggtgctatgttcagaagacgacagactgcctgtaattcagctgtgggatctgagattcgcgtcctccccacttaaggtgctcgagtctcactcacggggtatcctatcagtctcatggtcccaggccgatgctgaactgctgctcacgtccgctaaagactcccagatcttgtgtcgcaacctgggatcttctgaggtggtgtacaagcttcccacccagtcgtcctggtgttttgatgttcagtggtgtccccgagacccctccgtgttcagcgcagccagctttaatggatggatatcactgtactcggttatgggacgctcgtgggaagtgcaacacatgcgtcaggcggataaagtctag

SEQ ID NO: 28827 - DNA, 3540 bp, synthetic construct
  source 1..3540: mol_type = other DNA; note = Synthetic coding sequence
atgaaacttaaggaactggagcggccagctgtccaggcttggagtccagcctcccagtatcctctctatctggctacaggcaccagcgcccagcagctggactccagcttctctaccaacgggacactcgagatcttcgaggttgacttccgcgatccatctcttgacctgaaacatcgaggtgtgctgtctgccctgtcccgattccataagctggtctggggctcgttcggaagcggacttctggaatcctccggagttattgtggggggaggagataacgggatgctgattctctacaatgtcactcacatcctcagctcaggaaaggagccggtcattgcgcagaagcagaagcacactggggctgtgagggccctcgatctcaacccgttccaggggaacctgctcgcctccggagcttccgatagtgagatcttcatttgggacctcaacaatctgaacgtgccaatgactctgggatccaaatcccaacagccgccagaagacatcaaagcattaagctggaatcgtcaggctcaacatattttaagcagcgcccacccctccggaaaagcagtggtctgggacctcaggaaaaatgagcccattataaaggttagcgatcattctaatcgtatgcattgctccgggctggcctggcaccccgacatcgcgacacagttggtgttatgcagtgaggacgatcggcttccggttatccagctatgggatctccggtttgcgagtagcccattaaaagtgctggagtctcactcccgaggcatcctttcagtcagttggtcacaggccgacgccgaattgctgttgacatctgctaaggacagtcagattctgtgccggaatctgggttcctcagaggttgtgtataagctacccacacagagtagttggtgttttgatgtacagtggtgtcctagggacccatccgtgtttagcgccgcatcatttaatggctggatttcactatacagtgtgatgggtcgttcttgggaggtgcaacacatgcgacaggctgacaagatctctagcagtttcagcaagggtcaacccttgccacccttgcaagtacctgagcaggtcgcgcaggctccactcattccacccctcaagaagcccccaaagtggattagaagacctaccggcgtaagttttgcttttggaggtaaactggtcacgttcggactacctagtacccctgctcacctcgtgccccagccttgccccagattggtgttcatctcccaggtgacaactgagtcagaatttttaatgagatctgccgagctgcaagaagcattaggtagcggcaatctgctaaattattgtcagaacaaatcacagcaagctctcctgcagagcgaaaaaatgctgtggcaatttctgaaggttacgttggagcaggatagtagaatgaaattcctcaagttactgggatatagcaaagatgaactccaaaagaaggttgcgacttggctgaaaagtgacgtgggactgggggagtctccccagcctaagggaaacgaccttaatagcgaccgacaacaggccttttgctcccaggcttccaaacataccactaaagaggctagcgcttcctctgccttctttgacgagctagtgccacagaacatgactccatgggagatcccaatcaccaaagatatagatggcctgctcagtcaggccttactcttgggggaactgggtcccgcagtagagctgtgcctgaaggaagaacgctttgccgacgccattattctggcacaggctggagggacagacctcctgaagcagactcaggagcgctacctcgctaagaaaaaaaccaaaatctccagcctgctcgcatgtgttgttcagaaaaactggaaggatgtggtatgcacttgctctctcaagaactggagagaagctcttgcattgctcctgacatactccggcacagagaagtttccagagctatgtgatatgctgggtaccaggatggagcaggagggttctcgagctctcacctctgaggccagactgtgctacgtgtgctccggcagtgtagagcggctcgttgaatgttgggcaaagtgccaccaggccctgagccccatggcccttcaagatcttatggagaaagtgatggtgctaaaccgatctctggagcagctgcgtggtccacacggcgtctccccgggaccggctacaacctatagagtgacacaatacgctaacttgctggctgcccagggatccctagctacagctatgagttttctgccacgggactgcgctcagccacccgtgcagcagttgcgggatcgcctgttccatgcccaaggtagtgccgtgttaggccagcagagcccaccttttccttttcctcgaatcgtcgtcggagcgactctccatagcaaggagacctcaagctaccgtctgggtagccagccctcccatcaggttcccacccctagcccacggccacgcgtcttcaccccacagagctcgcccgcaatgccactggccccatctcacccatcaccataccaagggcctaggacacagaacatatcagactacagggccccaggaccacaggccatccagcccctgcctctgagccccggtgtcagaccagcaagcagtcagccacagttgctgggcggacagcgagttcaggtgcccaatcctgtgggctttcccggaacgtggcccctccctggctctcccttgccgatggcttgcccaggtataatgagaccagggtctacgtcactgcctgagacaccaagactcttcccccttctccccctccggcctctcgggcctgggaggatggtgtcgcatacaccagcccctcctgcttcttttcccgtgccatacctgcccggagatcccggtgcgccatgctcttctgtgctcccaaccacaggcatactgacgcctcacccaggaccacaggacagctggaaagaagcaccggctccgagaggcaacctacagagaaacaagctgcctgagacatttatgccaccggcacccatcacagcaccagtgatgtccttaacaccagagctacagggaatcttgccaagtcagcctccagtgagtagtgtgtctcatgctccacctggcgtaccaggcgagttgtcactgcagctgcagcatctgcctcccgaaaaaatggagcggaaagagctcccgcctgagcaccagtcgcttaaatccagttttgaggccctgctgcaacgctgtagcctgagcgcaacagacctcaaaactaagagaaaactggaagaagcagcacagaggctggagtatctctatgagaagctttgcgaaggcaccctctcccctcatgtcgtcgctggtctccatgaggttgcccgttgcgtcgacgcgggatcgttcgaacagggactggcagtacacgcacaggtcgcaggttgcagcagcttttctgaggtttctagttttatgcctatcctcaaggccgtcctgattatcgcccataaactactcgtgtag

SEQ ID NO: 28828 - DNA, 1635 bp, synthetic construct
  source 1..1635: mol_type = other DNA; note = Synthetic coding sequence
atggacgataagggtgacccttccaatgaagaggctcccaaggctatcaagcctacttccaaggaattcagaaagacatggggcttccgcaggaccaccattgcgaaacgcgagggagccggagatgccgaagcagatccgctcgagcccccacctcctcagcagcaactaggtttatcccttcggagaagtgggagacagcctaaacgcaccgaacgggtagaacaattccttactattgcaagacgacgcggacgcagaagcatgcccgtgtccctcgaggatagcggagaaccaacgtcatgccccgctacagacgccgagacagctagcgagggatcagtggaatctgctagcgagacacgctctggcccacagagtgctagcactgcggtgaaagagcggcctgctagctccgagaaggttaaggggggagacgatcacgatgacacctctgattctgactccgatggactgacattgaaagagctccagaataggctgcgacgcaagcgggaacaggagcctaccgagagacccctcaaggggatacagtcacgactccgtaagaagaggcgcgaagagggcccagccgagacagtgggtagcgaggccagtgatactgttgagggcgttttgccctcgaaacaagagccggaaaatgatcaaggcgtcgtatcccaggctggtaaggacgaccgggaatcaaagctggagggaaaggctgctcaagacatcaaagatgaggaacctggcgatcttggacggccaaagccagaatgtgaagggtatgatcccaatgccctgtattgcatttgtcggcagccgcacaacaatagatttatgatttgctgcgacagatgtgaggagtggtttcatggtgactgtgtgggcataagcgaggccagggggaggctgctggaaagaaatggcgaggactatatttgcccgaattgtactattctgcaggtccaggacgagacccatagtgagacagctgatcagcaggaggctaagtggagacccggagatgctgatggtacagattgcacatctatcggtacgatcgagcagaagtcatctgaagatcagggtatcaagggcagaattgaaaaggctgcaaacccatccggaaagaaaaagctgaagatctttcagcctgttattgaggcgccaggggctagtaagtgcatcggccctggctgttgtcacgtcgcccagcccgactcagtgtattgtagcaacgattgcattctcaagcacgctgcagccacaatgaaatttctgtcctcaggtaaggagcaaaagcccaaaccaaaggagaaaatgaagatgaagcctgagaagccttccctgcccaaatgtggggcacaggccggtattaagatcagttcagttcataaacggccagcccctgagaagaaggagaccactgtaaagaaagccgtcgtcgtacccgcaaggagcgaggccctgggcaaggaggctgcttgcgaatcatctacacccagctgggctagtgaccataattataacgccgttaaacctgaaaaaaccgcagcgccaagtccttctctgttgtacaaatgcagtgggaaatactcctactccttgcaccccagtttaatcgcatag

SEQ ID NO: 28829 - DNA, 1689 bp, synthetic construct
  source 1..1689: mol_type = other DNA; note = Synthetic coding sequence
atggatgacaaaggggacccatctaacgaggaagccccaaaggccatcaagccaacatccaaagaatttcggaagacctggggattcagacgaaccacaatagccaagagagaaggagccggtgatgccgaagcggacccactggaacctccccctccgcagcagcaactcggccttagcctcaggcgtagcggccgacagcctaagcgaactgagcgggttgagcaatttctcaccatcgctagacgccgaggacggaggagcatgccggtgagcctggaggacagtggcgaaccaacatcttgtccagctacagatgctgaaactgcttccgaggggagcgttgaatctgctagcgaaactcgcagtggacctcaatcagcatccacagccgttaaggaaaggcctgcttcttctgagaaagtcaagggcggtgacgatcacgatgacacatctgactccgactctgatggcctgactctgaaagagcttcaaaatcgcctcagacggaaaagagaacaagagcctaccgagcgtcccctaaagggtatccagtctcgtctgaggaaaaaacgccgagaggaaggacccgcagaaactgttggctcagaagctagcgacaccgtagagggagtgttgccctccaaacaggagcctgaaaacgaccagggggtggtgtcacaggccggtaaggacgatcgggaatccaagctcgaaggaaaagcagctcaggacattaaggatgaggagccaggcgatttaggccgacccaagccagagtgtgagggatatgaccccaatgccctctattgcatctgccgccagccccataataaccgattcatgatatgctgcgacaggtgtgaagaatggtttcatggtgactgcgtgggaatctccgaggcaaggggcagactgctggaacgtaatggtgaggactatatctgccctaattgtaccatcctgcaagtccaagatgagacccactcagaaaccgccgatcagcaagaagcaaagtggcgccctggggacgcagatggaaccgattgcactagcataggtaccattgagcagaaatcgtcggaagaccaaggaattaaaggccgaattgaaaaggccgctaaccccagtggcaagaaaaagctgaagatctttcagcctgtcatcgaggcacctggagcctctaagtgcatcgggcctggctgctgccatgtggcccagcctgactccgtctactgttcaaatgactgtattctgaagcatgctgcggcaacgatgaagtttctttctagcggaaaagagcagaagccgaagcccaaggagaaaatgaagatgaagcctgagaaaccctctctgcccaagtgcggcgcacaggccggtatcaaaatttccagcgttcacaagagaccagctcccgaaaagaaggaaaccaccgtgaaaaaggcggtggtggtgcctgccaggtccgaagctctgggcaaagaggccgcttgtgaatcttcaactccttcctgggcctccgatcacaactataatgctgtcaagccagagaaaactgctgccccttctcctagtctcctctataaatgcatgtaccacctgggggtgggacttctcgacccttcacgttccttttggatcgctatcccctgggcttgcccaggcctgggggtggccgcattgtgttag

SEQ ID NO: 28830 - DNA, 1689 bp, synthetic construct
  source 1..1689: mol_type = other DNA; note = Synthetic coding sequence
atggatgacaagggcgatccctctaatgaggaggctcctaaagccatcaaacccacaagcaaagaatttagaaagacctggggctttaggaggacaactatagcaaagagggagggagccggagatgctgaggcagacccccttgagccaccacctcctcagcagcaactggggttaagcttaaggaggagcgggcgtcagccaaagcgtaccgagagagtagaacagtttctgactatcgccaggagacggggtcgccgatccatgcccgtgagccttgaggacagtggagaacccacctcttgtccagcgactgacgcggaaactgcctctgaggggtcagtcgagtcggcttccgagacccgaagtggaccccaatccgcctcaacagcagtgaaggagagaccggcatctagcgaaaaggtgaaaggtggcgatgatcacgatgacaccagcgattctgattctgacggtctcacattaaaggaattgcaaaatagactgcgccgtaagagggagcaggagcccacagaacgaccattgaaggggatccagagcagactcagaaagaaacggcgagaagaaggcccagccgaaactgtcggcagtgaggccagcgataccgttgaaggcgttctgccatccaaacaggagcctgaaaatgaccaaggtgtggtttcccaggcgggtaaagatgatcgggaatccaagctcgagggcaaggccgctcaggacatcaaagatgaagagcctggtgacctgggacgccctaagcccgagtgtgaagggtatgaccctaatgcactgtattgcatttgccgacagccacataataataggttcatgatttgctgtgataggtgtgaagagtggtttcacggggattgcgtgggaatctcagaggctagagggaggcttctggaacgcaacggcgaggattatatttgccctaactgcactatcctgcaggtgcaggacgagactcattccgagactgccgaccagcaagaagcaaagtggcgaccaggtgacgcagacggtactgactgtacatccatcggcaccatcgaacagaaaagttccgaagaccagggcatcaaggggcgtatcgagaaggccgctaatccttcgggtaagaaaaagttgaagatcttccagcctgttatcgaagcacccggtgcctcaaagtgtatcggccctggctgttgtcacgtggcgcagcctgattctgtatattgcagcaacgattgtatactgaagcatgcggcagcgaccatgaagtttctctcttccggcaaagaacagaagcctaagcccaaggagaaaatgaaaatgaagcctgaaaagccatccctgccaaagtgcggcgctcaggccggtataaagattagcagcgtacacaaaagacccgcacctgagaagaaggagaccacagttaagaaagccgtagttgtgccggctcgcagtgaagctcttggcaaggaggccgcttgcgaatctagcactccatcctgggcatccgaccataattacaacgctgtgaagccagaaaagacagccgctccatcccccagcctactgtacaaatgtatgtaccatctcggtgtggggctgttagatccttccagaagcttctggatcgccattccgtgggcttgtcctggactgggggtggcagctttgtgctag

SEQ ID NO: 28831 - DNA, 1272 bp, synthetic construct
  source 1..1272: mol_type = other DNA; note = Synthetic coding sequence
atggaggataagcgtagcctttccatggcgaggtgtgaggagcggaattcccgagggcaggaccacggcctagaaagggtcccatttcctccacagcttcagagtgaaacatatctgcatcctgcggacccttccccagcttgggatgacccaggatcaactggatcgcccaatcttcgacttctgactgaagaaatagcttttcagccccttgccgaggaggccagcttccgcagaccacatcccgatggagatgtccctcctcagggagaagataatcttctgagcttgccctttccgcagaagctgtggcgccttgtttccagcaatcagttctcttcaatttggtgggacgactccggcgcatgtcgcgtcattaaccagaaactgtttgagaaagaaatcctcaaaagagatgtggcccataaggtctttgccactacctcaattaaatccttttttaggcagctgaatctctatgggtttagaaaaagaaggcaatgtacattccgcaccttcacgcggatcttcagcgcgaaacgcctggtgtctatactaaataaattggagttctattgccatccttattttcagcgcgactctccacatctccttgtgagaatgaagcggagggtaggggttaagagcgcgcctaggcatcaggaagaagataagccagaggccgctggttcttgtctggcgccagctgacacagagcagcaggaccatacgtcaccaaatgaaaacgaccaggtcaccccccagcaccgcgagcccgcaggcccaaacacccaaattagatctggcagtgctcctcctgccacacctgtgatggtgccagactctgccgtggcatccgataacagccccgtgactcagcctgcaggcgagtggtcggaaggttcccaagctcacgtcacacctgtggccgcagtgcctggccctgccgcactgccctttttgtatgtgccgggtagtccgactcagatgaattcttacggccctgttgtagccctgcccacggctagcagatccacgctggccatggacaccaccggcttgcctgccccagggatgcttcctttctgccacttgtgggtacccgtaactctagtggcggctggggctgcccagcctgccgctagcatggtgatgttccctcatctgccggctctgcaccatcactgccctcactctcatagaacatctcaatacatgcctgcgtctgacggcccacaggcgtaccccgattatgccgatcaaagtacttag

SEQ ID NO: 28832 - DNA, 675 bp, synthetic construct
  source 1..675: mol_type = other DNA; note = Synthetic coding sequence
atgccaacactgtttaaaggggtgtggggggtcgtggaacacagccgtgccctgggcaggttctgtccagcatgtctgcctagcggcccacacttgcacacccaaccagcactgggaacggcagagatgacactgctcagttctcagtctagtagccttgtggctccttctggaagtgtgtccgcagaaaacccagagcaaaggatgctcgagaaacgagccaaggtgatcgaggaactgctgcaaacggaaagggattacatcagggatcttgagatgtgtattgagagaattatggtcccaatgcagcaggcccaagtgcccaacatcgacttcgagggactttttggaaatatgcagatggttattaaggtgtcaaagcagctcctcgcagcactagagatctctgacgcagtggggccagtgttcctgggtcaccgcgacgaactggagggcacgtataagatttattgtcaaaatcacgatgaggccattgccctcctggaaatttatgaaaaagatgagaagatccagaagcatctccaggatagtttggctgatcttaattccctggtgttgaaaaaaggatgtactaactatatcaatctgggtagcttcttaatcaagccggtgcaacgggtgatgcgatacccactccttctgatggagctgtag

SEQ ID NO: 28833 - DNA, 1878 bp, synthetic construct
  source 1..1878: mol_type = other DNA; note = Synthetic coding sequence
atgagactgccagaacggcacggaggacctcaaggaagcctctgtctgatggatccatgctgtccactgtcccttgccctgcaggacctagtcgagagggattgcaatggtgacacaccaaacctgtccttctacaggaacgagatacgatttttgcccaacgggtgttttatcgaggacattctgcagaactggactgacaattacgatctcctggaagataaccacagctacatccagtggctgttcccccttagggagccaggagtcaactggcatgccaaaccactaactcttcgcgaggtggaggtattcaaatcatcccaggaaatacaggaacggctcgtccgggcatatgaactcatgctgggattctatggtatcaggttggaggaccgagggactggtactgtcgggagagcccagaattatcaaaaaagatttcagaatctcaattggaggagtcacaacaatctccgaattacacggatccttaagtctctgggggaacttggcctggagcacttccaggcaccactggtccgcttcttcctcgaggagactctggtccgcagagaattgccaggcgtccggcagtccgccttagactatttcatgtttgccgtgaggtgtagacaccagaggaggcaacttgtgcactttgcctgggagcatttccgcccaagatgcaagttcgtgtggggaccccaagacaagttgaggagattcaagccatctagtctgccccatccactggagggtagccgcaaagtggaagaagagggctccccaggcgaccccgatcacgaggcttccactcagggtaggacatgcggccctgaacattctaagggagggggacgcgtcgacgaggggccacagccaagatcagtggagccgcaggacgccggtccgctggaaaggagtcagggagatgaagccggtggtcatggcgaagaccggcctgagccactcagccccaaggaatccaagaagcgcaagctggagttgtctcggcgagagcagcctccaactgaacccggaccgcagagcgcaagcgaagtagagaagattgcactgaacttggaagggtgcgcactctcccaaggttcccttagaacagggacccaggaagtagggggacaggacccgggagaggcagtccagccctgtcgacagccacttggcgcaagggtagcagacaaggtacggaaacgcagaaaagttgacgagggagcgggagactctgctgctgtggcgtccgggggagctcagacccttgctctggcaggcagcccagctccatccggacacccaaaggcaggccactctgagaatggcgtagaagaggacaccgagggcaggacagggccaaaagagggtactccaggatcaccctccgagacccctggtccaagccccgctggcccagcgggagatgagccggcagaatcgccaagcgagacccctggccctcggcctgccggtccagcgggagatgaacccgctgagtctcctagcgaaacacccggaccgagaccggcaggtcctgccggagacgaacccgcagagtctccttcagagaccccgggtccgtctcccgctgggccaactagagatgagcctgcagaatcgccctctgagactcctggccctcggccagctggccctgcaggcgacgagcccgctgaaagtccctctgaaactccagggccacgcccagctggccctgcgggtgacgagccagccgaatcccccagtgaaactccgggaccctcacccgcaggtccaaccagggacgaacccgctaaagcaggcgaagccgcagaactgcaagatgcggaggtagagagctccgctaaaagcggcaagccgtag

SEQ ID NO: 28834 - DNA, 1386 bp, synthetic construct
  source 1..1386: mol_type = other DNA; note = Synthetic coding sequence
atggatgaccctgattgcgacagtacctgggaagaagacgaggaagatgcggaggatgctgaggatgaggactgtgaggacggggaggcagcaggtgccagggatgctgacgcaggagacgaggacgaggagtctgaagaacccagagccgctagaccttcttccttccagtcccggatgactggaagccggaattggcgggctaccagggatatgtgtcggtacagacataactatccagatctggtggagcgggactgcaatggggacactccaaatctttccttctataggaatgagattcgattccttcccaatggttgttttatcgaggacattctgcagaattggaccgataactatgacctgctggaagacaaccattcctatatccagtggctattccctctacgggagccaggagtaaattggcacgcaaagccgctgacactaagggaagttgaggtgtttaagtcctctcaggagattcaggaacgcctggttcgcgcatacgaactcatgctcggcttctacggaatccggcttgaggaccggggaacaggaacagtcgggcgagcacagaactaccagaagcgatttcagaacctgaactggagaagtcataacaacctaagaattactcggatcctaaagtccctgggcgagctgggattagagcacttccaggctcctctggtcagatttttcctggaggaaaccctcgtgcgaagggagctgccaggtgtccgtcagagtgcactagattatttcatgttcgcagtgcgttgcagacaccagaggagacagttggttcacttcgcgtgggaacacttcaggcctcgctgcaagttcgtctggggaccgcaagacaagttgcggaggttcaagccttcatctcttccccaccctctagaagggagtaggaaagttgaggaagaggggtcgcccggagaccccgatcatgaggcatccacacaggggagaacttgtggaccggaacatagcaaagggggtgggagagtagatgagggcccacagcccaggtcagtggaacctcaggatgccggtccactggaacggtcccagggtgacgaggcagggggacatggagaagacaggcccgagcctctctcacctaaagaatctaaaaaaagaaagttagaactcagcagacgcgagcagccgcctactgagccaggaccacaatccgcgtcggaggtggaaaaaatcgcgctcaatctagagggttgcgccctgagtcaggggtcactgcgcactgggacacaggaggttggaggccaagatccaggggagagttcctgcccatgctgcaggggctggggcttgcgtagctgttgtggcctcccttccggatcagccagctag

SEQ ID NO: 28835 - DNA, 1539 bp, synthetic construct
  source 1..1539: mol_type = other DNA; note = Synthetic coding sequence
atgccttccccctccagatctggtagatcccgctgtttaaaagcaccgaggcgcagcaggtccggactcagcggcccaacatctagctgctgggcttctactatccgactggaggatagggggacagggactgtgggccgtgcacagaactatcagaagcggtttcaaaatctcaactggcggagccataataatctgagaatcacccggatcttgaagtcactcggcgagttggggctggagcacttccaggcacccctggtgagatttttcttggaggaaaccctggtcaggagagaactccccggagtccgccagtctgcactcgactactttatgttcgccgtgagatgtcgccatcaacgcagacagcttgtgcatttcgcgtgggaacactttcgcccacggtgtaagttcgtctgggggcctcaggacaagctcaggaggttcaagccttccagtctcccacaccctctggagggaagcaggaaggtagaggaggaaggaagtcctggcgatccagaccatgaagccagtacgcaaggcagaacttgcggacctgagcactccaagggtgggggaagggtggacgaaggcccacagcccaggagcgtggagccccaggacgcgggtcctctggagcggtcccagggggacgaggcagggggacacggggaggataggcctgagcctctctctcccaaagagagcaagaagcgcaaactggagctgtccagaagggagcaacctcccaccgagcccggaccacagtccgcctctgaggtcgagaaaattgctctgaatctggaaggctgtgccctttctcagggctctctgcgtactgggactcaggaggttgggggacaggacccgggagaggctgttcagccatgtagacagcctctgggcgctagggtcgctgacaaagtgcgaaagcgtcgaaaggtggacgaaggggctggtgattcagccgcagtggcaagcggcggtgctcagacgctggctttagccggttcccccgctccatcgggccacccgaaagctggccacagtgaaaacggggtggaagaagacaccgagggtaggacaggcccaaaggaaggcactcctggatctccatcagagacgcctggaccatctcctgccggtcctgccggtgacgaacctgccgagtcgccgtcagagacgccgggacctcgacccgctgggccagccggtgacgaacctgccgagtcaccatctgagacgccaggcccttcccccgcagggccaaccagagatgagccagccgagtcaccttccgaaacccccggacctaggcctgcgggtcccgcaggggacgaaccagccgaaagccctagtgagactccgggacctaggcccgcagggcctgccggagatgaacccgcagagagcccaagcgagactcctggtcctagcccagccggtcccacccgggatgagccagcgaaagctggagaggccgcagagctgcaggacgctgaggtcgaatcttcagctaaaagtggaaagccctag

SEQ ID NO: 28836 - DNA, 312 bp, synthetic construct
  source 1..312: mol_type = other DNA; note = Synthetic coding sequence
atgggacagcaatcaagtgtgagaaggcttaaacgctctgtgccttgcgaatctaatgaggcaaatgaagccaatgaggccaacaagaccatgccggagacaccaactggcgactctgatccgcagcctgctcccaagaaaatgaagactagtgagtcgtccactatcctggtggtgcgctaccggagaaacgtaaaacgtacatctcctgaggaactcgtgaacgaccatgctcgagagaacagaataaaccccgatcaaatggaagaggaggaattcatcgagatcaccaccgagcggccaaagaaatag

SEQ ID NO: 28837 - DNA, 1776 bp, synthetic construct
  source 1..1776: mol_type = other DNA; note = Synthetic coding sequence
atggaaaaagctgtcaatgatggatcccacagcgaagaactgttctgtcacttgaagaccatcagcgaaaaagaggacttgccccgatgtacatcagagagccatttgagttgcctcaagcaggatatcctgaacgaaaaaacagagttagaggcgacccttaaagaggccgaactcgtcactcatagcgtcgagcttctccttcctttgtttaaggacacgatcgagaagatcaactttgagaacgcaaacctgtcagcgttgaatctgaagatttctgagcagaaagaaatcttaatcaaagagctggacaccttcaaaagtgttaaactggccctcgaacacttactgcgaaagcgagattataagcagacaggcgataacttgtcatccatgctcctagagaaccttacagataacgaaagtgagaacactaatttaaagaaaaaagtctttgagaaggaagcccacattcaagaattgagttgcctttttcaaagcgagaaagccaatacactgaaagctaatcgctttagtcagagcgttaaagtagtccacgagagacttcagatccaaatccacaagagggaagccgaaaacgataaactgaaggagtatgttaagagccttgaaactaagattgcgaagtggaatctacagtcccggatgaacaaaaatgaggcaatagtgatgaaggaggccagtcgccaaaaaaccgtcgccctgaagaaagccagcaaggtgtataaacagcggttggaccattttaccggcgctatagaaaagctgacctctcagatacgagaccaggaagcaaagctgagcgagactataagcgcctccaatgcttggaagtcccattacgaaaagatcgtgattgaaaaaaccgaactggaggttcagatagaaaccatgaaaaagcaaattatcaacctgttggaggatctcaagaagatggaggaccacgggaaaaatagttgcgaggaaatcctacgtaaggtgcattccattgaatacgagaatgagaccctaaacctcgaaaacaccaagctgaagacaaccttagcagctctaaaggacgaggtcgtgtcagtggaaaacgaactgagcgaacttcaggaagttgagaaaaagcagaagaccctgatcgagatgtataagactcaggtccagaagttgcaggaggccgcagagattgttaaaagcaggtgcgagaacttgttgcataaaaacaatcagattaccaagacaaaaaataaaaatgtagagaaagtagacggtaaccacaatctcctgacaaagctatccttggaggaggagaactgcctgattcagctgaagtgcgagaacctgcagcagaaattggagcagatggacgccgaaaacaaagagctggagaaaaagctggctaatcaggaggagtgcctgaaacatagtaaccttaagttcaaggagaaatctgctgaatataccgcactcgcccgtcaactggaagcagctttggaggaggggcgtcaaaaggtggctgaggagatcgaaaagatgtcctcaagggagagcgccctgcagattaaaatattagatctagagaccgaactccgaaagaaaaacgaagagcaaaaccagttggtctgtaagatgaatagcaaggctcaacatcaagaggtttgcctgaaggaagttcagaacagcctggaaaagagcgaaaatcaaaatgagtccataaaaaactacctccaattcctgaaaacaagctacgtgactatgttcgagtag

SEQ ID NO: 28838 - DNA, 1935 bp, synthetic construct
  source 1..1935: mol_type = other DNA; note = Synthetic coding sequence
atggagaaggcggtcaacgatggcagtcacagcgaggagcttttctgccaccttaagaccattagcgaaaaggaggatttaccaaggtgtaccagtgagtcgcacctaagctgcctgaaacaggatattctcaacgaaaagacagaacttgaggcgacactcaaagaagcagaacttgtaacacactctgtggagctgctgctgcccttatttaaggatacgatcgagaagatcaacttcgagaacgccaacctgtcagccctcaatctcaaaattagtgagcagaaggagatactgatcaaagagctcgatacttttaaatctgtgaaactggccctggaacacttgctgcggaaacgtgactacaagcaaaccggtgataacctatcatcaatgttattggaaaatctgactgataatgagtccgaaaacaccaatttgaagaaaaaggtctttgaaaaggaagcgcatattcaggagctctcttgtctgttccagtctgagaaagcgaacacattgaaggctaaccgatttagccagtccgttaaagtggtgcacgagagacttcagatacagattcacaagagagaagcggaaaacgacaaattgaaggagtacgtgaagtctctagagaccaagatcgccaaatggaatctgcagtctcgtatgaataaaaatgaggctatcgtgatgaaggaggcatcgcggcagaagaccgtggccttaaaaaaagccagtaaggtatataaacagaggctggatcacttcaccggtgcaattgagaagctgacttcccagataagggatcaggaggccaagctcagcgagaccatcagcgctagcaacgcctggaagtctcattacgaaaagattgtaatcgaaaaaaccgagctggaagtgcaaattgagacaatgaaaaagcagattatcaatctgctggaagacctgaagaaaatggaagaccacggcaagaactcctgcgaagagattttacgtaaggtgcatagcattgagtacgagaacgagacactcaatctcgaaaacactaaactgaaaaccacgctggctgccctcaaagatgaagtagtctcagtagaaaacgaactgagcgagcttcaagaggtggagaaaaagcagaaaaccctgattgagatgtataaaacccaggtacaaaagcttcaggaggccgctgagattgttaagtcaaggtgcgaaaatctcctccataagaataaccaaatcactaagactaagaacaaaaacgtcgaaaagatgcgtggacagatggaaagccacctgaaggagctcgagcgtgtgtgcgattcactgaccgcagccgaaagacggttgcacgaatgccaagagagcctgcagtgctgtaaaggcaaatgtgctgatcaagagcacaccattcgcgaactgcagggccaggttgacggaaatcacaacttgctgacaaagttgagtctcgaggaggagaattgcctaattcagctgaagtgtgagaacttgcagcagaaactcgagcaaatggacgctgagaataaggaactagaaaaaaagctagctaatcaggaggaatgcctgaaacactccaacctgaagtttaaagagaagtcagccgagtataccgccttggctcggcaacttgaggctgcgctggaggagggcagacagaaagtggctgaggaaatagagaaaatgtccagtcgcgagtccgccctccagatcaagattctggaccttgagaccgagctgaggaagaagaatgaagagcagaatcagctcgtgtgtaaaatgaactccaaagcccagcaccaagaagtctgcttgaaggaggttcaaaattcattggagaagtcggaaaatcagaacgagtcaatcaagaactatctccagtttcttaaaacatcctatgtcacaatgtttgagtag

SEQ ID NO: 28839 - DNA, 2526 bp, synthetic construct
  source 1..2526: mol_type = other DNA; note = Synthetic coding sequence
atgatggcagacggagctgcagccggtgcaggtggcagcccttccctgagggaattaagggcaaggatggtggccgcagccaatgagatagccaaggaacgcagaaagcaggacgttgtgaatcgcgtggcaacccactcctccaatattcggtccaccttcaagcctgtgattgatggtagtatgctcaaaaatgacattaaacaacgccttgcaagagaacgcagggaggagaagcggagacaacaggacgcgaataaagagacacagttgcttgaaaaagaaagaaagaccaaactccaatacgaaaaacagatggaagagaggcagcgaaagttgaaggaaagaaaggagaaggaggagcagcggcgaatcgccgcagaagaaaagcggcaccagaaagatgaggcccagaaagagaaatttaccgcaattctgtacagaactctggaacggaggagactggcagacgattaccagcaaaaaagatggagctggggtggctcagcgatggcgaactctgagtccaaaaccgggaagaccgacaaagagaggtcatcatcacttaatagaagagattcaaatttgcactcctcaacagacaaagagcaggccgagcgcaagccgagagttacgggggtcaccaactacgtaatgcagtacgtcacagtgcctctgcggaagtgtacaagtgacgaactgagagccgtgatgtttcctatgtccactatgaagatacctcctcagacgaaagtagaggaaagccctctggagaaggtggagactcctcccaaggccagtgtcgatgcaccaccacaggtgaacgtggaggtcttctgtaacacaagtatggaagcatctcccaaggccggtgttggcatggcaccggaggtgagtactgattcattcccagtggtaagcgttgatgtctctcctgttgtgagtacctacgactcagaaatgtccatggatgcatcaccggaactgtctattgaggctctgcctaaggtggacttggaaacagtacctaaggtttctattgtcgcttcccccgaggccagccttgaagcccctcctgaagtgagccttgaggctttgcctgaggtcagcgtagaggccgctcccgaaggcagtcttgaagctccaccaaagggtagtgccgaggtggctccaaaggagtcagtgaaaggctcccccaaagagagcatggaggcatcccctgaggccatggtgaaggcctcccctaaaacatccctggaagcctctatggaagcaagccccaaggctaaggcccgagatgcccctaaaaagagcgagatggataaacaggccctcatccccattgccaaaaaacggcttagttcctataccgagtgttacaaatggtcatcatcgcccgagaatgcgtgcggcctgccctccccgataagtaccaacaggcagatccagaagaattgcccccctagtcccctgccattgataagcaaacagtccccacagacttcttttccatacaaaatcatgccaattcagcacaccctgtctgtccagagtgcaagctcaacagtgaaaaagaaaaaagaaaccgtcagcaagacaacaaacagatgtgaggccctctctcagcgacacatgatttacgaggaaagcggcaacaagtcaaccgcgggaataatgaacgccgaggcggctacgaagatcctgacggaactccgacggctggcacgggagcaaagggaaaaggaagaagaagagcggcagcgagaggaaatgcagcagcgagtgatcaaaaagagtaaggacatggctaaggaggcagttgggggtcaggcagaggatcacctgaaactcaaagacggtcagcagcagaatgaaaccaagaaaaagaagggatggcttgatcaggaggaccaagaagccccactgcagaagggtgatgctaagatcaaagcacaggaggaggctgataagcgtaagaaagaacacgaacgcataatgcttcagaacctgcaggaacggctggagaggaagaagagaatcgaggagattatgaagaggactcgaaaaacagatgtcaatgcttcgaaggtgacggaaaccagcagccatgatatatatgaggaggctgaggcagataatgaagaatcggataaggacagtctgaacgaaatgttcccatccgccatcttaaacggcacagggagcccaactaagttcaaaatgcctttcaataatgctaagaagatgacccacaagctcgttttccttgaggacgggaccagccaggtacggaaggaacccaagacgtacttcaacggtgacctcaagaactttaggcagaaatcgatgaaggataccagcatccaggaggtggtgagccgcccttcttcaaaacgaatgacgtcacatacaactaaaaccaggaaagcagacgagactaataccacaagtaggtccagcgcccagaccaaatctgagggttttcatgacattttacctaagtccagcgacaccttccgacagtag

SEQ ID NO: 28840 - DNA, 2577 bp, synthetic construct
  source 1..2577: mol_type = other DNA; note = Synthetic coding sequence
atgacatccccacgggtcgccgctgccaatgagattgcgaaagagcggagaaaacaggacgtagtcaatcgcgtggctacgcacagctctaacattaggtccacatttaagccagttatcgacgggtccatgcttaaaaatgatattaaacagcggctggccagggagcgaagggaggagaaacgacgacagcaggacgccaataaggagactcagttacttgaaaaagaacggaaaactaagctgcaatatgagaagcagatggaggaacgccagcgcaaactcaaagagcgcaaggagaaggaggaacagcgtagaatcgcagcagaggaaaaaaggcatcagaaggatgaagcacagaaggagaagtttaccgctattctgtaccggaccttggagcgcagacggttggcagatgactaccagcagaaacgatggtcttggggtggatccgcaatggctaatagcgagtcaaaaactgccaataaaaggtccgcgtccactgagaagttggaacaggggacctctgcactgatccggcaaatgcccctgtcaagtgccggactgcagaactcagtcgccaagaggaaaaccgacaaggagcgttcttcctcactgaatcggagagactcgaaccttcattcttctaccgataaagagcaggccgagcgtaagccgagagtgacgggtgtaacaaattatgtaatgcagtatgtgacagtgccactgcggaagtgtacaagtgacgaactgcgcgcagtcatgttccccatgagtaccatgaaaattccccctcagactaaggttgaggagtctcccttagaaaaggtcgaaactcctcctaaggcatcggtggatgcaccacctcaagtgaacgtcgaggtgttctgcaatacatcaatggaggccagtccaaaagcaggagtgggcatggcgcctgaggtttccacggactctttccctgttgtcagcgtcgacgtgagtcctgttgttagcacttacgactccgaaatgagcatggacgcgtctcccgaattgagcatcgaggctttgcccaaggtcgacctcgaaacagtgcctaaggtcagcattgtcgcaagtccagaggctagccttgaggcaccaccggaggtgagtctggaggccctaccagaggttagtgtggaagccgcacctgaaggctccctcgaggccccacccaagggttccgccgaagtcgctcccaaggagagcgtaaagggcagccctaaagagagcatggaggcgtctcccgaagcaatggtgaaggcgagcccaaagacaagccttgaagctagcatggaggcgtcacccaaagctaaggccagagatgcgcctaagaagtccgagatggataaacaggccctgatccctatcgccaagaaacgactgagttcctataccgaatgttacaagtggtcgtcgtccccagagaacgcatgcggactcccttcaccaatttccacgaacagacaaatccagaaaaactgtcccccatctccactgcccttgatcagtaagcagagtcctcagaccagctttccctacaagatcatgcctattcagcacacactgtctgtgcaaagcgcaagctctactgtgaagaagaagaaagaaactgttagcaaaaccactaacaggtgcgaggcgttgagccagaggcatatgatttatgaagaatccgggaataagtcgacagccggaatcatgaacgcagaggctgctaccaagatcctgaccgagctgaggcgcttggccagagagcagcgggaaaaagaagaggaggaaaggcaacgtgaggaaatgcagcaacgggtcattaaaaagtctaaggacatggccaaagaggctgttggtgggcaggccgaggatcacctcaagctcaaggacggccaacagcaaaatgagaccaagaaaaagaagggctggctcgaccaggaagatcaggaggcacccctccagaaaggcgacgcgaagatcaaagcacaggaggaagccgacaagagaaagaaggaacacgagcgtattatgctgcagaatctacaggagcgcctggagaggaagaagcgcatagaggagatcatgaagcggacaaggaagaccgacgttaacgcatctaaggtgaccgaaacctccagtcatgatatttacgaggaggccgaggcagacaacgaggaatctgacaaagactcgttgaatgagatgttcccctcagcaattttgaatggcacagggtcccccactaaatttaaaatgcccttcaataacgctaaaaagatgactcacaagcttgtgttcctggaggatggcacatctcaggtgagaaaggagcccaagacctacttcaacggggatcttaaaaattttcgccaaaaatcaatgaaagacacttctattcaggaagtcgtatctcgccctagctccaagagaatgacatctcacaccaccaaaacacgcaaggcggacgaaactaacacaacgtcccgcagttcggctcagacaaagtccgagggatttcatgatatactccccaaatccagcgatacattcagacaatag

SEQ ID NO: 28841 - DNA, 948 bp, synthetic construct
  source 1..948: mol_type = other DNA; note = Synthetic coding sequence
atgccgctgaagctccggggtaagaagaaggccaagagcaaagaaacagccggactcgtcgaaggagagcccaccggagcagggggaggctcactttcggcctctcgggctcccgctcgtcgcttggtgttccatgcacagctggcgcatggttcagctacaggcagggtggagggcttttcgtccatccaggaactgtacgcacagattgccggtgcttttgagataagcccctccgaaattttatactgtacgctgaatactccgaaaatagacatggagcggctgttaggcggacagctgggtttggaggattttatattcgcccacgtcaaaggaatcgaaaaggaagtcaatgtgtacaaaagcgaggacagccttggactgactatcacggataacggggtgggatatgcctttataaagcgaataaaggacggcggagtaatagatagcgtgaaaacgatatgtgtcggcgatcatattgagagcatcaacggggaaaatatagtcgggtggagacattacgacgtagccaagaaactgaaagagttaaagaaggaggagcttttcacgatgaagttgattgagccaaaaaaagcattcgagatagaactccggtctaaggccggaaaatcctccggtgaaaaaataggctgtggacgggctacactcagattgcgctcgaaaggccctgctacggtggaggaaatgccttccgagacaaaggcaaaggcaatcgaaaagattgatgacgttctggagctttatatggggatccgcgatatagacctcgcaactacaatgttcgaggcgggtaaggacaaagttaaccccgacgagtttgccgttgccctcgacgaaactctgggcgactttgcttttcctgacgagtttgtcttcgacgtgtggggagtgataggggacgctaaacgcagggggctctag

SEQ ID NO: 28842 - DNA, 2487 bp, synthetic construct
  source 1..2487: mol_type = other DNA; note = Synthetic coding sequence
atgactggatcaaacagtcatataacgatccttacccttaaggtcctgcctcactttgagtcgcttggcaagcaagagaaaatacccaacaaaatgtctgcattcagaaatcattgtccacacctggactctgttggggaaattactaaggaagaccttattcagaaaagtctagggacatgtcaggattgcaaggtgcagggccctaatctctgggcttgcctggaaaataggtgttcgtacgtgggttgcggagagtcacaggtggaccatagtactattcattctcaggaaactaaacactacctcactgtgaacctgaccactctgagggtgtggtgctatgcctgttctaaagaggtattcttggaccgaaaactgggaacacaacccagtctcccacatgttaggcagccccaccagattcaagagaattctgtacaggacttcaaaatcccaagcaatactactctgaagacccccctggtggctgtctttgacgacctggatatcgaagccgatgaggaagatgaattacgtgccagagggcttaccggattgaagaatattggcaacacctgttacatgaatgcagcactgcaggccctgagtaactgccctcccctcacgcaattttttctcgactgtgggggtcttgcgagaaccgacaagaaaccagccatctgcaaaagctacctgaaactgatgacggagctctggcataaatctaggcctgggagcgtcgtaccgaccaccctgttccagggcattaaaactgtcaaccctacatttagaggatattctcagcaggacgctcaggagttcttacggtgtctcatggacctattacacgaggagctcaaagagcaggtaatggaagttgaggaggatcctcaaactatcactacggaggagacaatggaggaggataagtcacaatctgacgtggatttccaaagttgcgaatcctgctctaactccgatagggccgagaatgagaatgggtcccggtgtttttccgaggacaacaatgaaactacaatgctgattcaggatgacgagaacaattcagagatgagcaaagattggcagaaggaaaagatgtgtaataagattaataaagtgaactctgagggggagtttgataaggaccgcgactcaatctctgagaccgttgacctgaataatcaagagaccgtgaaggtgcagatccactcccgagcttcagagtacattacggatgtacacagcaatgacttatctaccccacagatccttccctccaatgagggagtaaatcctcgcttgagtgcaagcccccctaaaagtggcaacctgtggcccggactcgctccaccacataagaaggcacaaagtgcatcgccgaaaaggaagaagcaacacaagaagtacaggagtgtcatttccgatatctttgacggcacaataatctcgagcgtgcagtgtctaacttgtgacagagttagtgtcacattggagacctttcaggacctgtctctcccaatccctggcaaggaggatcttgcaaagctgcattccagtagtcatcctacaagcattgttaaagcaggcagttgcggagaagcctacgccccacaagggtggatcgcttttttcatggagtacgtcaagtcctggttctggggtccagtggtgacactgcaggactgtctggccgctttctttgcccgagatgaacttaagggagacaatatgtactcgtgcgagaaatgtaagaagttgcgcaatggtgtaaagttttgtaaggtccagaattttccagagattttgtgcatccatcttaaacgttttagacatgaactgatgttctccacaaaaattagtacgcatgtgtcttttcccttggaggggctggaccttcaaccgttcctggctaaagatagcccagctcagatcgtgacctacgatctgttgtcagtaatttgtcatcacggtaccgcatcatccggacactatattgcctactgcaggaacaatttgaacaacttatggtacgaatttgatgatcagtccgtgaccgaagttagtgagtctacagtccagaatgcagaagcgtacgtccttttttacagaaaatcctcagaggaagcacagaaggagaggcgcagaatcagcaacctgctgaatatcatggaaccctccttgctgcagttttatatctctcgacaatggctgaacaaatttaaaacattcgccgagccgggacccatctctaacaacgatttcctctgtatacatggaggagtcccccctcgaaaagctgggtacattgaagatttagtgcttatgctcccccagaatatttgggataatttatattctcgctacggaggaggacctgctgtaaaccacttgtacatttgccacacttgccaaatcgaggctgagaagattgagaagagaagaaagaccgaactcgagatttttatcagagtcaaaaagtag

SEQ ID NO: 28843 - DNA, 2829 bp, synthetic construct
  source 1..2829: mol_type = other DNA; note = Synthetic coding sequence
atgacgggctcgaatagccacatcacaattctgacgttaaaggttttgccccactttgaatctctcggtaaacaggaaaagatcccgaataaaatgtctgcctttaggaaccattgcccgcaccttgactctgttggcgagattaccaaagaagacttaattcagaagtctctgggcacctgtcaggactgcaaggttcagggccctaacttgtgggcatgtcttgaaaataggtgttcctatgtaggatgcggtgaaagccaggtggaccacagcacgattcactctcaggagaccaaacactacttaacagtgaatctcacaaccctgagagtgtggtgctatgcctgttcgaaggaagtgttcctggatcgcaagcttgggacacagccaagcctcccccacgttagacagccccatcagattcaggagaactctgtgcaagactttaaaatcccatccaataccacactgaagacacctctagtggccgtgtttgacgacctcgatatcgaggccgacgaagaggatgaactccgggcaagaggcctcacagggctgaagaatattgggaatacctgttatatgaatgcagcattacaagctctgtcaaattgcccaccactcacccagtttttcctggactgcggcggtctagctaggactgacaagaaacccgctatttgcaaaagttacctgaaattgatgaccgagttatggcataagagccgaccgggaagcgttgttcccactaccctgttccaaggtattaagaccgttaaccctacattcagggggtattcccaacaggatgcacaggaatttctgcgctgcctcatggacctcctgcacgaggaactgaaggagcaggttatggaagtcgaggaggacccccagaccatcacaactgaggagaccatggaggaggacaaaagtcagtccgatgtggatttccagtcgtgcgagagctgcagcaactctgatcgcgcagaaaatgaaaatggcagcagatgtttctccgaagataataacgagaccactatgttaatacaggatgacgaaaataactcagagatgtccaaggattggcagaaagagaaaatgtgtaacaaaattaacaaagtgaattcagagggcgaatttgacaaagatagggattctatctcagagacagtagacctgaacaaccaggaaactgtaaaggttcaaatccattcacgggcatctgaatacattacagatgtccattccaatgatctctcaacgccgcagatcctgccatccaacgaaggagtgaaccccagactgtcggcttcaccacccaaatccggcaacctctggcccggtctggcccctcctcacaagaaggctcagagcgcttctccaaagcgcaagaagcagcataaaaagtaccggtcggtcatctctgatattttcgacgggaccataatctcatcggtccaatgtctaacttgcgatagagtgtctgtgacactggaaaccttccaggacctaagcctcccaatccccggaaaagaggaccttgccaaattacatagcagctcgcaccccacaagtatcgtgaaggccggttcttgtggtgaagcctacgccccacaaggctggattgctttctttatggagtacgtgaaaaggttcgtggtctcttgcgtacccagttggttctggggccctgtggtaaccctgcaggattgcctcgccgctttcttcgccagggatgaactgaaaggcgataacatgtattcctgtgagaagtgtaagaaactgcggaacggtgtgaaattttgcaaagtacaaaactttccagaaatactttgcattcatcttaaaagattccgccacgagcttatgttttctactaaaatctccactcatgttagtttccctctcgagggcctggacctccagccctttcttgccaaagatagccctgctcagatcgttacttatgacctcttgtcagtaatctgccaccacggtacggcctcatcaggacactacattgcttattgtaggaacaatctcaacaatctttggtatgaattcgatgatcagtctgtgactgaggtgagcgagagcacggtacagaacgcagaggcgtacgtgttattctacaggaagtcatccgaggaagcccagaaagaacggaggagaatctccaatctgctgaacattatggagccaagcttattgcaattctatatatcacgacagtggttgaataaatttaagacctttgcagaacctggccctataagcaataatgactttctgtgcatccacggcggtgtgccccctaggaaggccggatacatcgaggatctggtgctcatgctcccacagaatatttgggacaatttgtacagccggtatggagggggtcccgctgtgaatcatttatacatttgtcacacatgccagatagaggccgagaagatagagaaacgtcgaaaaaccgagctcgaaattttcatcaggctaaaccgcgcttttcaaaaagaggacagcccagccaccttttactgcatctccatgcagtggttccgggaatgggagagctttgtgaaaggaaaggatggtgacccacctgggccaatcgacaacacaaagatcgctgtcacaaaatgcggtaatgtcatgttgcgtcagggagccgattcgggccagatttccgaggaaacatggaacttcctgcagtctatctacggcggtggccctgaagttatcctcagaccaccagttgttcatgtggaccccgacatcctccaagccgaagaaaagatagaggtggaaactaggtccctttag

SEQ ID NO: 28844 - DNA, 2736 bp, synthetic construct
  source 1..2736: mol_type = other DNA; note = Synthetic coding sequence
atgagcgccttccgaaatcattgtcctcaccttgattcagtcggagagattaccaaagaagacctcatacagaagagcctcggaacatgccaagactgtaaggtccagggccctaatctgtgggcgtgccttgagaatagatgcagctacgtgggctgcggcgagtcccaggtagaccactccacaatccattcccaggagactaaacattacctgacagttaacctgactactctaagagtatggtgctatgcgtgctctaaggaggtgttcttagaccggaagctgggcacccagccttctctgccacacgtgcggcaaccccaccagatccaggagaattccgtgcaggactttaagataccatctaatacgacacttaagacacctctcgttgcagtcttcgacgatctcgatattgaagccgacgaagaagatgaattgagagcccgtggtctgactggtttgaagaacatcggcaatacatgctatatgaacgccgcattgcaggctctgtctaattgcccacccctgactcaattctttctggattgcggaggcctagctaggaccgataaaaagcccgctatctgtaagagttacctcaaactaatgactgagctgtggcacaaaagtcgcccaggttctgtggtgccaaccactttgtttcagggtatcaagaccgtgaatccgacttttcgcggatatagccagcaggatgcgcaggaattcctgcgctgcctgatggatctgctgcatgaggagctcaaagaacaggtgatggaggtggaggaagacccccagacgatcactactgaagagactatggaggaagacaagtctcaaagcgacgtcgattttcagtcttgtgagagctgtagcaatagtgaccgtgcagaaaacgagaatggaagtagatgtttctccgaggacaacaacgagactactatgctcatccaagacgatgaaaacaactcagagatgtcgaaggattggcagaaagagaagatgtgtaacaaaatcaacaaggtgaactctgagggcgaattcgacaaggacagggactccatatctgagaccgtggatctgaacaatcaggagacagtgaaggttcagatccatagccgggctagcgaatatattactgacgttcactcaaacgacctgagcacacctcaaatacttccaagcaacgaaggggtgaaccccagacttagcgcatcaccaccgaagagcggtaacctgtggccgggattggctccccctcataagaaagcccaaagcgcatcacccaaacggaagaaacagcataaaaagtataggagcgtgattagcgatatctttgacggcacaattatcagctccgtgcaatgtctgacctgtgatagggtcagcgttaccctcgagaccttccaggacttatcactccctatccccggtaaggaggatctcgccaagctccacagtagctcccaccctacaagcatagttaaggctggctcatgtggagaggcatacgcaccccagggatggattgcatttttcatggagtacgtgaaaaggtttgtggtgagctgtgtcccatcttggttctggggcccagtggtcaccctgcaggattgcctggccgctttcttcgcccgagatgagttgaagggcgacaatatgtatagctgtgaaaagtgcaaaaagctcagaaatggcgtgaaattttgcaaggttcagaattttcccgagattctctgcatccatctgaagagatttcggcacgaactgatgtttagcaccaaaattagtacccacgtgtcctttccccttgagggtctggatttacagcctttcctggctaaggacagcccggctcaaatcgttacatacgaccttctctctgtcatatgtcaccacggcaccgcaagtagcggccattatatcgcatactgtcggaacaacctcaacaatttatggtacgagttcgatgaccagtcagtgaccgaggtgtcagagtcaacagtgcaaaacgcagaggcctatgtgctgttctaccggaaaagttcagaggaggctcaaaaagaaaggaggcgcatcagcaatctgcttaatatcatggagccaagtttgttgcagttctatataagcagacagtggctcaacaagtttaaaaccttcgcagaaccagggccaattagtaataatgatttcctatgcattcacggtggggtgccacctcggaaggcgggttacatcgaggacctggttttaatgctacctcaaaatatctgggataatttgtactcacgctatggtggtgggccagcagtgaatcacctgtatatctgtcatacctgtcagatcgaagccgagaagattgaaaaaagaagaaaaacagaactagaaatcttcatacgcttaaacagggcattccaaaaggaagatagtcctgcaacattttattgcatctcaatgcagtggttccgcgagtgggaatcattcgtcaagggcaaggacggggatcctccgggacccatcgacaatacaaaaatagctgtgactaaatgcggaaacgtgatgctgcgccaaggcgcagacagtggccagatctccgaggagacctggaatttcttacagtccatctacggcggtggacctgaagtaatcctcagaccaccggtggtccacgtggatcctgacatcttacaagcggaagagaaaattgaggtcgagaccagatcactgtag

SEQ ID NO: 28845 - DNA, 465 bp, synthetic construct
  source 1..465: mol_type = other DNA; note = Synthetic coding sequence
atggccccacccgtccgttactgcatccctggtgagagactctgtaacctcgaggaaggttccccaggttcgggaacatacacaagacacggctatatctttagctctctggctgggtgcctcatgaagtcttcggaaaatggcgcattgcctgttgtcagcgtcgtgcgtgagaccgagtcacaactcctgcctgatgtcggggcaattgtgacgtgtaaggtggagatttataagtcctttagaccaggcgatatagtgctcgcaaaggtcatctccctcggggatgcccagtctaattatttgcttaccaccgccgagaacgaattgggagtcgtcgtagcccacagcgaatccggcatccaaatggtgcccatatcatggtgcgaaatgcagtgtcccaagactcacaccaaggaatttcgaaaggtggccagggtgcagccagagtttctacagacttag

SEQ ID NO: 28846 - DNA, 513 bp, synthetic construct
  source 1..513: mol_type = other DNA; note = Synthetic coding sequence
atggcccctcctgttcggtattgtatccccggagagaggctttgtaacctcgaggaggggagtccaggctccggtacctatacaagacatgggtacattttttctagcttagcagggtgtttgatgaagtcaagtgagaacggggctgtatcaagcattaacagccgttttgccaaagtgcacattttgtatgttggctccatgcctcttaaaaattcctttagagggactattagaaaggaagacgtgagggcgactgagaaggataaggtcgagatctacaagtcattcagacccggagatatcgtgctggccaaagtgatttccttgggcgatgcccagagcaactatctgctgacaaccgccgaaaacgaacttggcgtggtggtggcccactctgaaagtggtatccagatggttcccatttcttggtgtgagatgcagtgtccaaaaacgcacacaaaggaattccgaaaagtggccagagtccagcctgagtttctgcaaacctag

SEQ ID NO: 28847 - DNA, 537 bp, synthetic construct
  source 1..537: mol_type = other DNA; note = Synthetic coding sequence
atggcacctcctgtgagatattgcattccaggcgagaggctgtgtaatctagaggagggaagtcctggtagcggcacatatacgagacatggatacattttttcaagtctcgcaggctgtcttatgaagagcagtgaaaatggagcacttcccgtcgtgagtgtggtacgtgaaacagaaagtcagctgttgcctgacgtgggagccattgtgacatgtaaagtgtcctctattaattcccgctttgctaaggtgcatatcctgtatgtggggtccatgccactgaaaaactcatttagaggcaccatcaggaaggaagatgttagggctacagaaaaggacaaaatctccctgggcgacgcacaatctaattatcttctgacaactgccgaaaatgagctcggcgtggtcgtagcccacagcgaatccggaatccagatggtgcccatcagttggtgcgagatgcagtgccccaaaacccatacaaaagaatttaggaaagtggcacgcgtccaacctgagttcctccagacatag

SEQ ID NO: 28848 - DNA, 2811 bp, synthetic construct
  source 1..2811: mol_type = other DNA; note = Synthetic coding sequence
atggccgctgctcgggatccacctgaggtgagtctgagggaagctactcagagaaaattacgaagattcagcgagctgcggggtaagctggtcgctcgtggcgaattctgggacattgtggcaattaccgccgctgacgaaaagcaggagttggcttataatcagcagttgtctgaaaagcttaaaaggaaggagctgcctctgggggtacagtaccatgtttttgtggaccccgcaggtgccaagatcgggaatggaggtagcacgttgtgcgctcttcagtgccttgagaaactctatggagacaaatggaatagttttactattctcctgatccactctgacgaatggaagaaaaaggtgtccgagagctatgtaattacaatcgaaaggcttgaagacgacctccagattaaagagaaggaactcaccgagctcagaaacattttcggctccgacgaggcattctccaaggtcaacctaaactatagaacggaaaatggcttgagcctcctgcatctttgctgtatatgtggcggtaagaaatctcacattaggacactcatgctgaaggggcttagaccttctaggctgacacgtaatgggttcaccgcacttcatctggcagtgtacaaggacaacgccgagctgatcacctctctgttacacagcggcgctgacatccagcaggtcgggtacggtggtttaacagctttacatatcgcgaccattgctggccacctcgaggccgcagacgtcttgcttcagcacggagcgaatgttaacattcaggacgcggtattcttcactcccctgcacatcgctgcatactatgggcatgagcaggtgacccgactactgctgaaattcggagcagacgtcaacgtctccggagaggttggggatagacccctacacctagcttcagcaaaggggtttctcaatatcgctaagctgctcatggaagaaggtagtaaggctgacgtgaatgcacaggacaacgaggaccacgtaccactgcatttttgctcccgcttcggccatcacgacatcgtgaaatacttattacaatctgatctggaagtccaacctcacgtggtgaatatttacggagatactccattgcatttggcatgctacaacggcaagttcgaggtcgccaaagagatcatccagatttccggaaccgagtccctcactaaggagaatatcttcagcgagactgcctttcactccgcgtgcacatatggcaagagcatagacctggtgaagttcttgctggatcagaacgttattaatatcaatcatcaggggagggacggacacaccggtttacactctgcatgttaccacggtcacatacgactcgtgcagtttctcctcgacaacggggctgatatgaacctggtggcatgcgatcctagcaggtcctctggggagaaggacgaacaaacatgcctcatgtgggcttacgagaaagggcacgatgccatagtgacattattgaagcattacaaacgacctcaggacgaactcccgtgtaacgaatattcccagcccggaggcgacggcagttatgtgtctgtgccatccccattagggaagatcaagtccatgacaaaagaaaaggctgatatcctcctcctgcgggctggtttaccatctcactttcaccttcagctgagcgaaattgaatttcacgaaattattggttccggctcctttgggaaggtctataaaggtagatgtcgcaataaaatcgtagcaatcaagcgctacagagccaacacttattgctccaagagcgacgtcgatatgttctgccgggaggtgtctatcctctgtcagctaaaccacccctgcgtgatacaattcgtaggagcatgcttgaatgacccgtcacagttcgctatagtgacacagtacatctcgggagggtcactgtttagcttattgcacgagcagaaacgtatactcgatctccagagcaaattgatcatagccgtagatgtggcaaaaggtatggaatacctgcataacctgacacagcctataatacaccgggatctgaattctcacaacatcctcttgtatgaagacggccacgctgtggtcgctgactttggcgagtcacgcttcctgcagagtctcgatgaggataacatgaccaaacagccagggaatctgaggtggatggcacccgaagttttcacccagtgcacgagatacactataaaagccgacgtattctcttacgcactgtgcctgtgggaaatcttgacaggcgagatcccctttgcgcacctgaagcctgccgcagctgctgccgatatggcttaccatcacatccgccctccaatcggctactctatcccaaagcccatttcctcccttcttatcaggggatggaatgcttgcccggaaggacgtcccgagttctcagaggtggttatgaaactggaagaatgcctgtgtaacatcgaactcatgtcaccagctagcagcaactcgagtgggtccctcagtccatcttcttcctccgattgcctcgtgaatagaggtggcccaggaaggtctcacgtggctgctctgagatctcgctttgaattggagtacgccctgaatgcgaggtcgtatgctgccctctcccagtccgctggtcagtactcctcccaggggctgagtttagaagagatgaaacggagcctgcagtacacccctattgacaagtatggctacgtgagcgacccaatgagctcaatgcattttcactcctgcagaaacagttcatcattcgaagatagcagttag

SEQ ID NO: 28849 - DNA, 510 bp, synthetic construct
  source 1..510: mol_type = other DNA; note = Synthetic coding sequence
atggcggcagcacgcgacccccctgaggtgtcattgagagaagctactcaaagaaagctccgcagattcagtgaactccggggtaagttggtggccaggggggagttttgggacatcgtcgctattactgcagccgatgagaaacaggaacttgcttacaaccaacagctgagcgaaaaactgaagcgaaaagaactcccattaggggtgcagtatcatgtgttcgtagatcccgctggggctaagataggcaacggaggatccactttgtgcgcactccagtgcctggagaagctttacggtgacaaatggaattctttcacgatcctcctgatccacagcgtaagcttccagatttaccagaacgccctggccaaacatcctgttagcttcaaggcctattggatccaggatgtgctgtggcaccttgctcagctgtggagcattccagactggggactaatgttccagctgggcaagacagccctcctggttgtcttgaccagctag

SEQ ID NO: 28850 - DNA, 1785 bp, synthetic construct
  source 1..1785: mol_type = other DNA; note = Synthetic coding sequence
atggctgctgctcgcgatccgccagaggtttcactccgggaagcgacccagcgcaaactgcgtcgtttctccgagctgcgcggtaagctagtggctagaggtgagttctgggacatcgtcgccatcaccgctgcagatgaaaagcaagaactcgcctacaaccaacagctgtctgaaaaactgaaacgtaaagaactgcctctgggagtgcagtatcatgtgtttgtggaccctgccggtgccaagatagggaatgggggatcaaccctgtgtgctcttcagtgtctggaaaagctatatggtgacaagtggaatagtttcaccatacttcttatacatagtggcggttatagccaaagactgccaaacgcctccgcccttggaaagatttttacagctcttcctttgggaaaccccatatatcaaatgttagaactcaaactggcaatgtatattgacttcccactcaacatgaatccaggtatcctcgtgacatgtgccgacgacatcgaactgtattctattggcgaatttgaatttatcaggtttgacaagccaggatttaccgctcttgcgcacccctcatccttgactattggtacgacccacggcgtgttcgtactggacccttttgatgacctcaaacaccgggacctggaatatagaagttgccatcgtttcctccacaagccgtctatcgaaaagatgtatcaattcaacgccgtgtgcagacccggaaatttctgccagcaagatttcgccggtggtgatatcgccgatctgaaactggattcagactatgtatacacggactcattattctatatggaccacaagtcagcaaaaatgctgttagccttctacgaaaaaatagggaccttgtcctgtgaaattgatgcttatggggacttcctgcaagccctcggtcccggagccacggtagagtacacgcgcaataccagcaacgtgatcaaggaggagagcgagctggtggaaatgagacagcggatttttcacctcttgaagggaaccagtctgaacgtcgtggttctgaataacagcaaattttatcacatcggcacaacagaggagtacctgttttacttcacatctgacaacagtctgaaatcagagctgggcctgcagtcgatcacattctctatcttccccgatattccagaatgtagcggtaaaacgtcttgtataatccagagcatcttggacagccgctgttcagtggccccaggatcagtggttgagtacagcaggctcgggcctgatgtgagcgtgggcgagaactgcattataagtggatcttatatcttgacaaaagcagccctccctgcccactctttcgtgtgctctttatccctgaagatgaaccgatgcttgaagtacgccaccatggcgtttggagtgcaggacaatctgaaaaagagcgtcaaaaccctgagcgatattaaacttctgcagttcttcggcgtttgtttcctaagctgtcttgacgtgtggaacctcaaggtaacagaggagctgttttctggaaacaagacatgcctcagcctttggactgccaggattttccccgtgtgctcttcactcagcgactccgtgataacttcactgaaaatgttgaacgccgtgaagaataaaagcgccttttcactcaattcctacaagctactttctatagaggaaatgttgatatataaggacgtagaggacatgatcacctacagggaacaaatttttctcgaaatttctctgaaatcctcacttatgtag

SEQ ID NO: 28851 - DNA, 588 bp, synthetic construct
  source 1..588: mol_type = other DNA; note = Synthetic coding sequence
atggcgcctcctgtgcggtattgtatccctggggagagactgtgcaacttagaggaaggttcacctggtagcgggacttacacacgccacggctatattttttcctcacttgccggatgcctcatgaaatcttccgagaatggggctctgcccgtggttagcgttgtgagggagactgaaagccagctccttccagatgttggcgcaattgtgacctgtaaagtctcttcgattaacagcagatttgctaaggtccacattctttatgtaggaagtatgccactcaagaactcctttagggggacaattcgaaaggaagatgtacgagcaacagagaaagacaaggtggagatctacaagagttttagacctggggacatcgttctcgcaaaagtgattagcctgggagacgctcagtccaactacctcctgacaacagcggagaatgaactgggcgtggtcgttgcccactcggagagtggaattcagatggtgccaataagctggtgcgaaatgcaatgcccgaagacacacaccaaagagtttcggaaggtagccagggtacagcccgagtttctccaaacatag

SEQ ID NO: 28852 - DNA, 1626 bp, synthetic construct
  source 1..1626: mol_type = other DNA; note = Synthetic coding sequence
atgaccggcgagaagatccgctctctgaggagggatcataagcccagtaaggaagagggggatcttctcgaacctggggacgaggaggctgctgctgcccttggaggaacattcaccagatctagaatagggaagggaggaaaagcttgccacaaaattttttcaaatcatcaccatcggcttcagctgaaggccgcaccggctagcagcaatccccctggtgctcctgccctacccttacataacagttcagtaaccgcgaattcacagtctccggctctgctggccggtaccaatcctgttgctgtggtggctgatggcggttcttgtcccgctcattacccagtccatgaatgtgtctttaagggcgatgtgagacgcctgagttcccttatccggacgcataacatcggccaaaaggataatcatggaaatactccacttcatctggcagtgatgctgggtaataaggagtgtgcccacctactactggctcataacgccccagttaaggttaagaatgcccagggctggtcaccgttagctgaagcaatcagctacggggacagacagatgatcacagccttactacgcaaactcaagcagcagtcaagggaatctgtggaggagaaacgcccaaggctccttaaggcgctcaaggagctgggcgacttctatttggaattgcattgggactttcagtcgtgggtgcccctgctgtcacggatattgccttcagacgcctgcaagatctataagcaaggcattaatatccggcttgacacaactctgatcgacttcactgacatgaagtgccagcgaggcgatttgagttttatcttcaacggagatgcagccccaagtgagtcattcgttgtcctggacaatgagcagaaggtgtaccagaggattcaccacgaggaatctgagatggagactgaagaggaggtcgatatcctcatgtccagcgatatctacagtgctaccctttccacaaagtcgataagcttcacccgcgcacaaactggctggttatttagagaggacaaaactgaacgcgtgggcaactttcttgcggatttctatcttgtgaacggcctagttctggagagtcgcaagagaagggagcacctttccgaggaagatatccttaggaacaaggcaattatggagtctctttcaaaagggggaaacattatggagcagaatttcgagccaataagacgtcagtccctcacacccccaccgcagaataccattacctgggaggaatacatctccgccgaaaacggaaaggcccctcacctggggagagaacttgtgtgcaaggagagcaagaagacgtttaaagccaccattgcaatgagccaagagttccctctggggattgaattgctgctgaacgttcttgaggtagttgcccctttcaagcactttaataagctgagggaattcgttcaaatgaagcttcctcctggctttccagtgaagctggatatccccgttttccccacgattaccgcgacagttacctttcaggaattccggtacgatgaattcgatggctccatattcacaatcccggacgactacaaggaagatccttctaggttcccggatctgtag

SEQ ID NO: 28853 - DNA, 840 bp, synthetic construct
  source 1..840: mol_type = other DNA; note = Synthetic coding sequence
atgccatgcaggcgggaagaggaggaggaggctggggaagaagctgaaggcgaagaagaggaggaggactctttcttactgttgcagcagagcgtggccctcggaagcagcggcgaagttgataggctggttgctcagatcggggaaaccttacaactggacgccgctcagcattcaccggcttccccctgcggacctcctggagctccactgagagccccaggcccacttgcagccgctgtgcccgcagataaagccaggtcccccgctgtgcccttgctgttgcccccagccctggctgagacggtgggcccagcccctcctggcgtcctccgatgcgcactaggggatcgaggtagggtgcgcggaagggccgcaccctactgcgttgccgaactcgccacagggccttcagcactcagtcccctgccaccccaggctgatttggacgggcctcccggagcgggaaaacaaggtataccacaaccattgagcggaccatgccgccgtggctggctaagaggtgctgccgcttcaaggcgcttgcagcaaaggcgtggctcacaacccgagacccgcaccggcgacgatgatcctcacagactgcttcagcagctcgtgctgagtggaaatcttatcaaggaagccgtgaggcggcttcactcacgacgcctccagcttagggctaaattgccccagagacccctgcttggacccctgtctgctcccgttcacgagccgccatcgcctagatcaccccgtgccgcttgctcagatcccggagcatccggcagagcacagctgcgcacaggtgacggcgtcctggtgcccggttcttag

SEQ ID NO: 28854 - DNA, 1209 bp, synthetic construct
  source 1..1209: mol_type = other DNA; note = Synthetic coding sequence
atgcctctccacagttccctcggtaataagtctgagactctttctcagaagaaaaataacaataacaaagaaaagaccaaaagaaacagcagaaaccccccacgcacggccctgaaggaaggcaaaatggaagaactgagtcaggccctagccagctcgttttctgttagccaagacttaaattctaccgccgctccccacccccgattatctcaatataagtctaagtattcttccctagaacagtcagaaaggagacgcaggctgctcgagctgcagaagagcaaacggctggactatgtgaatcacgcacgaaggttagccgaagacgactggacaggtatggaaagcgaggaggagaacaagaaggatgacgaagagatggatattgacaccgtgaagaaactgcccaagcattacgccaaccagttgatgctttccgaatggttgatagacgtcccatctgaccttggccaagaatggattgtggttgtgtgccctgtcggaaagcgcgctctgatcgtggcctcacgcggatccacttcggcgtacacaaagagcggctactgtgtgaaccggttcagttccctgctccctggcggaaataggcgcaactccaccgcgaaggattacaccattctcgattgcatttataacgaagtaaatcagacctattacgtgctcgacgtgatgtgttggaggggccaccccttttacgattgtcagaccgatttccgcttctactggatgcatagcaagctgccagaggaggaggggctgggggaaaagaccaaactaaaccccttcaagttcgtcggcttaaaaaacttcccttgcactcctgagagtctttgtgacgtgctcagtatggattttcccttcgaggtcgacggattgttgttttaccataaacagacacattattcacccggtagtactccattagttggttggctccgcccatatatggtatctgacgtcctgggggttgccgtacctgcgggacctttgacgacaaaacccgattacgccggtcatcagttgcagcaaatcatggagcataaaaagtcacagaaggaggggatgaaggaaaaactcacgcacaaagccagcgagaacggccattatgaactggagcacctttctacgccgaaactgaaggggagtagccactcacctgatcacccaggatgtttgatggagaactag

SEQ ID NO: 28855 - DNA, 1107 bp, synthetic construct
  source 1..1107: mol_type = other DNA; note = Synthetic coding sequence
atgtctctgttcgggaccacgagtggatttggtacctccggaacctctatgtttgggagcgccaccaccgataatcataatccaatgaaggatatagaagtgacctccagtcctgacgacagcatcggctgcctcagctttagtccccctaccctgccgggaaatttcctaatcgccggaagctgggcgaacgacgtcagatgttgggaggtacaggacagcggccagacaattcctaaggcccagcaaatgcataccggacctgtgctggacgtctgctggtccgacgatggctccaaggtgttcactgcatcctgcgataagaccgcaaaaatgtgggatctcagctccaatcaggccatccagattgctcagcatgatgcacctgtgaaaactatacactggatcaaagcacctaactatagttgtgttatgaccgggagctgggataaaaccctgaaattctgggatactaggagctccaatccgatgatggttctgcagctgccagagaggtgctactgcgctgacgtgatttatcccatggccgtagtcgccactgctgaaaggggactcatcgtttaccagctggagaatcaaccgtccgaattccggaggatagagagcccactgaaacaccagcatcgatgcgtggccatcttcaaagataagcagaataaacctaccggcttcgctctgggtagtattgaaggacgagtggccatacactacatcaatccacctaatcctgccaaagacaactttacatttaagtgccaccgatccaatgggactaacactagcgctccacaggatatctacgccgtaaacgggatcgccttccaccccgtgcacggcacgttagctacagtcggctccgatgggaggttctccttttgggacaaggatgctcgaacaaagctgaagacgtctgaacagctggaccagcccatttccgcttgctgctttaatcataatggcaacatcttcgcttacgcctccagttacgattggtcaaaggggcacgagttttacaacccccaaaagaagaactacatctttttgcggaacgcagcggaagaactgaagccccgaaacaaaaaatag

SEQ ID NO: 28856 - DNA, 552 bp, synthetic construct
  source 1..552: mol_type = other DNA; note = Synthetic coding sequence
atgcgcaaaagtagttgtgttgagtctttcgatgatcagcgcagaatgtccttacacctacacggtgccgactgcgatcccaaaacccagaacgaaatgaatatctgtgaggaggaattcgtggaatacaagaacagggatgcgatcagcgctctcatgcctctgtttagcgaggaggagtcttcagacggatccaagcataacaatggcctgccagatcatatatctgcacagctccagaatacttacaccctcaaggctttcaccgtcggcagcaagtgcgtcgtgtggagctctctcagaaacacctggtctaagtgtgaaatcttagaaactgccgaagaggggacccgcgtgttaaacctctccaatggcatggaagaaatcgtgaatcccgaaaacgtgtggaatggaattcctaaattagataagagtccacccgaagccgtctctcagagggtggggaaggatttatactttatgtctgttggcgacacaactatcaaggagaaagggttcggaggcgatggggatctgactgttgacctatag

SEQ ID NO: 28857 - DNA, 1821 bp, synthetic construct
  source 1..1821: mol_type = other DNA; note = Synthetic coding sequence
atgccctcacctcagctattagtcctctttggctcccagaccggcaccgcccaggacgtgagcgaacgcttgggccgagaagcccgtaggcggagattgggatgtagggtccaagccctcgattcgtatcctgtggtgaatctgattaacgagcccctggtcatattcgtgtgtgccactaccggccagggagatccgccagataatatgaagaatttttggaggtttatctttcggaaaaatctgcctagcactgctctgtgtcagatggactttgctgtactggggctgggtgacagctcttacgcaaagtttaacttcgtcgccaagaaactccatcgtcggcttttgcagctcggagggagcgctctgctgcctgtatgcctgggcgacgatcagcacgagcttggtcccgacgctgccgttgacccatggctcagagatctgtgggatcgagtcctgggcctttatcctcctccacctgggctcaccgagatcccaccaggcgtgccactcccttccaagtttacactgcttttcctgcaagaagcaccttccaccggttccgaaggtcagcgcgtggcccatcctggtagtcaagaacccccatccgaatcaaagccttttctagcgcctatgattagtaatcagagagtgaccggaccatcacacttccaggatgttaggctaattgagttcgacatcttggggagcggcatcagttttgctgcaggcgacgtcgtcctgatccagccatctaacagcgcagcacacgtccaacggttttgccaggtgcttggcctggacccagatcaacttttcatgctgcagcccagggagcccgacgtgagctctccgactcgcctgccccagccttgctccatgcgccatctggtgagtcattatctggacatcgccagcgttcccaggcggtcattcttcgagctcctcgcatgtctcagtctccacgagctcgagcgcgaaaagctgttagaattctcctctgcacagggccaggaggaattgttcgagtattgtaatcgaccaagaaggactattctggaggttctgtgcgattttcctcacaccgccgcagctatacccccagactatctgttggacctgatcccagtgattcgccctagggcatttagcattgctagcagtctgctgacccaccccagccgcctgcagatcctggtcgccgtagtccagttccagacgcgcctcaaagagcctcgccgtggtttgtgctccagctggctggctagtttggacccgggtcaggggcctgttcgagtgcctctctgggttagacctggcagcttggcctttcccgaaactccagatacgccagtgataatggtgggtcccggaacgggggtggccccttttcgcgcagccatccaagagagagtcgcccagggtcagacagggaacttccttttcttcggatgcagatggcgggaccaggatttctactgggaagccgagtggcaggagctagaaaaacgggactgcctaacactcattccagctttctctcgcgaacagcctcctgccttgttcagcgcgctccaggagcagaaggtctacgtccagcataggctgcgcgaacttggatctctggtgtgggaactgctggatagacaaggtgcttatttttacctcgcgggaaatgccaaaagtatgcctgcagatgtttccgaggcacttatgtcaatctttcaggaggaaggaggtctgtgctcccctgacgccgcagcttacctggctcgattgcagcagacacggcgattccagaccgagacctgggcatag

SEQ ID NO: 28858 - DNA, 420 bp, synthetic construct
  source 1..420: mol_type = other DNA; note = Synthetic coding sequence
atggcagaatccgactgggataccgtaaccgtgttgcggaagaaagggcctaccgccgctcaggcaaaatcgaaacaggcaattctcgcagctcagcggcgtggggaggacgtggaaactagcaaaaagtgggctgccggacaaaataaacagcactccattaccaaaaatacagctaaactggatcgtgagactgaagaattgcaccacgatcgggtgaccctcgaagtgggcaaagtgattcagcaggggaggcaaagtaaagggttgacgcaaaaggatctcgcaacaaagatcaatgaaaaaccccaggtgatcgctgattatgagtctggccgtgctataccaaataaccaggtgctcggcaagatagagagggctatcggcgaatgtccctctacacttcgacgtgtgaggtag

SEQ ID NO: 28859 - DNA, 426 bp, synthetic construct
  source 1..426: mol_type = other DNA; note = Synthetic coding sequence
atggccgagtctgactgggacaccgtcactgtcctgaggaagaaggggcctacggctgcccaggctaagagcaaacaggccatcctagctgcccagcgaagaggggaggacgtggagacgagcaaaaagtgggcggctggccagaataaacagcattctattacgaagaacacggcgaaactcgacagggagacagaggagctgcaccacgatagggtcaccctggaagttggaaaagtgatccagcaagggcgacagagtaagggcctgacccagaaggacctggctacaaaaataaacgaaaaaccccaggtcattgcagattacgagtcaggacgcgctattccgaataaccaggtgctcggcaagatcgagcgcgcaattgacgttggcactcggagcgcccgagtgctccgggcacagtag

SEQ ID NO: 28860 - DNA, 150 bp, synthetic construct
  source 1..150: mol_type = other DNA; note = Synthetic coding sequence
atggcgacccaacgcaagcacctcgtaaaagatttcaatccctatatcacttgttatatttgcaagggatatttgatcaagcccacaaccgttaccgaatgtctccatacaagcgctgaatcgtattggatgagtacctggatgtcttag

SEQ ID NO: 28861 - DNA, 960 bp, synthetic construct
  source 1..960: mol_type = other DNA; note = Synthetic coding sequence
atgatggtgctgaaggttgaggaattagttacagggaagaagaacggaaatggcgaagccggagaattcctccccgaggacttccgtgatggggaatatgaggcagctgttactctggaaaagcaggaggaccttaagaccctgctggcccacccagtgacacttggagaacaacaatggaagagtgagaaacaaagagaagccgaactgaaaaaaaagaagttggaacaaaggagcaagttggaaaatctcgaagacctggagatcatcatacagctgaaaaagaggaagaagtatagaaagactaaggtccctgtggttaaagagcctgagccagaaatcattactgaacccgtggacgtccctaccttcctgaaagcggcactagagaataagctaccagtcgttgaaaagttcctgtccgacaaaaacaatcccgatgtttgtgacgaatacaaacggacagccctccaccgagcatgcctcgaggggcacctggcaatcgtggaaaagcttatggaagctggagcacagattgagttcagagatatgctggagtccactgccattcactgggcatcacggggagggaacctggacgtgctaaaacttttgctaaacaaaggcgctaaaatatcagccagagataagctactctctacagccctgcatgtggccgtgcgaacaggtcactacgaatgcgcagagcacttaatcgcctgtgaggcagatcttaatgccaaagatagagagggggatacaccactgcacgacgctgtcaggctgaatcgctataagatgatacggctgttgatcatgtacggagcagacttgaacatcaagaattgcgcaggcaagaccccaatggacctcgtactgcattggcagaatggaactaaagctatctttgactctctgagggaaaactcatacaaaacttcgcgaatcgccaccttttag

SEQ ID NO: 28862 - DNA, 1089 bp, synthetic construct
  source 1..1089: mol_type = other DNA; note = Synthetic coding sequence
atgtcaggctatcaacgacggccaggtgcgacccctctttctagagctaggtcacttgccatcccagacgatgataggttcgaggatctagaagaggccaacccattttcctttcgtgaattcttgaaaactaagaatcttggtctgtccaaagaagatccggcaagccgcatctacgcaaaagaagcctcgcgacattcattggggctcgaccataactcccccccttctcagacaggcggatacggccttgagtaccagcagcccttcttcgaggatcctacaggagcaggcgatttgctcgacgaagaggaggacgaggacaccgggtggtctggggcttacctcccttccgccatcgaacagacccaccctgaaagagttcccgctggtaccagtccctgttcaacatatttgtcttttttctccacaccctctgagcttgctggccctgaaagccttccttcgtgggccctgagcgatactgactcacgtgtttcacctgcctcccccgcaggctccccatccgctgatttcgcagtgcacggcgagtccctcggtgatcgacacctcaggacactgcagatttcctacgatgccttgaaggacgaaaattccaaactccgcagaaaactgaatgaagttcagtcgttctctgaagcacagaccgagatggtcagaaccttagagcgcaagctggaagccaagatgatcaaggaggaaagcgactaccacgacctcgaatccgtggtccagcaagttgagcaaaatctggagctgatgactaagcgcgcagtgaaggcggaaaaccacgtggttaagttgaagcaggagatttccttgctgcaggcccaggtttccaatttccagcgcgagaatgaggcattgcggtgcggacagggggctagtcttaccgtcgtgaagcaaaacgcagacgtggcattgcagaatttgagagtcgtgatgaacagcgcccaggcctctattaagcagctggtgtccggggcagagacactgaacctggtagccgagatcctgaagtccatagaccgcatctctgaagtgaaggacgaagaagaggacagctag

SEQ ID NO: 28863 - DNA, 5462 bp, synthetic construct
  source 1..5462: mol_type = other DNA; note = Synthetic coding sequence
atggagtccaattttaatcaggagggcgtgcccaggccctcctacgtattctccgccgatcccatcgccaggccaagcgagatcaacttcgacgggataaaattggacctctcccatgaattctcgttggtggctcccaacacggaggccaactccttcgaatctaaggattacttgcaggtgtgcctgcggatcagacctttcactcaatcagaaaaggagctcgaaagtgaagggtgtgtacacatcttggattcgcagacagtcgtgctgaaagaaccacagtgtatactgggccgactatcggaaaaatcatctggacagatggctcaaaaattctcatttagcaaggtcttcggccctgccaccactcagaaggaattttttcaggggtgcattatgcagcctgtcaaagacttgctgaagggtcagtccagactaatcttcacctacgggctgacaaatagtggtaagacctacacctttcagggaacggaagagaatattgggatcctaccacgcaccctgaacgtcctgtttgactcgctgcaggaacgactgtacaccaagatgaacctgaagccgcacagatctcgggagtatttgcggttatcctcagagcaggaaaaggaagaaatcgccagcaagagcgcccttctgagacagatcaaggaggtaactgtgcataacgacagtgatgacacactatacggcagcttaacaaactccctgaacatttccgaatttgaagagtcgattaaggactacgagcaggcaaaccttaacatggcaaacagcatcaaattcagcgtatgggtctcgtttttcgagatttacaatgagtacatctacgatctgttcgtcccagtgagtagtaagttccaaaaaagaaagatgctccggctgagccaagacgttaaagggtacagcttcatcaaggacctgcagtggattcaggtgtccgactcaaaagaggcctatcggctgctcaagctggggatcaaacaccagagcgtggctttcaccaagctgaacaatgcctccagcaggagccactccatctttactgtgaagattcttcagatcgaggacagcgaaatgtcgagggtgatccgtgtgtccgagctgagcctatgcgacttggccggaagcgaaaggaccatgaagacgcagaacgagggggagaggcttcgtgagactggcaacattaatacatcactgcttactcttgggaagtgcatcaatgttctaaagaattcagagaagtctaagtttcagcaacacgtaccttttagagagtcgaagcttactcactattttcaatcgttcttcaacgggaaaggaaagatttgcatgatcgttaacatttctcagtgttacctggcttatgatgagacgctgaacgtgttgaaattttccgcaatcgctcagaaggtctgcgtccctgacactctgaattcatcgcaagagaagctctttggtcctgtaaaatcctcccaggacgtcagtctggacagcaacagcaactcaaaaatcctaaatgtgaagagggccaccatatcttgggagaacagtctcgaagacttaatggaggacgaggatttagtggaagagctggagaatgctgaggagacccaaaatgtggaaactaaacttctggatgaggatttagataagacactggaagagaacaaggcttttatttcccatgaggaaaaacgaaagctcctggatctgattgaggacctcaagaaaaaactgataaatgaaaaaaaagaaaaactgactctggagtttaagatccgtgaggaggtgacccaggagttcactcagtattgggctcagagagaggccgactttaaagagaccttacttcaggaacgcgagatcctcgaggagaacgcggagaggaggttggcgatattcaaagacctggtgggcaaatgtgacacgagggaagaagccgctaaagatatctgcgcgaccaaggtggaaaccgaggagacacataattacgtaggttttgaagatataatcgactcactacaggataacgtggctgacatcaaaaaacaggcagagatcgcgcacttatatatcgcatcactgcccgacccacaggaggcgaccgcctgcctggagttaaaatttaaccagattaaggcagaattggctaaaaccaagggtgagctgattaaaactaaagaggagctgaagaagcgagagaacgaatcagatagtctgatccaggaactcgaaactagtaacaagaaaattataacgcagaaccaaaggatcaaggagttgataaacattatcgatcagaaggaagataccatcaatgagttccagaacctgaaatcacacatggagaatacctttaagtgcaatgacaaagccgacacctcctccctaattatcaacaacaagctcatttgtaatgagactgtggaggtcccaaaagatagcaaatcaaaaatttgctctgagcgcaagcgcgttaatgaaaatgagttgcagcaggacgagccgcctgccaaaaagggctccatacacgtgagttctgcgattaccgaggatcagaagaaatcagaagaagtgcggcctaatatcgccgagatcgaagatataagggtactgcaagagaacaacgaggggttgagagcatttttattaacaatcgaaaacgagttgaaaaatgagaaagaagagaaagcagaactgaacaagcagatcgttcattttcaacaagagttgtctctgagcgagaaaaagaatttgaccttgagcaaggaggtgcagcaaatccagtcgaattacgatattgccatcgctgagctgcatgtacagaagtctaaaaatcaggaacaagaggaaaagatcatgaaactcagtaatgagatcgagaccgcaacacgcagcatcaccaacaacgtgtcacagatcaagcttatgcacacaaaaatcgacgagctcagaaccctggactcagtgtcacaaatcagcaacatcgatttacttaatctacgagacctgtctaacggatctgaggaagataacctacccaatacccagttggatctccttgggaatgactatctggtgtctaaacaggtgaaagagtaccggattcaagagcccaatcgagagaactcctttcattcttccatcgaagcaatttgggaagagtgcaaggagatcgtcaaagcctctagtaagaaaagccatcagattgaggaactcgagcaacagatcgagaagctccaggcggaagtcaagggttataaagacgagaacaatagacttaaagagaaggaacacaagaaccaggacgatctgctgaaggagaaagagaccctgattcagcagctcaaagaggagttgcaggaaaaaaacgtaaccttggatgtacaaatccaacatgttgtggaggggaagagagcactcagcgagttaacacagggggtaacgtgctacaaggctaagataaaagaactcgagaccattctggaaacccagaaagttgaatgctcccactccgctaaactggagcaggacattcttgagaaagaatctatcatcctgaagctggagcgcaatctaaaggagtttcaggaacatctgcaggattctgtcaaaaacacgaaggacctgaacgtgaaagagctgaagctgaaggaggaaataacgcagctaaccaacaacctccaggacatgaaacatttgctccagctgaaagaggaggaagaagaaaccaatagacaggaaaccgagaagctcaaagaagaattgtctgcgtctagcgcccgaacccaaaacctgaaggcggatctccaacgaaaggaagaggattacgctgacctgaaagagaagctcacagatgctaagaagcaaattaaacaagttcagaaggaagtgagtgtgatgcgggatgaagacaagctactccgaattaagattaatgagctggaaaaaaaaaagaatcagtgctcgcaggagctggatatgaagcaaaggaccattcagcaactgaaggagcagctgaataatcagaaagttgaagaggctatccagcagtacgaaagggcatgtaaagacctgaatgtgaaagagaaaatcattgaggacatgagaatgaccctcgaggagcaggaacagactcaggtggaacaggaccaggtacttgaggccaagctggaggaggttgaacgcctcgctacagagctggaaaaatggaaggagaagtgcaacgacctcgagaccaaaaacaatcaaaggtcaaacaaggaacacgagaacaataccgatgtgctgggcaaactaaccaacctgcaggatgaactccaagagagtgaacagaaatacaacgcagatagaaaaaagtggcttgaggagaagatgatgcttatcacgcaggcgaaggaagctgagaacatccggaacaaagaaatgaagaagtacgcagaggatcgtgaacggttctttaagcaacagaacgaaatggagatcctgactgcacagctgacagaaaaggacagcgacctgcagaagtggcgcgaggagcgcgatcagctggtggccgcactggagattcagcttaaggcgctgatcagctccaatgttcagaaggataatgagatagagcagctcaagcgtattatctcagaaacaagtaaaattgaaacgcagattatggacatcaagccgaagagaatttcaagtgccgatcctgacaagctgcagacagagcctctgagcacctcatttgagatttcacgcaataagatagaagacggcagtgtggtgctggactcctgtgaggtctctactgaaaacgatcaaagtacccgcttccctaagcctgaactggagatccagttcacacccctgcagcctaataaaatggccgtcaaacatcctggctgcactacgcctgtgactgtgaagatcccaaaagctaggaaacggaagtcaaacgaaatggaggaagatttggtcaaatgtgagaacaagaagaatgccactcccagaactaatttaaaatttccaatctcagatgacagaaattcgtctgtgaaaaaagagcagaaggtcgctattcgcccatcctccaaaaagacttactcactgaggtcccaggcgagtattatcggcgttaatctggccaccaagaagaaagagggaactcttcagaaattcggagattttctgcagcatagccccagcatcctgcagagcaaggccaaaaagattattgagactatgtcttcctccaaactctcaaacgtggaagccagtaaagaaaacgtttctcagcccaagagagcgaaacggaaactatacacatccgaaatcagcagccccattgacatcagcgggcaggtcattctgatggaccagaagatgaaggagtccgaccaccagataatcaaaagacgtctgcgaacaaagacagccaagta

SEQ ID NO: 28864 - DNA, 1485 bp, synthetic construct
  source 1..1485: mol_type = other DNA; note = Synthetic coding sequence
atgaagctaggtaagaagcccatgtataagccggttgacccatattccaggatgcagtccacctacaattataacatgcggggaggcgcttaccctccacggtacttttatcccttcccggtgccgccactgttgtaccaggtcgagctgtctgttggcggtcagcagttcaatggtaaaggcaaaacaagacaagccgctaagcacgacgccgctgcaaaggccctacgaattctacagaacgaacccctgcccgaaaggttagaggtcaatgggagggagtcagaggaagaaaatctcaataagtcagaaatttcacaggtttttgaaatcgccctaaagaggaacctgcctgtgaacttcgaggtggccagggagtccggcccacctcatatgaaaaatttcgtgactaaggtatcagtgggtgaatttgttggtgagggcgagggcaagtccaaaaaaatttcaaagaaaaatgcggcaatcgcagtgttagaggagctcaagaaactgccccctctccctgccgtggaaagagtgaagcctcgtattaagaagaagactaagcctattgtcaagactagcccagagtatgggcaagggattaaccctatttcacgcctcgcccagatacagcaagcaaaaaaagaaaaagaaccagagtacacactgctaactgaacgcggactcccccgtcgtcgggaatttgtgatgcaggtgaaggtcggcaaccatacagctgaggggaccggaaccaacaagaaggtggccaaacgtaatgctgccgagaacatgttggagatcctagggttcaaggtgccccaggcacagcctactaaacctgctctcaagtctgaggagaagacacccattaagaaacccggagacggacgtaaagtgacgtttttcgagccgggtagcggtgacgagaatgggacttccaacaaagaagacgaattccgaatgccttacttatcgcatcagcagcttccagccggaattctcccaatggttccagaggtcgctcaggctgtcggtgtatcccagggccaccacaccaaagacttcactagggctgcacccaacccagctaaggcaacagtgacagcgatgatcgcacgggagctgctgtacggcggaaccagcccgaccgccgagactatcttgaagaataatatttcttcgggccacgttccccatgggccactgactcgccctagtgagcaactggactacctcagccgtgtgcaaggattccaagtcgaatacaaggactttcctaaaaataacaagaatgagtttgtatccctgattaactgcagtagccagccgccactgatctctcatggaatcggaaaagacgtggagagctgccacgacatggcagcgttgaatatcttaaagcttctgagcgaactcgaccagcagtccaccgagatgcctcgcaccgggaacggcccaatgtccgtgtgtgggagatgctag

SEQ ID NO: 28865 - DNA, 1509 bp, synthetic construct
  source 1..1509: mol_type = other DNA; note = Synthetic coding sequence
atgaagctgggtaaaaagcccatgtataaacccgttgacccttactccaggatgcaaagtacctacaattataacatgcgaggaggcgcatatcctcctcggtacttctacccattccccgtgccgcctctgctgtatcaagttgagctgtccgttggcggacaacagtttaatggcaaaggaaagactcggcaagccgctaaacacgacgcggctgcaaaggccctccgaatccttcagaacgagcccttacctgagagattagaggtgaacggaagggagagcgaggaagaaaacctgaacaaaagcgagatctcgcaggtgttcgagattgctctgaaacgtaacctgcctgtcaactttgagagcttcccacttaagcaggtggctagagagagcggacctccacatatgaagaacttcgtcaccaaggtctcagtgggagaattcgtgggggaaggcgaaggaaaaagcaagaaaatcagcaaaaaaaacgcagccattgcagtgcttgaggagttaaaaaaactgccgcctctgcccgcagtcgaaagagtgaagcccaggatcaagaaaaaaaccaagcccatcgtcaaaccccagacaagccctgagtacggccaggggattaacccgatcagtcggcttgcccaaattcaacaggcaaagaaggagaaggagccggaatacactctgctgacagaacgcggactgccacgtagaagggagttcgtcatgcaggtaaaggtgggaaaccacacagccgaaggcaccggaaccaataagaaagtggcaaaacggaatgccgcagagaatatgttagaaattctgggctttaaagtcccccaagctcaacccaccaagcctgccttaaagtctgaggagaagacacctatcaaaaagcccggagatggtcgaaaagttaccttcttcgaaccaggctccggagacgagaacggcaccagcaacaaagaggacgagttccgcatgccttacttgagccatcagcagcttccagctggcatcttgccaatggtgcctgaggttgcccaggccgtgggagtgtctcagggacatcacacaaaagactttacccgggctgctccaaaccctgcgaaggccaccgtcactgctatgatcgctagagaacttctatacggtggaacgtcccccaccgccgagacgatcttaaaaaacaacatctccagtggccacgtgccccacggccctctgactagacccagtgagcaactggattacttatcccgcgtgcagggttttcaggtggaatataaagactttcctaagaataataaaaacgagttcgtgagcctgataaattgttcctcccaacccccacttatttctcacgggattggcaaggacgttgaaagttgccatgacatggcagccttgaacatccttaagttgctgtccgagttagatcaacaaagcaccgagatgccgaggaccggaaatgggcctatgtccgtatgcgggcgatgctag

SEQ ID NO: 28866 - DNA, 1491 bp, synthetic construct
  source 1..1491: mol_type = other DNA; note = Synthetic coding sequence
atgaaactggggaaaaagccaatgtacaagccggtggatccatactcacgtatgcagtctacttataattacaatatgcggggaggggcttatcctccacggtacttttacccttttccggtacctccgttactgtaccaggtggagctgtcagttggaggacagcagttcaatggcaagggaaagactcgccaagctgctaagcatgacgcagcggctaaagcactgagaatcctgcagaacgaaccgctgccagagagactggaggtcaatggcagggaatccgaggaggaaaatcttaacaaaagtgaaatctctcaggtattcgagattgctctaaagaggaatcttccagtgaacttcgaagtggcaagagaaagtggtcctccacatatgaaaaacttcgtgaccaaggtctctgttggtgaattcgtgggtgagggcgaaggaaagagcaagaaaataagcaaaaagaatgccgcaatcgccgtcctagaagaactgaagaaactcccccctctacctgctgtggagcgggtgaaacctcggatcaagaaaaagactaaacctatcgtcaagccacaaacctcacccgaatacggacaggggattaaccctattagccgtcttgctcaaattcagcaagctaagaaggaaaaggaacctgagtacaccttgctcaccgagcggggactgccaaggagacgggagttcgtgatgcaggtgaaggttgggaatcacaccgctgaaggaaccggcactaacaaaaaagttgcaaaaagaaacgctgccgaaaacatgctggagattctggggtttaaggttccacaggcacaacctacaaaacccgctcttaaatcggaagaaaaaaccccaataaaaaaacctggcgacggcagaaaagtgaccttttttgaaccgggttccggcgacgagaatgggaccagcaacaaggaagatgagttcaggatgccatacctctctcatcaacagttgcccgctggcatcttgcctatggtgcccgaagtggcccaagccgttggagtgtctcaggggcatcatactaaagattttactagggccgctcccaacccggcaaaggccactgtgacggccatgattgccagggaacttttatacggaggtaccagccctacagctgaaaccatattgaagaataacatatcttcaggccatgtcccccacggccctctaacaaggccctcggaacagctcgattaccttagccgggtgcagggctttcaggtagaatataaggactttcccaagaataataagaatgagttcgtgtccctaatcaattgcagtagtcagcccccactgatttctcacggaatcggaaaggacgtggagagctgccacgacatggccgcattaaacatcctgaaactgttgagcgagctcgaccagcagtccactgagatgccccgaaccggcaacgggccaatgagcgtctgtggcagatgctag

SEQ ID NO: 28867 - DNA, 1473 bp, synthetic construct
  source 1..1473: mol_type = other DNA; note = Synthetic coding sequence
atgagcgaagtcacaaaaaactccctcgaaaagatcttgccacagcttaaatgccatttcacttggaatctgtttaaggaggattcggtttcgcgtgacctggaggacagagtgtgcaaccagattgagtttttgaatacagaatttaaagcgactatgtacaatctgctcgcatatatcaaacatctggatggaaacaatgaagctgccctcgagtgccttcgccaagccgaggaacttatccagcaggagcatgccgatcaggcggagatcaggtccctcgtgacatggggcaattatgcttgggtatactatcacctgggcaggctgagcgatgctcagatctacgtggataaggtcaagcagacgtgcaagaaatttagcaacccgtacagtatcgagtattctgaactcgactgtgaggaaggctggactcagttaaagtgtggcagaaacgagcgtgcaaaagtgtgcttcgagaaggcactggaagaaaagcctaacaatccagagttttcttccggcttagccatcgccatgtaccatctagataatcaccccgagaagcagtttagtacagacgttttaaaacaggccatcgagctttcccctgacaatcaatatgtgaaagtgctgctcggattgaagctgcagaaaatgaataaggaagctgaaggggaacagtttgtggaggaggcgctagaaaaatcaccttgtcagaccgatgtgctgcgatctgctgctaaattttatagaaggaagggagatttggacaaggccatcgagctctttcaacgtgtgcttgagtcaactcccaacaacgggtatctgtatcaccagatcggttgttgctacaaggcgaaggtgagacaaatgcaaaacacaggtgagagtgaggccagcggcaacaaagagatgatcgaggccctgaagcaatatgctatggactattctaataaggccctcgaaaagggcctgaatccacttaacgcttattccgacctcgcagagttcctggaaaccgaatgttatcagacccccttcaacaaggaggtgcccgatgccgagaagcaacagtctcaccagcgttattgcaatctacagaagtacaacggaaaatccgaagacaccgcagtacagcatgggttggaaggcctgagcatctccaagaaatcaactgacaaagaggaaataaaggatcagccgcagaatgtgtcggagaacctgctgcctcagaacgcccctaactactggtacttgcaggggctgattcacaagcagaatggagaccttctgcaagctgctaagtgctatgaaaaagagctgggaaggcttcttcgcgatgctccctcaggcatcgggagcattttcctttcagcctccgaattagaagatggctcagaagagatggggcagggggcagtctcaagctctccgcgtgagctgctgtctaacagcgaacaactgaactag

SEQ ID NO: 28868 - DNA, 1473 bp, synthetic construct
  source 1..1473: mol_type = other DNA; note = Synthetic coding sequence
atgagcgaggtcactaaaaattcgctggaaaaaattctccctcaactgaagtgtcattttacatggaatctgttcaaggaggactccgtgtctagggatttagaagaccgtgtttgcaaccagattgagtttctgaacaccgagttcaaagccaccatgtataatctactggcctacattaagcatctggacggcaacaacgaagcggcacttgaatgcttgagacaggccgaagagctcattcagcaggagcacgctgatcaggctgaaatacgctctttggttacttgggggaattacgcttgggtgtactaccatcttggtcgactctccgacgcccaaatttatgtggataaggtcaagcagacctgtaaaaagttttccaatccatactctattgagtacagcgaactggattgtgaggaaggctggacccagctgaaatgtggacggaatgaacgagcaaaggtgtgtttcgaaaaggctcttgaggagaagcctaataatcctgaattctcgagcgggctggctatcgccatgtatcacctcgacaatcatcccgagaaacagttcagcaccgatgtccttaagcaggctattgagctgagtcccgataatcaatacgtgaaggtcctgctgggcctgaaactacaaaaaatgaataaggaagccgagggtgagcagtttgtcgaggaggcactggagaagagtccttgtcagaccgatgtgctacgctcagctgctaagttctatcgcaggaagggcgacctggataaagctattgagctctttcagagagtgctggagagcacccccaacaacggatatctgtaccaccaaattggatgctgttacaaagccaaagtgcgacagatgcagaacacaggcgagtccgaggcttctgggaacaaggagatgatcgaagcactgaagcagtacgccatggattactctaataaagccttggagaagggcttgaatccactgaacgcttactctgatctggccgaatttctagagacagaatgctaccagactcccttcaataaggaagtcccagacgcagaaaagcaacaatctcatcaacggtactgcaatttgcagaagtacaatgggaagagtgaagatacggccgtgcagcatgggttggaggggctttcgatcagcaagaagagcaccgacaaggaagaaatcaaggaccagccgcagaatgtgtccgaaaatcttctcccccaaaatgcccctaattactggtatctgcagggcctgatccacaaacagaatggcgacctgctgcaagcagctaaatgctatgagaaggaactggggagactgttaagggacgctccgagcggcatcggcagcatcttcctgtccgcttctgagctggaggacggatcagaggagatggggcagggagcagtctcttcgtcacccagggaactgctttctaactctgaacagctgaattag

SEQ ID NO: 28869 - DNA, 1509 bp, synthetic construct
  source 1..1509: mol_type = other DNA; note = Synthetic coding sequence
atgaaactgggcaaaaagcccatgtataagcctgtggatccatactccaggatgcagagcacctataactataatatgcgcggtggagcttatccgccaagatatttttacccatttccggtcccccctcttctttaccaggtagagctgagtgtgggtggccaacaattcaatggaaaaggaaagacccgacaagccgctaagcatgatgccgctgccaaagccctgaggatcttgcaaaacgagcctctgccggaacgcctggaggtgaatgggcgtgagtcggaggaagaaaacctcaacaaatccgagatatcccaggtcttcgagatcgccctaaagcgaaacctgcccgttaattttgagagctttcccttaaaacaggttgcgagagaaagcggacccccacatatgaagaattttgtgacaaaagtttccgtgggtgagttcgtcggtgagggcgagggtaaatccaagaaaatttctaagaaaaacgccgcaattgcggttttagaggagcttaaaaaactgcccccactgccagccgttgagagagttaaaccacgaattaaaaagaagaccaaaccaattgttaagcctcagaccagcccagagtatggccagggtattaaccccatctctcggcttgcgcaaatccagcaggccaagaaagagaaagagccagagtacactctgctgaccgaaaggggactgccgagacgtagagagttcgtgatgcaagtaaaagtgggtaatcacaccgccgaggggacaggaacaaacaagaaggtcgcaaaacgaaacgccgcagagaacatgctggagattctggggttcaaagttccccaggctcagccaaccaaacctgcacttaaatcagaggagaagacccccataaagaagccaggcgatggaagaaaggtcacgtttttcgagccaggcagtggcgacgaaaatggcaccagtaacaaggaggatgagtttaggatgccttaccttagccatcaacagcttccagcaggaattctgcctatggtgcccgaggtcgcccaggcggttggcgtgagtcagggccatcacacgaaggacttcactcgcgctgcgcctaacccggctaaggctacagtcactgcaatgatcgccagagagttgttatacggcggaacatcacccacggcagagactatcttaaaaaacaacatatctagcggacacgtacctcacgggcctctgacccggccaagcgaacagctggactatctgagtagggttcagggttttcaggtggaatacaaggacttcccgaagaacaataaaaatgagttcgtgtctctgatcaactgtagcagtcagcctcccctgatctctcacggaattgggaaagacgtcgagtcatgtcatgacatggcagctctcaacatcttaaagctcctgtcagagctggatcagcagtcaaccgaaatgccccgaacaggaaacggtccgatgtcagtctgcggaaggtgttag

SEQ ID NO: 28870 - DNA, 654 bp, synthetic construct
  source 1..654: mol_type = other DNA; note = Synthetic coding sequence
atggctgaaggaagtcagagcgcaccagaggccggaaatgacatgggcaacgatgatgctattggaggcaatgtgtcgaagtatatcgtcctcccaacaggttactgcggccagcccaagaaagggcacctgatattcgacgcctgcttcgaaagtgggaatttggggagggttgaccaggtgtcggagtttgaatatgatctgttcattaggcctgatacatgcaatcctagattccgggtctggttcaactttaccgtagaaaacgtcaaggagagtcagcgagtcattttcaacattgtgaacttcagcaaaactaaatccctgtaccgcgatgggatggctcccatggttaaatccacaagtaggcccaagtggcaaagactgcctcccaagaatgtatactactaccgctgtcccgaccaccgcaaaaattacgtaatgtcatttgccttttgtttcgatcgcgaggaagatatctatcagtttgcttattgttatccatatacttacaccagatttcaacactatttggatagcctccagaaacgaaatatggattattttttcagagaacagctcggtcaaagcgtgcagcagcggaaactcgacctgctgaccatcacatcacccgctgggcgatggagttggtag

SEQ ID NO: 28871 - DNA, 963 bp, synthetic construct
  source 1..963: mol_type = other DNA; note = Synthetic coding sequence
atggcggagggcagtcaatctgcgccagaagcaggaaatgacatgggcaacgacgatgctatcgggggaaatgtcagcaagtatattgtgttacccacaggatactgcgggcagccgaagaaagggcacctcatattcgatgcctgtttcgagtctggcaacttgggacgcgtggaccaggtttctgagtttgagtatgacctattcatcaggccagatacatgcaatccccgtttcagagtgtggttcaattttaccgttgaaaacgttaaagaatcacagagagtaatttttaatattgttaactttagcaaaacaaagtcactgtacagggatggtatggcccctatggtcaaatcaacctcaagacctaaatggcaaagactgccccctaagaacgtttactattaccgatgtccagatcacagaaagaactatgtgatgtcatttgctttctgtttcgaccgtgaagaagatatttatcagttcgcttattgctatccgtacacctacaccaggtttcagcactatcttgattctctgcagaagcgaaatatggactacttcttccgagagcagttaggccagtcagtacaacagcgcaaactggaccttcttactatcacatctccggataatttaagggaaggtgctgagcaaaaggtggtgtttatcactggacgcgtccatcccggtgaaactcctagttctttcgtgtgccagggcatcattgacttccttgtgtctcaacatccaattgcctgtgtgctcagagagtacctagtcttcaagatcgctcccatgttaaatcccgacggagtctatctgggcaactataggtgcagcctcatgggatttgacttgaatcgccattggctggaccctagcccttgggtgcacccgactttgcacggggtgaaacagctgatcgtgcagatgtacaacgatcctgtcagcaactag

SEQ ID NO: 28872 - DNA, 1512 bp, synthetic construct
  source 1..1512: mol_type = other DNA; note = Synthetic coding sequence
atggccgagggctctcaatctgcacccgaagcgggaaatgatatgggtaatgatgacgccataggcggaaatgtttccaagtacattgtcctgcccactggttattgcggccagcctaagaaaggccacctgatctttgacgcttgtttcgaatccgggaacctgggtcgggtggatcaggtttcagagtttgagtacgacctctttattagaccggacacttgcaaccctcgattccgagtttggttcaactttactgtggagaatgtgaaggaatcacagagagtcatttttaacatagtgaacttttctaaaaccaaaagtctgtatcgtgatggtatggcgccaatggtgaagtcaaccagcaggccaaaatggcaaaggctgccccctaagaacgtatactactacagatgccctgatcaccgtaaaaactatgtcatgtctttcgcgttctgcttcgaccgcgaagaagatatttaccagttcgcctattgctacccatacacctatacgaggtttcaacactacctggacagcctccagaaacggaatatggattacttctttagggaacagttgggtcagtcagtgcagcagcgcaagctggacctgctcacaatcacgagtcctgacaatttgagggagggcgctgagcagaaggtggtcttcatcaccggccgtgtgcatccaggggaaaccccttcctcctttgtctgccaggggattatcgatttcctggtgtcacaacatcccattgcatgcgttttgcgggaatatcttgtgtttaagatcgccccaatgttgaatccagatggggtgtatctgggtaactacaggtgcagtttgatgggattcgatttgaatcgacactggctggatccctctccatgggtccatcccacactccacggtgtgaaacagctgattgtccagatgtacaatgaccccaagacgagtctagagttctacattgatatccatgcccattctactatgatgaacgggttcatgtatggtaacatttttgaggatgaagaaaggtttcagcggcaggccatcttcccaaagctgctttgtcagaacgccgaagacttttcctactcgagcacatcatttaatagggacgccgtaaaggctggcacaggtaggcgtttcctgggaggcttgctggaccataccagctactgttacacacttgaagtgtccttctactcttacatcatttccgggacaactgcagcagtgccatataccgaagaggcttacatgaagttgggccgaaacgtggcacgcactttcttggactattacaggctgaacccagtcgttgagaaggtggctatccccatgccacggctgcgcaataaggagatcgaggtccagcgaaggaaggagaagtctcctccgtacaagcaccccttattgagagggcctgcatctaattaccctaattcaaagggtgacaagaagtctagcgtgaatcacaaggacccatctactcctttctag

SEQ ID NO: 28873 - DNA, 1734 bp, synthetic construct
  source 1..1734: mol_type = other DNA; note = Synthetic coding sequence
atgtcacaggtgcaagtccaagtccagaacccatccgcggctctgtctgggagtcagatcttgaacaaaaatcagtcccttctcagccagcctttaatgtctatcccctccacgacatccagcctaccttccgaaaacgccggtagaccaatccagaacagcgccctgcccagcgcctccattacctccacttcagctgcagcagagtcaattaccccgacggttgaattaaacgcgttgtgtatgaagctgggtaaaaagccgatgtacaagccagtggacccatacagtcggatgcaaagcacctacaattataatatgcggggaggagcctacccccctcgctatttctaccccttccctgtgcccccacttctctatcaagtggaattgtctgtgggtggacaacaatttaacggcaaagggaaaacacggcaggccgctaaacatgacgccgctgccaaggcactacggattctgcaaaatgaacccctgccggaacggctggaggttaacggacgggaatctgaagaggaaaatctgaacaaatccgaaatcagccaggtcttcgagattgccctgaaacggaatctgcccgttaactttgaagtggcccgagagagtggacccccacacatgaaaaacttcgtgactaaagtttccgtcggagagttcgtgggagagggcgaaggcaagtccaagaaaatctcaaaaaaaaacgccgcaattgcagtgctggaggaattgaagaagctcccccctttaccagcggtggagcgggtcaaaccaaggatcaagaagaaaactaagcctatcgtgaaaccacagacatcacctgaatatggtcaaggtattaaccccatcagccggcttgcgcaaatccaacaggctaagaaggagaaggaacctgaatataccctcctgactgaacgcggtttaccacgccgacgagaatttgtcatgcaagtgaaggtgggtaaccatactgctgagggtactggaacaaataaaaaagtcgcaaaacggaacgctgcggagaatatgcttgagatactcggattcaaggttcctcaggcccagcccacgaagccagccctgaagtccgaggaaaagacacccattaagaaaccaggggatggacggaaagtaacctttttcgagccgggttcaggcgacgagaacgggacgtcaaataaggaggacgagttccgcatgccataccttagccaccaacagctacctgcgggaatcctgcctatggtcccagaggtggcccaggcagtgggggtgtctcaggggcaccatactaaagatttcactcgcgcagctcctaatccagcgaaggctactgtgacagccatgattgcacgagaactcctgtacgggggtacgagtcccactgctgagacaattctcaaaaataacatcagctctggacatgttccacacggcccactcacaagaccgtccgaacagctagactatctttcaagagtgcaaggttttcaagtggaatacaaggacttccctaaaaataacaagaacgaattcgtatccctgatcaattgtagctcacagccaccacttattagtcatggcatcggcaaagacgtggaatcttgtcatgatatggcagcccttaacatcctcaaacttctctcagagctcgaccagcagagtaccgagatgccacgcaccggtaacggaccaatgagcgtctgtggcaggtgttag

SEQ ID NO: 28874 - DNA, 852 bp, synthetic construct
  source 1..852: mol_type = other DNA; note = Synthetic coding sequence
atgtccggagctgtcctcctcgaaagggaacggttgactagtggcacaacttggcataccgccggacttctctggcaactgcggccatctgacgttgaagttgaattactggctcacactcgtagagtagttagccgggagttggaggaggagacgggcctgcatactggatggattcaaaatggcggattgtttattgcgtccaatagacagcgccttgatgagtataagcgcctgatgtctctagggaaggcctatggggtggagagccacgtcctctctccagctgagaccaagaccttatatccactaatgaacgtggacgacctctatggcacactttacgtgccacatgatggaaccatggatcccgctgggacctgcaccactttggcccgagccgcttccgccaggggggctcaggtgattgaaaactgtcccgtcaccggtattcgcgtctggacggacgattttggcgtgaggagggtagctggagttgagacacagcacggcagcatccagacaccttgtgtcgtgaattgtgctggcgtgtgggcttccgccgtggggcgaatggcaggggttaaggtgcccttagtggccatgcaccacgcttatgtcgtgacagagcggatcgaagggattcagaatatgccgaacgttcgggatcatgacgcctccgtttatctgagactccagggtgatgcgctcagtgtcggaggatacgaggccaatccgatcttttgggaggaagcggtgaagtaccggccacgtgcagctgggggattatgcctgaaaacatctaccgaaaaagtgtgtgctgtgtggagtgacgatctccgacgagcctag

SEQ ID NO: 28875 - DNA, 1107 bp, synthetic construct
  source 1..1107: mol_type = other DNA; note = Synthetic coding sequence
atgtcatatttcgggaaattttacctggtgggcttggacgccagaaaggccgctgattggcttttctctgcggacgtctctagaccaccaggcagcacagtatacacgtgtatgttgaatcataggggtggtactgaatccgacctaaccgtaagcaggctggctccctcccaccaggcgtctccactggcccctgccttcgagggagacggttactacttagcaatgggcggtgctgtggcccagcataactggtcccatattaccactgtgctgcaggaccagaaatcccagtgccagttgattgacagctcagaagatttggggatgatctcgattcaaggtccggcaagccgagccatcctccaggaagtgctggatgccgatttgagcaacgaagccttccccttcagcacccacaagctgttacgcgcagctggacacctggtcagagctatgcgcctgtcatttgtaggcgaactgggttgggaacttcatattcccaaggctagttgtgttcctgtgtatcgggcagttatggccgcaggcgcaaagcacggattaattaacgcaggataccgcgctatcgattcccttagcatcgagaagggctaccgtcattggcacgcagatttgagacctgatgacagccccctggaggctggattggcctttacatgcaagctcaaaagccctgtgccgtttctggggagagaggccctggaacagcagagggccgctgggttgcggagaaggcttgtctgctttacaatggaagagccactgtggacacggccacatccggcagtgtcaggcgctccggcttttagtactgcttcttctagcaaggtccctatgttcggtcttgaggccatttggcgtaacggacaggtggtggggcatgtgaggcgtgctgatttcggcttcgccatcgacaagactattgcttacggctacatccatgacccctccggtgggcctgtgagcctcgattttgtcaaaagcggagactacgctttagaaaggatgggggtgacttacggagcccaagctcatctgaagtccccttttgaccctaacaacaagcgggtcaagggcatctactag

SEQ ID NO: 28876 - DNA, 2757 bp, synthetic construct
  source 1..2757: mol_type = other DNA; note = Synthetic coding sequence
atggccagtctatcccgcgctctaagagtggccgctgctcatcctagacagtccccaacacgcggtatggggccatgtaatctttcttctgctgctggccctactgctgagaagtcagttccgtaccagcgcacgctgaaggagggccagggaacaagcgtggtggcccaagggccttcccgccctctccctagcacagccaacgtggtcgtcattggaggaggaagtctgggctgtcagacattatatcacctggcaaaattagggatgagcggcgcagtcctgttggagagagagcggctgacatccgggaccacttggcatactgcaggcctgctatggcagctacggccttcggatgtcgaagtggagctgctggcccatacaaggagggtcgtttcacgggaactcgaggaagaaaccggtctccatactggttggatccagaatggtggcttgttcatagcgagtaacagacagaggctggacgagtacaaaagactgatgtctctgggaaaggcatacggagttgaatcacatgttcttagcccagctgaaaccaaaaccttgtaccccctgatgaacgtggacgatctgtacggcacgctgtacgttccacatgacggtactatggacccagccggaacttgcaccaccctcgcgagagccgcttctgccaggggagcacaagttattgaaaactgtccagtgacgggcataagagtttggacagatgattttggtgtccgacgagtcgcaggggtggagacacagcatgggtctattcagacaccttgcgttgtgaattgcgccggtgtgtgggcgtccgctgttggccgtatggccggagtcaaggtcccgcttgtggccatgcaccacgcctatgtggtcaccgaacgtatcgaaggcatccagaatatgccaaacgtgcgagaccacgacgcaagcgtgtacttacggttacagggcgatgcacttagcgtggggggatatgaggctaatcccattttttgggaagaggtgtccgataaatttgcattcggcctatttgatttagactgggaagtattcacccagcatattgaaggagccattaatcgcgtacctgtgcttgagaaaacaggcataaagtcaacagtgtgtggaccagaaagcttcaccccagatcacaagccactgatgggcgaggcacctgagcttagaggcttctttttgggatgtggatttaactctgccggtatgatgttgggcggaggctgtggacaggaactggcacattggattattcacggacgccctgaaaaagacatgcatgggtatgatatccgaagatttcatcactccctgaccgaccatccacgctggattcgtgaaagatcacacgagagctatgctaagaattattccgttgtgttccctcacgacgagcccttggcgggtaggaacatgcgtagggaccctcttcatgaggagcttctgggacagggttgcgttttccaggagcgccacggctgggaaaggccaggttggttccatccccgtggtccagctccggtgctcgagtacgattattacggcgcttacggttcacgggctcacgaggactatgcctaccggagactgctggctgatgaatacacattcgcctttcctcctcatcacgacactatcaaaaaggaatgtttagcatgccgcggagccgcagccgtgttcgatatgagctacttcggcaaattctacctggtcgggcttgacgcccgtaaagcagcagactggctgtttagcgccgatgtaagccgccctcctgggtcaaccgtgtacacctgcatgctaaatcatcggggagggacagagtctgatttgactgtgagtcggctcgcccctagtcaccaggcgtctccgctggcccctgcatttgaaggcgacggttattacctcgctatgggcggagctgttgctcagcacaattggagccacattaccacggtgctgcaggaccagaaatcacagtgccagctcattgacagtagtgaggatctgggcatgatctcaattcagggccctgcttcgcgagctattcttcaggaggttctcgatgcagatctgtccaacgaggcatttcccttcagcacccataaacttctgagggctgctgggcatctggttcgcgctatgcgcctgtctttcgttggggagctgggctgggagcttcatatccccaaggcttcatgcgtaccagtttaccgagcagtgatggcagctggggctaagcacggtctcattaacgccggataccgcgctatcgattcactgagtattgaaaagggatatcggcactggcacgccgatctgaggcccgacgactctcccttagaggccggactggccttcacctgcaaactgaagtcccccgtgccatttctaggacgggaagctctggagcagcagcgggctgctggcctcagacgtcggctcgtgtgtttcactatggaggataaagtgcccatgttcgggctagaggctatctggcgaaatggacaggtggtgggacacgtgaggcgcgctgatttcgggtttgctatcgataaaacaatcgcttacggctacatacacgatccttcaggcggtccagtctctttggatttcgtgaagtccggcgactatgcgttggagcggatgggcgtgacgtatggagcccaggcccacctcaaaagcccctttgaccccaacaacaagcgtgtcaagggcatatattag

SEQ ID NO: 28877 - DNA, 720 bp, synthetic construct
  source 1..720: mol_type = other DNA; note = Synthetic coding sequence
atggagggaactgtggaaagccagacacctgatcttagggatgtagagggcaaggtaggcaggaaaacacctgaaggcctacttagaggtctgagaggcgagtgcgagctgggaactagcggcgcacttctcctgccgggtgcctccagtactggtcatgatctcggcgacaagataatggcactaaaaatggaactggcatatctgcgggcaatcgatgtaaaaatactccaacagctcgtgactctcaacgagggtatcgaagcagtgcggtggctcctggaagagcgcggtaccctgacctctcattgttcaagcctgacctcttcccagtactcgctgacaggtggatctccaggcagatctcgcaggggatcctgggactctttaccggacaccagcactaccgacaggctcgacagtgtatcaatcggctccttcctcgacactgtggcaccgagtgagctagatgagcaagggccacccggagcacctcgcagcgaaatggattgggcgaaggttatcgctggcggtgagcgagctcgtaccgaagttgatgttgccgcaacaaggctggggtcactccgcgctgtctggaagccacctggagaacgtttgcagggcggaccccctgaaagtcccgaagacgagagcgctaaactggggtttgaggcacactggttttgggaacaatgtcaggacgacgtgacatttctatag

SEQ ID NO: 28878 - DNA, 294 bp, synthetic construct
  source 1..294: mol_type = other DNA; note = Synthetic coding sequence
atgagcagtgggaatgccaaaattggccatcctgcgccaaacttcaaggcaacagccgacgagggcatatcgtttagaggtctattcatcatcgatgacaaggggatcttacgccagattactgtcaacgatctccccgtgggtcgatccgtcgacgagactctgagacttgtgcaggcttttcagtttactgacaagcatggcgaagtgtgccctgccggatggaaaccgggttcagacaccatcaagcccgatgttcagaaatccaaagaatattttagcaagcagaagtag

SEQ ID NO: 28879 - DNA, 1668 bp, synthetic construct
  source 1..1668: mol_type = other DNA; note = Synthetic coding sequence
atggacagaagcaagaggaatagtatcgctggttttccaccacgcgtggagcgcctggaagagttcgaggggggaggcggaggagagggcaatgtttcacaggtgggcagagtgtggccgagttcgtatcgagccttgatttcagcgttttccaggcttacacgcctggacgatttcacctgcgagaaaattggctcaggctttttcagtgaggtattcaaagttagacaccgagcctcaggacaggtcatggccctaaagatgaataccctgtcctctaatcgggctaatatgttaaaggaggtacagctaatgaatagacttagccacccgaacatcctgaggtacatcaattctggcaatctggaacagttactagacagcaatctgcacctgccttggacagtccgcgtgaaacttgcgtacgacatcgcagtgggcctctcctacctccactttaagggaatcttccatcgggatttgacaagtaagaattgcttgatcaaacgcgacgaaaatggatatagcgcagtagttgccgactttggactggctgagaaaattcccgatgtctcaatggggagcgaaaagttagccgtcgttggcagccctttctggatggcgccagaggttctcagggatgagccttacaacgagaaggcagacgtgttttcttatgggatcatcctttgtgagattatcgctaggattcaggctgatccggactatctccccagaacggagaattttggactggattatgatgcgttccagcatatggttggagattgtcctcccgattttctccaattgacattcaactgctgtaacatggatccaaaactgcgaccgtcttttgtggagattggtaagaccttggaggagatcttgagccgattacaggaagaggaacaagagcgggaccgcaagctgcaacccacagcaagaggtctgctggagaaagctccaggtgtgaagagactatcttcactcgatgacaagattccccataaatccccatgtccccgacgcaccatctggctttctcggagtcaaagcgacattttttccaggaaaccgcctcggacagtgtccgtcctcgatccgtactacaggccgagggacggcgcagcacgaacccctaaagtaaacccattttctgcccgacaggatcttatgggcggaaagatcaaatttttcgatctcccatcaaaatctgtgatcagcctcgtttttgatttggatgcacctggtcctggcacaatgcctctagctgattggcaggagcctctggcacccccaatcaggaggtggcggagcctccctggcagccctgagttcctccaccaggaggcctgtccatttgtcggaagggaggaaagcttatcggatggcccacctccaagactgagcagtttgaagtaccgagttaaagagatcccacccttcagggcatctgcacttccagccgctcaggctcatgaggcaatggactgttccatacttcaggaagagaacggctttgggtccaggccccagggaactagtccttgtcccgctggcgcttcagaagagatggaagtcgaggagcgccctgcaggcagcacaccagcaactttctctacctcgggaattggactccagacacagggtaagcaggacgggtag

SEQ ID NO: 28880 - DNA, 1629 bp, synthetic construct
  source 1..1629: mol_type = other DNA; note = Synthetic coding sequence
atggatcgttctaagaggaacagtattgccggatttccacccagagttgagcgactcgaggagtttgaaggcggaggcggaggagagggcaacgtgagtcaggtgggccgagtctggccgtcttcgtatagagctctcatctccgcattttcccgcctgactcgactggatgatttcacatgcgagaagataggttcaggtttcttcagcgaagtgtttaaagtccgccatagggctagtgggcaagtgatggcgcttaagatgaatacacttagctctaatagagctaatatgctaaaggaagtgcaactcatgaaccggctgagtcaccctaacatcttaaggtttatgggcgtgtgtgtgcaccagggccagctgcacgcgctgaccgaatacatcaactctgggaacctggaacagctgctggacagtaatctgcatctcccatggaccgtcagggttaagctcgcctatgatatagccgtcggactctcatacttgcacttcaaagggatctttcatagagacctgaccagcaagaattgcttgatcaaaagggatgagaatggctacagcgcagtcgtcgctgatttcggcctagcagagaagatccctgacgtcagcatgggttcagagaaattggctgtggtcggcagcccattctggatggctccggaagtcctgcgagatgagccgtacaacgaaaaagccgatgtgttcagctacggcattatcctctgcgaaatcatagcacggatacaggccgatccagactatctgccgcgtaccgagatggaccctaagcttcgcccttcttttgtcgagattgggaagaccctagaggaaatcttgtcaaggctgcaggaggaggagcaggagagggaccgtaagttgcaacccacagctcggggactactcgagaaggcccctggagtgaaaaggctgtccagtttggacgataagattccacataaaagcccatgtcctaggcgcaccatctggctgagcaggtcccagtcagacattttcagtaggaaaccccctagaacggtctccgtgctcgacccctactacagacctcgcgatggtgccgctcgcacaccaaaagtcaaccctttctcggctagacaagatctaatgggtggcaaaatcaagtttttcgacctgccaagcaagagtgttatctccctggtctttgatttggatgcgccaggtcctgggacaatgccattagccgattggcaagagcctctggcccctcctattcggaggtggagatcattgccagggtctcccgaatttctgcaccaggaggcgtgtccctttgtggggagggaggagtcgctcagcgatggtcccccacctcgcctgagttccttgaagtaccgcgtgaaggaaattcccccttttcgtgccagcgcactcccagcggcacaagcccacgaggctatggactgctctattctgcaggaagaaaatggatttggaagccggcctcagggcacatctccatgcccagctggcgcttcagaagagatggaagtcgaagaacggccagccggaagtacccctgctacgttttctacgagcggaatcggcttacagacacaggggaaacaggacgggtag

SEQ ID NO: 28881 - DNA, 1716 bp, synthetic construct
  source 1..1716: mol_type = other DNA; note = Synthetic coding sequence
atggatagaagcaagcgcaactcgattgccggttttccaccccgtgtggaacgactggaggaattcgagggcggaggaggaggtgaggggaatgtgagtcaggtaggaagagtctggccgtcgtcgtatcgggcacttatcagcgccttcagtcggttgacgaggttggatgacttcacttgtgagaagattgggagcggcttcttttcagaggttttcaaagtcaggcacagagccagcggtcaggttatggccctgaagatgaatacattgagcagcaatcgagcaaacatgttgaaggaggttcaactaatgaacagactcagtcacccgaacatattgaggtttatgggagtgtgcgttcaccaaggccaactccatgctctcaccgagtatatcaattctggaaatctcgaacagctcctggacagtaacctgcatctgccatggacggtgcgtgtcaagctggcatatgacatcgccgttggtctatcttacctgcacttcaaaggcatctttcatcgggaccttacttccaaaaactgcttgattaagagggatgagaacgggtattcagccgtcgtggccgatttcggtcttgccgagaagattcctgacgtttccatgggctccgagaagcttgccgttgttggaagccctttctggatggcacctgaagtgctcagagacgagccatacaacgaaaaggccgatgtcttctcctacggcatcatcttgtgcgagattatagccagaatccaagccgacccagattatctgccacgcaccgaaaatttcggcttggactacgatgcttttcaacacatggtcggagattgcccgcctgacttcttacagctgacatttaactgctgcaatatggacccgaagcttagaccaagttttgtggaaatcgggaagacgctggaggagatactgagtcggttacaagaagaggagcaggagcgggaccgtaagttacagccaaccgccagggggctgctcgagaaggcccctggcgtgaagcgcctgagtagcctagatgacaagatcccacataaaagtccatgcccaaggcgtacgatctggctgtctcgatcccagtctgatattttcagccggaaaccaccaagaaccgtttccgtgctggacccttactacagaccacgtgatggagctgccagaactccgaaagtgaatccctttagtgcccgacaggacctcatgggtggaaaaattaaattcttcgatctcccaagtaagagcgtcatctctcttgtatttgaccttgacgcgcctgggcctggcactatgccgttggcggactggcaggaaccactcgccccacctattaggcggtggcgtagtctcccaggatctcccgaattcctccatcaggaagcttgtccctttgttgggagggaagagagtctttctgatgggcctccaccacgactgagtagcctgaagtaccgggtgaaagaaatcccaccattcagagcttcggccttgcccgctgcccaggcccatgaagcaatggactgtagtattttgcaggaggaaaacggcttcggcagccgaccgcaggggacttctccctgccctgctggagctagcgaagagatggaagtagaggagcgacccgctggcagcacacccgctaccttctcaacttccggcataggacttcagacacagggcaagcaggacggctag

SEQ ID NO: 28882 - DNA, 1416 bp, synthetic construct
  source 1..1416: mol_type = other DNA; note = Synthetic coding sequence
atgctgggcagttggggctgttataggtatgctaaactgtttagctgttctctgtccacacatgccagattcataaaaattctagacagcgtgcttcatcacttggtcccggcatgggatcacaccctagggacatttagcgaaataaaacaagtgaaacagtttttgctgttgtccagacagcgacctgggctggtggcccagtgcctgcgtgattctgaatctagtaagccgtcatttatgcctcggctctacattaatcgccgtctggccatggagcatagggcatgcccatccagggatccagcctgtaagaatgccgtcttcacgcaagtatatgaaggtctgaagccatcggacaagtatgagaagcctttagattaccgatggccgatgcggtacgatcagtggtgggagtgcaagttcatcgccgagggcataatcgaccaggggggaggcttccgagatagcttggctgacatgtccgaggaactctgcccgtcatcagccgacaccccagtcccattgccctttttcgtgagaaccgccaatcagggtaacggtaccggggaggcccgtgacatgtacgtgcccaacccaagttgtagggatttcgcaaaatatgaatggatcggccaacttatgggagcagcgctgcgcggtaaggagttcctggtattagccttacctgggttcgtttggaagcagctctcaggagaggaggtatcttggagcaaggactttcctgccgtagacagtgtgcttgtaaagctgctggaagttatggagggaatggacaaagagacattcgagtttaagtttggaaaagagttgacctttacgaccgtgttgagcgaccagcaggtggtggagctgatcccgggtggcgcagggatcgtggtgggctacggagaccgtagccgtttcatccaattagtacagaaggcaagactggaggagagcaaagagcaggtagctgccatgcaagcaggactgcttaaagtggtgcctcaggcagtgctggatctgcttacttggcaggagcttgaaaagaaagtgtgcggcgacccggaggtgacagtagatgctctcagaaagctgacacgtttcgaggattttgaaccctctgactcaagggtgcagtatttttgggaggcgctgaataatttcactaacgaggacaggtcccgctttctcaggttcgtcacaggacgtagcaggttgccagcaaggatctacatctatcctgataaattgggttacgagactactgacgccctgccggagagcagcacatgttcatccacactttttttgccccactacgcctctgccaaagtttgcgaggaaaagctgcgatacgccgcttacaactgtgtggcaatagatactgatatgtcaccctgggaagaatag

SEQ ID NO: 28883 - DNA, 825 bp, synthetic construct
  source 1..825: mol_type = other DNA; note = Synthetic coding sequence
atggccgctccagaagctgaagtactgagttccgccgcagtgcctgacctggagtggtatgaaaaatcagaggagacccacgctagtcaaatagaattgttggaaactagcagcactcaggagcctctgaacgcgtctgaggcgttttgtccgagggactgtatggtgccagtggtcttccccggacctgtctcacaggaggggtgctgtcagttcacgtgcgaactgctgaagcatatcatgtatcaaaggcagcagcttccattgccttacgagcagctgaaacatttctacagaaaaccatcgcctcaggctgaggagatgctcaagaaaaagcctcgtgcaacaacagaagtgagcagcagaaaatgtcagcaggcactggctgagcttgagagcgtgctgtctcacttggaagacttttttgcccgaacattagtgcctcgggtgttgatcctccttggaggtaacgcgctgtccccaaaagaattctatgagctggacctgagtctacttgctccttatagcgtagaccaaagcctctctactgccgcatgccttaggaggctcttccgcgctatcttcatggccgatgcgttcagcgagcttcaggcccctcccctgatgggtacagtggtaatggcccagggtcaccgcaactgcggagaagattggttccggccaaagcttaattatcgtgtcccgtctagaggccacaagttaacggtgacgctgtcctgcgggcgaccgtcaattaggacaactgcctgggaggattacatttggtttcaggcacccgtgactttcaaaggtttccgagagtag

SEQ ID NO: 28884 - DNA, 2586 bp, synthetic construct
  source 1..2586: mol_type = other DNA; note = Synthetic coding sequence
atggccggaccagggccaggcgctgtcctggagtctccccgtcagttacttggaagagtgcgttttttagccgaggcggctagaagtctgagagcaggaagacccctccccgctgccttagcatttgtgcccagagaggttctctacaagttgtacaaagatcctgcaggaccaagccgtgtcctgttgccagtctgggaggctgagggcctaggtctgcgcgttggcgctgccggtcctgccccaggaactggtagtgggcctctgagagcagctagagatagtattgaactcagacgcggagcatgcgtgcggacaacaggcgaagaactgtgtaacggccatgggttatgggttaaattgactaaggaacagttagcagagcacctcggcgattgtggccttcaggaagggtggctgctggtatgccgccctgctgaaggaggagccagactggtcccaattgatacgcctaatcacttacagcgacaacaacagttgttcggggtcgactacaggcccgttttgcgatgggagcaagttgtcgacttgacgtactcccaccggttgggtagcagacctcagccggcagaggcctacgcagaagccgtacagagactgctgtatgtacctcccacttggacatacgagtgcgatgaagacctaatccattttctttatgatcatctggggaaagaggacgaaaatctcggcagtgttaagcagtacgtggagtcaatagacgtctcttcttatactgaggaatttaacgtttcatgcctgaccgatagcaacgccgacacttactgggaatcagatggatcccagtgccaacactgggtgaggctcacaatgaagaaggggactatagtaaaaaagctgttgctcactgtggacactaccgatgataactttatgcctaagagagtcgtggtatacggaggcgagggagacaaccttaagaaattgtccgatgtcagcattgacgagacactgatcggtgacgtctgtgttcttgaagatatgactgttcacttacctatcatcgagattagaatcgtggagtgtagggatgacgggattgacgtgcggttgcggggagtgaagataaaaagtagtagacagcgagagctggggttgaacgctgatctcttccagccaacttcccttgttaggtaccccaggctggagggtactgaccctgaagtcttgtatcgacgggctgtgttactgcagcgattcataaaaattctggacagtgttctgcaccacctcgttccagcatgggaccacacactgggaactttttctgagattaagcaggtcaaacagtttctcctgttatccagacaacgaccaggcctggtggctcagtgcctacgcgactctgaaagttccaaacctagcttcatgcctcggttatatatcaataggcggttggcaatggaacacagggcctgcccatctcgggacccagcctgtaaaaatgccgtattcacacaggtctacgaaggtcttaagccttcagataaatacgaaaaacctttggattaccgctggccaatgaggtatgaccagtggtgggagtgtaagtttatcgcagagggtattatcgaccagggcggtggttttagagactctctagccgatatgtccgaagaactgtgccccagctcagccgacactcctgtgcctctcccattctttgtgcggaccgccaaccaggggaacggaactggtgaagctagggatatgtatgtgccaaatccgagctgccgggacttcgccaagtacgaatggattgggcagctcatgggcgcagccctgagaggcaaggagtttttggtgctagcgcttcctggtttcgtctggaaacagctctctggggaagaagtgtcttggagcaaggatttcccagctgtcgactcagtcctcgtgaagctgctcgaggtcatggaaggaatggataaggagacttttgagtttaaattcggaaaggaactgacctttactaccgtgctctcagaccaacaggtggtggagctcattcctgggggagccggaattgtggtaggatacggggatcgatctagattcattcagttggttcagaaagccagactagaggaaagtaaagagcaggtggccgctatgcaggctggcctgctcaaggtggtgccacaagccgtcctggacctgctcacctggcaggagctcgagaagaaggtgtgtggagatcctgaagtgacagtggatgccctgcgcaagttgactcgctttgaagactttgagcctagcgacagtcgtgtccagtacttttgggaagctttgaacaactttaccaatgaggatcggagccgcttcctccgtttcgtgaccggcaggtcacgactcccagccagaatatacatctatccagataagctgggctacgagacaactgatgccctccccgagtccagtacatgtagctccactctctttctgccgcactacgcgtcagctaaggtttgcgaggagaaactcagatacgcggcttacaactgtgtcgctattgataccgatatgagtccctgggaggaatag

SEQ ID NO: 28885 - DNA, 1197 bp, synthetic construct
  source 1..1197: mol_type = other DNA; note = Synthetic coding sequence
atggaaagcgtcctcagcaagtacgaggatcaaatcaccatttttactgactatctggaagagtacccggacaccgacgagctggtgtggattctaggaaagcaacacctgctgaagacagagaagtctaaattactctctgatatttctgcaaggctctggtttacctaccggaggaagttttcacctatcggcggtactggcccttcctctgacgccggatgggggtgtatgctaaggtgcggacagatgatgctcgcacaggctctgatctgtcggcatctcggcagagattggagctgggagaaacagaaggagcagccaaaagagtaccagagaatcctacagtgctttcttgacagaaaggactgttgctacagcattcaccaaatggcccagatgggtgtcggagagggcaagtccatcggggagtggttcggaccaaacaccgtcgcccaggtgctcaaaaaattggctctttttgacgagtggaattcccttgcagtgtatgtgtctatggacaacactgtagtgatcgaagacatcaaaaaaatgtgcagggtgctgccactgtccgctgataccgccggagacaggccaccagactcccttactgcatcaaaccaaagtaaaggcaccagcgcctattgttccgcttggaaacctctactgctgattgtgcctctcagactaggtattaaccagataaacccagtgtacgtggacgcctttaaggagtgtttcaagatgcctcagagtctcggggcattaggagggaagcctaataatgcctactattttatcgggtttcttggagatgagctgatctttttggatccccatactacccagacctttgtcgacactgaagagaatggaacagtgaatgatcagactttccactgcctccagtcaccacagcgcatgaatatcttgaatctggacccctcagtcgccctggggttcttttgcaaggaggagaaagattttgataactggtgctccttggtgcagaaagagatcttaaaggagaatttgaggatgttcgaattagttcagaagcatccaagtcattggcctccttttgtgcctcctgcaaagccagaggtcactactacaggagcagagtttatcgattcgaccgaacaacttgaggagtttgacttagaagaggatttcgaaatcctctccgtgtag

SEQ ID NO: 28886 - DNA, 1701 bp, synthetic construct
  source 1..1701: mol_type = other DNA; note = Synthetic coding sequence
atggacctccaccgtgcagcttttaagatggaaaactcttcatacctccctaaccccctggctagcccggctcttatggtactcgcaagcactgctgaagcttccagggatgcctccatcccctgccagcagcctcggcctttcggggtgccagtaagcgtagataaagacgtgcacatacccttcacaaatggctcctataccttcgcctcaatgtatcacaggcagggaggggtccctgggacatttgctaatcgggacttccctccctcactcctgcatttgcatccccagtttgctccacctaatctagactgcacacctatcagcatgctgaaccacagtggggtgggggcatttagaccttttgcttccacggaggacagggagtcatatcaaagtgcattcacacctgctaaacgcctgaaaaactgccacgacacagagtcaccccacctgaggttctccgatgccgatggtaaagaatacgacttcgggactcagctcccctcttcttccccgggatcattaaaggtcgatgataccggaaaaaaaattttcgccgtgagtggcttaatttcagacagggaagcgagttcctccccagaggacaggaatgatcggtgtaagaagaaagcggctgccctgttcgactcacaggctccgatttgtcctatatgccaggtcctcctgaggccatccgaactgcaggaacacatggagcaggaactagagcagctggctcagcttccttctagcaaaaactctctccttaaggacgccatggccccaggcacaccaaaatcacttcttttaagcgcatccattaaacgggagggtgaatcaccaacagcaagcccccactctagcgcaactgacgacctgcaccactctgataggtatcaaaccttcttgagagtgagggccaatcggcagacccggctcaacgctaggattggtaaaatgaaaagaagaaaacaggacgaaggccagagagagggctcttgcatggccgaggatgacgccgtggacatagaacatgaaaataacaatcgcttcgaggaatatgagtggtgcggccagaagcgaattagggctacaaccctgttggagggaggattcagaggcagcggattcattatgtgcagtggaaaagagaacccggattctgacgccgatctcgacgttgacggcgatgataccctggagtacggcaaaccacagtatactgaggccgatgtgataccatgtaccggagaggaaccgggagaagcaaaggagagggaagcccttagaggggcagtgctgaatgggggaccacccagcactaggataactcccgaattttctaaatgggcttccgatgagatgccatccacaagcaatggagagtccagtaagcaggaagcaatgcagaaaacgtgcaagaattccgacatcgagaagatcacagaggacagtgccgtcacgacttttgaggctttgaaggcaagagtgagggaattggaacggcagctgtctaggggcgacaggtacaaatgcctgatttgcatggacagctactccatgccactcacaagcattcaatgttggcacgtccactgcgaggagtgttggcttaggacgcttggggctaagaagttgtgtcctcaatgtaacaccataaccgcgccaggcgatttaagaaggatttacctctag

SEQ ID NO: 28887 - DNA, 930 bp, synthetic construct
  source 1..930: mol_type = other DNA; note = Synthetic coding sequence
atgcccagggcacgctcagggaggaggagcaggggcgctggtggacgcgaggagacctttctgcgagtcagagcaaatcggcagaccagactgaacgccagaattggtaaaatgaagcgcagaaaacaggatgagggacaggtttgcccattatgcaaccgccctctggccggatccgaacaagaaatgtctagacatgtggaacattgtcttagcaaaagggagggctcttgcatggcagaggacgatgcagtggatatagaacatgaaaacaataacagattcgaagaatacgagtggtgcggacagaagagaattcgggctacaacgctgctagagggtggcttccgagggagcggttttatcatgtgctcgggcaaggaaaaccccgatagtgacgcagatctggacgtggatggcgacgacaccctggagtacgggaagcctcagtacaccgaagcagatgtgatcccttgcaccggtgaagagcctggtgaagcaaaagagcgggaggccttgcggggtgccgtactcaacgggggacccccatcaacgagaattactccagaattcagcaagtgggcctcagacgcagaaatgccgtcaacttctaatggcgaaagctctaagcaggaagccatgcaaaaaacgtgtaagaacagtgacattgagaagattacggaggattccgcggtgactacatttgaagctctgaaggccagagtgcgggaactcgagagacagctgagtcggggagatagatataagtgcctcatttgtatggactcttattccatgccgttgactagcatacagtgttggcatgtgcattgcgaggagtgttggctgcgtaccctaggggctaaaaagttgtgtcctcagtgtaataccatcaccgctcctggtgacttgcgaaggatatacctgtag

SEQ ID NO: 28888 - DNA, 1125 bp, synthetic construct
  source 1..1125: mol_type = other DNA; note = Synthetic coding sequence
atggagtccgttttgagcaagtacgaggaccagatcaccattttcacggactacctggaagaataccctgacaccgacgagctggtctggatccttgggaagcagcacttgctgaagacgggcggtacgggcccaagtagcgacgccggttggggctgcatgttgcgatgcggccagatgatgttggcacaggcgcttatctgcagacacctgggtagggactggtcttgggaaaaacagaaggagcagccaaaagagtatcaaagaatcctgcaatgttttttggataggaaagactgctgctactctatccatcagatggcacagatgggcgtgggggaaggaaagtcaataggcgagtggtttggaccgaatactgtggcgcaagtgctgaaaaagttggccctgtttgacgaatggaatagtttggctgtgtatgtatccatggacaacaccgtcgtcatcgaagatatcaagaagatgtgtcgcgtgctccccctcagcgcggacacggccggtgatcgtccgcctgattcgctgaccgcctccaaccagagtaaaggcacatcagcctactgtagtgcatggaaaccactgttattgatcgtgccccttagacttgggatcaatcagattaatccggtgtatgtagatgcctttaaggagtgtttcaaaatgccccagtctcttggtgccctgggtggtaagcctaacaacgcatattacttcattgggttcctgggtgatgagttaattttccttgacccacatacaactcagacctttgtcgatactgaggagaacggcaccgtcaacgatcagactttccactgtttacagtcgcctcagcggatgaatatcctgaacctggacccttctgtggccctgggcttcttctgtaaggaagagaaagacttcgacaattggtgtagcctcgtccagaaagagatcctgaaggagaatcttcgaatgttcgagctggtccagaaacatccgtctcactggcctcccttcgtgccgcctgcgaagcccgaagtgactaccaccggggctgagttcatagactctactgaacaactggaggagttcgacctcgaagaggatttcgagatcctctcagtttag

SEQ ID NO: 28889 - DNA, 558 bp, synthetic construct
  source 1..558: mol_type = other DNA; note = Synthetic coding sequence
atggagggctgtgtgtccaacctgatggtctgtaacttggcatactctggaaaactggaagagctgaaagaatccatcctcgccgataaatcgctagcaactcgcaccgatcaggacagtaggacggcccttcactgggcttgttccgccggacacaccgagatcgtagaatttctccttcagctcggtgtgcctgtaaacgacaaagacgatgcagcttctaagaatagacacgagatcgcggtgatgcttctggagggtggagccaatcccgacgctaaagatcattatgaggcaacagctatgcatagggcagctgccaagggaaatctcaagatgatacacatcctgctgtactacaaagcctcaacgaacatacaggataccgaaggtaacactcccctacacctggcttgcgacgaggaaagagttgaggaggctaaattgcttgtctcacaaggagccagtatatatatagagaataaggaggagaaaacgcctctgcaggtcgccaaaggtggattgggccttatcctgaaacgaatggttgagggctag

SEQ ID NO: 28890 - DNA, 333 bp, synthetic construct
  source 1..333: mol_type = other DNA; note = Synthetic coding sequence
atggaaggatgcgtctctaatttaatggtgtgcaacctcgcctattcaggaaagctggaggagcttaaagagtccatactcgctgacaagagcttggctacacggactgatcaggactccaggactgccctgcattgggcttgcagtgcgggtcacaccgaaatagtggaattcctgctgcagctgggcgtccccgtcaatgataaagatgacgccgcatctaaaaaccgacatgaaatcgccgtcatgctcttggagggcggagcaaatcccgatgccaaggaccattatgaagccacagccatgcatagggctgctgcgaaggatacctag

SEQ ID NO: 28891 - DNA, 546 bp, synthetic construct
  source 1..546: mol_type = other DNA; note = Synthetic coding sequence
atggtgctgggagctggttggggttgggcctatcagttgcacctcttacaagcactcaagcgtaaacccgatctctttctttgtgaaagattggatgttaaggctgtattccaatgtgccgtcctggcccttaagttccccgaggccccaacagtgaaagcctcctgtggattcttcactgaattactgcccagatgtggtgaggtcgagtctgtcggaaaagtcgtgcaggaggacgggaggatgcttctgattgccgtccttgaagccattggcggacaggcttccagatctctcatggactgctttgcggacatcctgttcgcattgaataaacactgctttagcctgctgtccatgtggataaaagaggcattgcagccgcctgggttcccgtccgctagactctcgcccgagcagaaggatacattctcccaacagattctaagagagagagtgaacaaacgtagagtaaaagaaatggtgaaggaatttacccttctgtgccggggtctccacggaactgactatacggcagattactag

SEQ ID NO: 28892 - DNA, 2892 bp, synthetic construct
  source 1..2892: mol_type = other DNA; note = Synthetic coding sequence
atggaacgccgagaggagcagcccggtgctgctggcgcaggcgctgctcctgctctggacttcaccgttgagaacgtggaaaaagccctgcaccagctctattatgacccaaatatcgagaacaaaaatctggcgcaaaaatggctgatgcaggcccaagtgtctcctcaggcctggcactttagctggcagctgctccagcccgataaggtgccggagattcagtatttcggagcctcggctctccatattaagatctcacgctattggtctgatatcccgactgaccagtacgagtccctgaaagcgcagctgttcacacagataacccgtttcgccagcggcagtaagatcgtgttgactaggctgtgcgtggcattggcatcgctggccctcagcatgatgccggacgcgtggccttgtgcggtagccgatatggtcagattgtttcaagccgaggactcgcccgtcgatggccaaggacgctgtttggcactcctggagctcctgacagtcctccccgaagagttccagacatctcgcctgcctcagtataggaaaggtcttgtgcgaacctccctggcagtggagtgtggtgctgtgttccccctgctcgagcagttactgcaacagccttcatccccgagttgcgtcagacagaaagtgctgaagtgtttctcgtcctgggtgcagctggaagtgcctctgcaagattgcgaggccctcatccaggccgctttcgcggcactccaggactccgagctgtttgacagctccgttgaggcgatagtcaacgctatttctcagcctgatgcccagcgctacgttaataccctgctcaagctgatccctctggtcctcggccttcaggagcagctacgccaggccgtccaaaacggagacatggagaccagtcacgggatctgtcggattgccgttgccctcggagagaatcattctagggctctgttggatcaagtggagcactggcagtcttttttggcactagttaatatgatcatgttttgtactgggattcctggtcactaccctgttaatgagacaacatcctccttgacacttactttctggtacactttacaggatgatatcctgagctttgaggcggaaaagcaagctgtttaccagcaggtctatagacctgtgtacttccagctggtggacgtgctgctccataaggcccagtttccctccgacgaagagtatggattctggagctctgacgagaaagaacagttcagaatttacagagtggacatcagcgacactctcatgtatgtgtacgagatgttaggcgctgagctcctgtctaatttgtacgacaaattgggaagactgcttacgtctagcgaagagccgtattcttggcagcacaccgaggctcttttgtacgggtttcagtctattgcagagacaattgacgtcaactactcagacgtagtgcccggactgatcggtctgatacccaggattagcatttccaacgttcagctcgctgatacagttatgtttactatcggtgctttgtccgaatggctcgctgatcatccagtaatgattaattccgtgctgcccctggtgctccacgctttaggtaacccagagctgtctgttagcagcgtgtccacactaaagaagatatgtcgggagtgcaaatacgacctcccaccgtacgcggctaacattgtggctgtctcccaggacgtcttaatgaaacaaatacataaaacatcgcaatgtatgtggctcatgcaggcactcggttttctcttaagtgctctgcaggtggaagagattcttaagaatttgcattcactcataagtccttacatacagcagctggagaagctggctgaggagatcccaaatccttcaaataaattagccatcgtccacatcttggggctgttgagcaacctctttactacactcgatatcagtcaccacgaggacgaccacgagggccctgagctgcggaagctgcccgtcccccaggggccaaaccccgtggtggtggtgctgcagcaggtgtttcagctcattcaaaaggtcctttccaagtggctgaatgatgcccaagtcgtggaagcggtatgtgccatctttgagaagagcgtcaagacactactggacgattttgctcccatggtaccacagttgtgcgaaatgctgggcaggatgtatagcaccatccctcaggcctccgcgttggatcttacacgccagctcgtgcatatcttcgctcacgaacccgcacatttcccacctattgaggcgctgtttctgcttgttacttccgttacccttaccttgttccagcaaggtccaagggatcaccccgacattgttgatagttttatgcagcttctggctcaggccctgaaacggaaacccgacctctttctgtgtgaaaggctggacgttaaggccgtctttcagtgcgcggtcctcgccctgaaatttcctgaagcaccaaccgtcaaggccagctgcggctttttcacggagttgcttccgcgatgtggtgaagtggagtcagtgggcaaggtggtgcaggaagacggcaggatgttgttgatcgccgtgctcgaggcaattggtggccaagcttcaagatcactgatggattgttttgctgacattctgttcgctcttaataaacactgtttcagccttcttagcatgtggatcaaggaggcgctccagccccctggtttccccagcgccagactgagcccggagcagaaggacactttttcccagcaaatactgcgggagcgtgtgaataagcgcagggttaaagagatggtaaaagagttcactttgctctgtcgcggtctgcatggcactgattacaccgcggactattag

SEQ ID NO: 28893 - DNA, 2907 bp, synthetic construct
  source 1..2907: mol_type = other DNA; note = Synthetic coding sequence
atgcggctcctgcgccataccgagtctgaacaatggttccaccgtttccccctttgccccagcctcactttttgggccccagtggccatgtggccccagacgcactgcgtgggcggtaggagcagcgggttaacaaagtggacttactccttcagtgccagtctgcaggacggtagcttcccatatgattctgtgccttggcagcaaaacacaaatcagccgccaggctcactgagtgtagtgacaacagtctggggggttactaataccagccagtctcaggctgatgttctcattccacacgctacatgcaggcccggacctctcctgataacagcatgggagccttacggacagtgtcaacaacctcacgaatcccgtcgccaaccccacggtgtgggccacgatcaccagcagcctcggcctcagctgccgaccgtgtgcggcgctgccgcagctgttttgtcccagggttggcctcgctccgccctgcaccctgccgagcacgtctggccagcccagttaccaagacaaagaggattatggggacagcctgccgctgccgcagctgccgcagctgtcgccgcagccgcagctacagctacagccacggccacagccacagtggccgctttacaagagacccaaaataaggacattaaccagtacggaccagcccctgtgcttttgcctgatctgttaaaagatgggctcggcgatgaggagcgcggagcccctatcggaatgcaaaactccatgaacccagcctccatggcagctggcatgacaccctcaggaatgtccggcccaccaatggggatgaaccagcccaggcctcctggcattagtccatttgggacccatggacagagaatgccacagcaaacctaccccggtcccagacctcagtctctccccatacagaatattaagaggccctacccaggcgagcctaactacggcaaccaacagtacggcccaaactcgcagttcccaacccaaccaggtcagtatcccgctcctaatcctcctcgtccacttacctcaccaaactaccctggacagcggatgccgagccaacccagctccggtcagtatccaccaccaactgtcaatatgggacaatactataagcctgaacagttcaatgggcagaacaacacatttagcgggtccagctatagtaactattcacagggaaatgtaaaccgaccaccacgacccgttccggtcgccaactatcctcactcccctgttcccggtaaccccactcccccaatgacacctggctcatctattcccccttacttatcccccagtcaagatgttaaaccgccttttccgcctgacataaaacccaacatgagcgccctgccccctcctcccgatcataatgatgagctgcggttgacgtttccggtacgagacggagttgtcctggaacctttcagattagaacataatctcgctgtgtccaaccatgtgttccaccttaggcctacggtacaccagacactgatgtggagcgatcttgaactgcaatttaaatgttaccaccatgaggaccgccaaatgaacaccaactggcctgcctccgtgcaggtctcagtgaacgccacaccattgacaattgaaaggggggataacaaaacaagtcacaagccactccatctgaaacacgtctgccaacctggcagaaataccattcaaattacagtgaccgcatgttgctgttcacatctgttcgtgttgcaactcgtccatcgaccttcggtgagaagcgtgttacaaggactactgaagaagcgcctgttacccgcagagcattgtatcaccaagaagaggaatttctctagcgtggccgctagctctggcaacaccacgctgaatggcgaggatggagtggaacagacagccattaaagtatcactgaaatgccccataacttttaggcgcatacaacttcctgcccgtggacatgattgtaagcacgttcagtgcttcgacctggagtcatacttgcagctaaactgtgagcgaggaacctggcggtgtcctgtttgtaaaactgctctgctagagggtcttgaagtcgaccagtatatgtggggcattctcaacgccattcattccgagtttgaagaggtaacaattgatcccacctgtagttggaggccagtacccattaagagcgatttgcatattaaagatgatcctgacggaatcccatcaaagcgcttcaaaacaatgtcaccttcacaaatgataatgcccaatgtgatggaaatgattgccgcactagggcctggcccttccccatacccactacctccaccacctggcggaaccaatagcaatgattatagttctcagaataattatcaggggcatggcaatttcgactttcctcacgggaacccagggggaacttccatgaatgacttcatgcacggtccccctcaactgtctcaccctccagatatgccaaacaacatggcggctctcgaaaagcccctttcccacccgatgcaggagacaatgccacatgcaggctcgtccgaccagcctcatccaagtatacagcaaggactgcacgtaccccacccatcctcccagtcgggcccacccctacatcattcaggggcaccgcctccccctcccagccagcccccaagacaacctccacaggccgctccctctagccatccccatagcgatttaacctttaatccatcaagtgccctggaggggcaagctggcgctcagggagcttccgacatgccagagccgagcctcgatctgctccccgaacttacgaacccagatgagctgctcagttacctggacccacccgacctcccttctaactccaatgatgatctgctgagcttattcgagaacaactag

SEQ ID NO: 28894 - DNA, 603 bp, synthetic construct
  source 1..603: mol_type = other DNA; note = Synthetic coding sequence
atggcaatggagatgcgcctacctgttgctagaaaacccctgagtgagagactcggtcgtgatacaaaaaagcacctggtcgtgcccggagatacaattacaactgacacaggctttatgcgaggacatggaacttacatgggtgaagaaaagctcatcgcgagcgtggccggtagcgtcgaacgggtgaacaaactcatctgcgtaaaagcgctgaagacaaggtatatcggcgaggtgggcgacatcgtggtcggcagaattactgaggtgcagcaaaagagatggaaggtcgagaccaatagtaggctcgatagtgtgctccttctatccagcatgaacctgccaggtggggaactgcgcaggcgttctgccgaggacgaactcgcgatgcgcggattcctgcaggaaggagatttgatcagcgcagaggtccaagctgtcttctctgatggggctgtgagtctgcatacacgaagcctcaagtatggtaaaactcacttccacgacctcccgtgcggagcgtcagtaatcctgggcaacaacgggtttatctggatttatccgacccctgagcacaaagaggaggaagcaggaggttag

SEQ ID NO: 28895 - DNA, 792 bp, synthetic construct
  source 1..792: mol_type = other DNA; note = Synthetic coding sequence
atggccatggagatgagactgccagtcgcacgcaagccactttcagagagactgggacgcgacaccaaaaaacatctggtcgtgcccggagacacaattacaaccgataccggttttatgagagggcacggcacctacatgggagaggagaagctgatagctagcgttgccggaagcgtcgagagagtcaataaactgatctgcgttaaagccctaaaaacacgctacattggcgaggtgggcgatatcgtggtcgggagaatcacagagcgacgtcgttctgctgaggacgagctcgccatgcgaggcttcctccaggaaggtgacctaatctcagccgaagttcaagccgtctttagcgacggcgcagttagtctgcacactagatccctgaagtatgggaagcttgggcaaggagtattggtacaagtgagcccgtctctggttaaacgtcagaaaacacacttccacgaccttccatgtggggctagcgtgattcttggtaataatggcttcatttggatctatcccacaccagagcataaggaggaagaggccggaggtttcatcgctaatctggagcccgtaagcctggccgaccgtgaggtgatcagtagattgcgcaattgcatcatttctcttgttacgcagcgcatgatgctctacgatacgtctatcctttattgttacgaggcatctttaccccatcaaatcaaggatatcctaaaacctgagattatggaggagatagtcatggaaacacgccagcggctgctggagcaggaaggctag

SEQ ID NO: 28896 - DNA, 858 bp, synthetic construct
  source 1..858: mol_type = other DNA; note = Synthetic coding sequence
atggccatggaaatgcgcctccctgtggctagaaagcctctgtccgagagactcggacgcgatacaaaaaaacatctcgtcgtccctggtgatacgattaccacagacaccggctttatgaggggtcacggaacctatatgggggaagaaaagttaattgcatcagtggcaggcagtgtcgagagagtcaataaactgatttgcgtcaaagctctgaaaacacgttacatcggcgaagtcggtgacatcgtagtcgggaggataacagaggtccagcagaaacgatggaaggtggagaccaatagccggcttgattccgtgctgctcctgtcctcaatgaatctccctggcggagagctgcgacgacggtctgccgaggacgaattagccatgcggggatttctccaagagggtgatctgatctccgctgaggtgcaagcagtgttcagcgacggagccgtgtccctgcacaccagaagtctcaaatacggcaaggtgtctccatctttagtgaagaggcagaaaacacattttcatgacctaccatgcggcgcatctgtaatcctagggaataacgggttcatatggatttaccctacgcctgaacacaaggaagaagaagctggtggctttattgccaatctggagcccgtttccctggctgatagagaggtaatcagtagactgcgtaattgcatcatttccttggttactcagcgcatgatgctgtacgacacctcaatcctctactgttatgaggctagtctgccacaccaaatcaaagatattctcaagcctgagatcatggaggaaattgtcatggagacgcggcagaggctgctggagcaggaaggatag

SEQ ID NO: 28897 - DNA, 882 bp, synthetic construct
  source 1..882: mol_type = other DNA; note = Synthetic coding sequence
atggcaatggaaatgaggcttccagtggctcgaaaacctctgagtgaacgtcttggcagggataccaagaaacatctggtggttcccggagataccatcaccactgatacaggtttcatgcgaggtcacgggacttacatgggcgaagagaagctcatcgcaagcgtggcagggtctgttgaacgcgtaaataaacttatctgtgtcaaggctttgaaaacaaggtacatcggagaggtaggcgacatagtcgtaggcaggattactgaggtgcaacaaaaacgttggaaggtcgaaacaaacagtagactggattctgtgctgctcctcagctccatgaatctgccgggaggagagctgcgccgaaggagcgctgaggacgagctggccatgcggggtttcctccaggagggcgaccttatatctgcagaagtgcaggccgtgttttctgatggggcagtcagtctccacactcgatcccttaaatacggcaaactgggccagggagttcttgtacaggtttctccttcactcgtcaaaagacagaagactcacttccacgacctgccttgcggcgctagtgtgatcctgggaaacaacgggttcatatggatctacccgactcccgaacacaaggaggaggaggcaggcggattcatagcaaatctcgagccagtgtctttagcagatagagaggtcatatctcgcctgcggaattgcataatttccctagtcacacagaggatgatgctgtatgacacctccattctgtattgctacgaagcaagtctgccacatcagattaaagatatattaaaacctgagatcatggaggagatcgtcatggaaactaggcagagattgctagagcaagagggctag

SEQ ID NO: 28898 - DNA, 3195 bp, synthetic construct
  source 1..3195: mol_type = other DNA; note = Synthetic coding sequence
atggccagcgagtccgaaacactgaacccttctgcacggattatgacattttaccctaccatggaggaatttcgcaacttctccagatacattgcctatatcgagtcacaaggcgctcatcgcgcaggtctcgcgaaggtcgttccgccaaaggagtggaagcctcgcgcatcgtatgatgacattgatgatctcgtgatccctgctccaatccagcaactggttacagggcagagtgggctttttacgcaatataatattcagaaaaaggccatgactgttagagaattcaggaaaattgccaattccgataaatattgtacgccgaggtactctgaatttgaagagttagagaggaagtattggaaaaatctgacgtttaatccaccgatatatggcgcagatgttaacgggaccctctatgaaaaacacgtcgacgaatggaacatcgggaggctcagaactatcctggacctcgtggagaaggagtctggcatcactatcgagggcgtgaatacaccttatttgtattttggcatgtggaaaacatccttcgcgtggcatactgaggatatggatctttactcaatcaattacttgcacttcggggagcccaaaagttggtattcagtgcctcctgagcacggaaagagattagaacgactcgccaaaggattttttccaggcagcgctcaaagctgtgaggcttttcttcgacacaagatgaccctgatttctcctcttatgctgaaaaaatatggcatcccattcgataaagtgacccaagaggcaggagaattcatgatcacctttccgtatgggtatcacgcgggatttaaccacggattcaactgcgcagaaagcaccaattttgctacaagaaggtggatcgagtatggtaaacaggcggtgctgtgtagctgccgcaaagatatggtgaagatttccatggatgtgtttgtgaggaagtttcagcctgaaaggtacaagctgtggaaggccggtaaagacaacaccgtgatagatcacaccctacccacaccggaagccgctgagttcctgaaggagagcgaacttccaccgagagcaggaaatgaagaggagtgtccagaggaggatatggaaggcgttgaggatggcgaagagggggatttaaagacaagcctagcgaagcaccggatcggcacaaaaagacaccgggtctgcctggaaattccccaggaggtgtcgcagtctgaattgtttcccaaagaggatctgagcagtgaacagtatgagatgaccgagtgccccgcagcccttgccccagtgaggccaactcatagctcggtgaggcaagtagaggacgggctcaccttccctgactattccgattcaacagaagtgaagtttgaggaactcaaaaacgtcaagttggaggaagaagacgaggaggaagagcaggccgctgctgcactcgatcttagcgttaatcctgcatctgtgggaggccgattggtcttcagcggctcgaaaaagaagagttcttcgtctttaggcagcggatctagccgagactccatcagctccgactccgagaccagcgagcccctaagttgtcgggcacagggccagacgggcgtgcttacggttcattcctatgcaaaaggcgatggacgagtgacggttggagaaccttgcacgcgtaaaaaaggatctgcagctcgcagtttttctgaacgcgaattagctgaagtggctgacgagtacatgttctcacttgaagagaacaaaaaatccaaaggaagacggcagcctctatccaaactgccgaggcaccatccccttgtactgcaggagtgtgttagcgatgatgagaccagcgaacagcttacaccagaggaggaagctgaagagacagaggcgtgggcaaaaccactcagccagctgtggcagaaccgtccccctaactttgaagcagagaaggaatttaacgaaaccatggcccagcaagctccgcattgcgccgtgtgcatgatattccagacgtatcatcaggtggaattcgggggattcaatcaaaactgcgggaatgcttccgatctggcaccccagaagcagaggaccaaacctctgatcccagaaatgtgctttacatctacgggctgtagcacagacatcaacctctctactccctatctcgaagaagatggcacctcgattttagtctcatgcaagaaatgtagcgtccgggtgcatgcctcttgttatggggtccctccagcaaaagcctctgaggattggatgtgcagcagatgttccgccaatgccttggaggaggactgctgcctttgctcccttaggggcggagctctgcaaagagccaacgacgacaggtgggttcacgtctcctgcgctgtcgccattctcgaagcgaggtttgtaaacattgcagagagaagcccagttgacgtgagcaagatccctctccctaggtttaaactaaagtgtatattttgtaagaaacggaggaaacgtacagcaggatgttgtgttcagtgctctcacggacgttgtcccactgctttccatgtgtcctgcgcccaggcagcaggcgtaatgatgcagcccgacgattggccttttgtcgtttttataacatgctttcggcacaagatccccaaccttgagcgcgcaaaaggcgcactacagagcatcaccgctggacagaaggtgatttccaaacataagaacggtaggttttaccagtgcgaggtggttcggctcacaacagaaaccttttatgaggtgaattttgacgacggcagttttagcgataatctgtacccagaggatatcgtttcacaggactgcctccaatttggtccacccgcagaaggagaagtggtgcaggtgcgctggacagatggacaggtgtatggagctaaattcgtggctagccaccctatccagatgtaccaggttgagtttgaggacggcagtcaattagtcgttaagagggacgacgtatatactttagacgaggagctccccaagagggtgaagtcccgtctgagtgtggcttcggatatgcggttcaatgaaatctttactgagaaagaagtcaagcaggaaaagaagcgccagagagtgataaacagtcgatatcgggaggattacattgagcccgctctgtaccgtgcaataatggagtag

SEQ ID NO: 28899 - DNA, 2745 bp, synthetic construct
  source 1..2745: mol_type = other DNA; note = Synthetic coding sequence
atgggggactcccgagatttgtgtccacatctggactctatcggggaggttaccaaagaagatctccttctgaagagtaagggaacttgccagagctgcggggtcactgggccaaacctttgggcatgcctacaggttgcatgcccctacgtgggttgtggagaaagttttgctgatcacagtacaatacatgcccaggctaaaaagcataatcttactgttaatctgacgacttttcggttgtggtgttacgcctgtgagaaagaggtgttcctggaacagcgactggccgcacctcttttggggagttcctctaagttctccgaacaggacagtccacccccttcccatcccctgaaggcagtgccaattgctgtcgctgatgaaggcgaaagtgaatccgaagacgatgacttgaagccccgaggtctaacgggcatgaaaaacttaggcaactcctgttatatgaatgctgctctgcaagctttgtctaactgccctccccttactcagtttttcttagaatgtggcggactggtcaggactgacaaaaagcccgctctttgtaagagttatcagaagttggtatcggaggtatggcataagaagcgcccttcatacgttgttcccaccagcctgtcccacggaataaagcttgttaatcccatgtttcgcggttatgcccaacaagatacacaggaatttctccgttgtctgatggaccaactgcacgaagagctgaaggaacccgtggtggcaaccgtcgctctaaccgaagctagggattcggactcttctgatacagatgaaaagcgcgaaggggaccgaagcccttcagaagatgaattcttgagctgtgacagctctagcgatcggggagagggcgatggccaaggcagagggggaggctcaagccaggccgagaccgagctactgatccctgacgaagccggtcgggcaataagcgagaaagagcgaatgaaggaccgtaagttctcgtggggccagcagcgaacgaattctgagcaggtcgatgaagatgctgacgttgacaccgccatggctgcactggatgatcaaccagctgaagctcaacctccctctcctcgaagctctagcccctgtcgcacacccgagccagacaatgacgcacatctccggagctcctcccgcccttgctccccagtgcatcatcacgagggtcacgctaaacttagcagctcaccgcctagagcatctccggtccggatggcccctagctatgtgcttaagaaggctcaggttctatctgccggttcacgcagacgcaaggagcaacgatataggtctgtgattagcgatatatttgatggctcaatcctcagtctggtgcagtgcttgacttgcgaccgggtaagcactaccgtcgaaactttccaagatctctccttacctatacctggcaaggaggatcttgccaaactccatagcgctatctaccagaacgtgccagccaagccaggagcttgcggcgattcctacgcggctcagggttggcttgctttcattgtcgagtacatcaggcgctttgtcgtatcatgtaccccatcctggttctgggggccagtggttacgctagaggactgtctggccgctttcttcgccgcagacgagttgaaaggagataatatgtacagctgcgaaaggtgcaaaaagctgcggaatggcgtgaagtactgcaaagtgctcaggctccctgaaatcctgtgcatccatctcaaaagattcaggcatgaagtaatgtactcattcaagatcaactcccacgtctcattcccattggagggcctggacctgcggccatttctggccaaggagtgcaccagccagattactacttatgatctcctgagcgtaatctgtcaccatgggactgccggtagtggacactatatcgcctattgtcagaatgtgatcaacggacagtggtacgaattcgatgatcaatatgtgaccgaagtccatgagactgtggtgcaaaacgctgagggctacgtattgttctacaggaaatctagcgaagaggccatgcgggagagacagcaggttgtgtccctggccgctatgcgggagccctcactgctgcgtttctacgtgtctcgggaatggttgaacaaattcaacacctttgctgaacctggccctatcacgaatcaaaccttcctctgcagccacggagggatccccccacataagtaccactacatcgatgatctggtcgttatactgccacaaaacgtttgggagcacctgtataatagatttggtggcggacccgctgttaaccacctctatgtctgttcaatttgccaggtggaaatcgaagctttggccaagcggcgtcggattgagatcgacaccttcattaagctgaataaagcattccaggccgaggaaagtccaggtgtgatctattgcatctcaatgcaatggttccgggaatgggaggcatttgttaaaggaaaagacaacgagccccctggccctatcgataactctagaatagcacaagttaagggttcggggcacgtacagcttaagcagggggcagattatggacagattagcgaggaaacttggacctatcttaactctctgtatggcggaggacccgagatagctattcgccaatctgtggcccagcctttgggtcctgagaacctgcacggcgaacaaaagattgaggcagagaccagagccgtctag

SEQ ID NO: 28900 - DNA, 1215 bp, synthetic construct
  source 1..1215: mol_type = other DNA; note = Synthetic coding sequence
atggattttaacatgaaaaaactcgccagcgatgcgggaatcttctttacccgagccgtgcagtttacagaagagaagtttggtcaagccgagaagactgaattagatgcccacttcgagaatctgcttgccagagccgacagtaccaaaaattggactgagaagatcctcagacaaactgaggtgttgcttcagccgaacccatcagccagggtcgaagaattcctttacgagaaactggaccgcaaggtgcctagcagagtgacaaatggagagctccttgcccagtacatggcggacgccgctagcgaactggggccaaccacgccttatggtaagactttaattaaagtggcagaggctgaaaagcaactgggtgccgctgaaagagacttcattcacaccgcctctatttcatttcttacccctctgcgcaactttcttgagggcgattggaagactataagtaaggagagaagactgctccaaaacagaagacttgatctcgacgcttgtaaagctagactgaagaaggcaaaagcagccgaagccaaggccacctgtgaaggcgacacagttcccgacttccaggaaacccgcccaaggaactacattctctctgcttccgctagcgctctgtggaacgacgaagtggataaagctgaacaggagctccgggtcgcgcagacggaatttgatcggcaggctgaagttacacgcctcttgcttgagggcattagcagcacccacgtcaatcacctgagatgcttacacgagtttgtaaaaagccagacaacttattatgcccagtgttatcgacatatgctcgacctgcaaaagcagcttggctcctctcagggggctatattcccaggaacattcgtgggcacaacagagcctgcttctcctccactgtcttcaacgagccctaccaccgccgctgccactatgcctgtagtgcctagcgtggctagcctggctcctcctggcgaagcgtccctgtgtttggaggaggtagccccacccgctagcggaactcgcaaggcccgagtgctttatgactatgaagctgccgactcaagcgagttggccctgcttgctgatgagcttattactgtctatagcttaccgggaatggatcctgattggctgattggggagcgaggcaataagaagggcaaagtgcctgtgacctatctggaactactaagctag

SEQ ID NO: 28901 - DNA, 1188 bp, synthetic construct
  source 1..1188: mol_type = other DNA; note = Synthetic coding sequence
atggactttaatatgaaaaaattggcatccgacgctggcatcttcttcacccgtgccgttcagttcaccgaggagaaatttggccaggccgagaagaccgagcttgacgcccactttgagaatctgctggctagggccgattctacaaaaaactggacagagaagatactgaggcagaccgaggtcctcctgcaaccaaacccctctgcaagagtggaagagttcctgtatgagaaactggaccgcaaggttccatcccgcgttaccaatggcgagctgctggcacaatatatggccgacgccgcttcggagctcgggccaactacaccctacggaaagaccttgattaaggtggcagaagctgagaagcaactgggggctgctgagagggactttattcacaccgcgagtatatcctttctgacccccctgcgcaacttcctggagggcgattggaagaccattagtaaggagcgcaggctgctccagaatcggagactggatttggacgcgtgtaaagccaggcttaagaaagctaaggccgcagaagccaaagctacgactgtcccggacttccaggagaccaggcccaggaactatatcctctctgcatctgcaagcgctttgtggaacgatgaagttgacaaggcggagcaagaattgagggtcgcccagaccgagttcgataggcaagctgaggtcacccgactcttgcttgaggggattagcagtacacatgtgaatcacctgagatgtctccacgagttcgtgaagtcccagaccacatattatgctcagtgctaccggcacatgctggatcttcaaaaacagttgggacgtttccccggaacctttgtagggaccacagaacccgcttctccccctctctcaagcactagtcctaccaccgccgctgctacgatgccagtagtcccctcggttgcatcgttggcacctcctggggaagctagcctgtgcctggaggaggtggctccacccgcatccggcacacgtaaagctcgtgtcttatacgactatgaggccgctgattcctctgaactggctctgcttgcagacgaactcatcacggtctactcactccccggtatggatcctgattggctcatcggggagcggggtaacaagaaggggaaagtgccagtaacctacctcgagctgctcagctag

SEQ ID NO: 28902 - DNA, 1188 bp, synthetic construct
  source 1..1188: mol_type = other DNA; note = Synthetic coding sequence
atggattttaatatgaaaaaactggctagcgacgccggtatcttctttaccagagcagtccagttcaccgaggagaagtttggccaggctgagaagaccgagctcgatgcacacttcgagaacttgctggccagagccgatagtacaaagaactggactgaaaaaattcttaggcaaaccgaagttctattacaaccgaacccaagcgcacgggtggaggagtttctttatgaaaaactcgaccgtaaggtgccaagccgcgtgactaatggagagctgctggctcagtacatggctgatgcagccagtgagcttggccctaccaccccctacgggaagacgctgatcaaagtcgcagaggccgagaagcagttaggcgcagccgagagggatttcattcacactgcctccattagctttttgacaccgctgcggaattttctggagggcgattggaagacaatctcaaaagaacgccgattgctacaaaaccggcgactggacctggacgcctgtaaggctcgcttgaaaaaggccaaggcagccgaagctaaggccactaccgtgccagactttcaggaaacaaggccaagaaattacattctgtccgcttccgctagcgccttgtggaacgacgaagtggataaggctgaacaagaattgcgtgtggcacaaaccgagtttgataggcaggctgaggtcacaagattgttgctggagggcatttcatccactcatgtcaatcaccttagatgtctacatgagttcgtgaagtctcaaacaacctactatgcccagtgttatcgccacatgctggacctccagaaacagctcggcagattccccggtaccttcgttggaactacagaaccagcatcacctcctcttagctccacatctcccacaacagcggctgctacgatgcctgtggtgcctagtgtcgcttcattagcgcctccaggcgaagcgagtttgtgtctggaggaggttgctcccccagcctcagggacacgtaaggcacgggtgctgtacgattacgaagcagcggattcgtccgagctggctctcctggctgacgagcttattaccgtctattctctgcctgggatggacccagattggttgatcggtgaacgaggcaataagaagggtaaagtgcccgtgacctatctcgaactattgagctag

SEQ ID NO: 28903 - DNA, 615 bp, synthetic construct
  source 1..615: mol_type = other DNA; note = Synthetic coding sequence
atgtcttggacatgcccacgatgtcagcagcctgtcttctttgccgaaaaggtgtctagtctgggcaagaattggcaccgtttctgtctgaagtgtgaacggtgtcactctatcctctctcctggcggtcacgccgagcacaacggccgtccttactgtcataaaccctgctatggagccttgttcggcccaagaggagtcaacattggaggggtcggcagctacctgtacaatcccccaacacccagccctgggtgtactactccactctctcccagctcttttagccccccacggcctaggactggcctccctcagggcaaaaaatctccaccgcacatgaagacatttaccggagagacttcgttgtgtcctggatgtggggagccggtctattttgctgagaaggtcatgtcattaggaaggaactggcacaggccatgcctgaggtgccaacgctgccacaaaaccctcacagcgggtagccatgctgagcacgatggcgtgccctactgtcatgttccatgttatggctacctttttgggccaaaaggagtgaatataggcgacgttggctgttatatatatgacccagtcaagattaagttcaagtag

SEQ ID NO: 28904 - DNA, 1221 bp, synthetic construct
  source 1..1221: mol_type = other DNA; note = Synthetic coding sequence
atggaatcactcagaggatacacacatagcgacatcgggtacagatcactcgctgtcggagaagacatcgaggaggtgaatgatgagaagcttactgtcacatcactgatggctaggggtggagaggacgaggagaataccaggtccaagcccgaatacggaacggaggccgaaaataacgttgggacagaggggtctgtacccagcgatgaccaggacagagaaggaggaggtggccatgagccagagcaacaacaggaagagccgccactgactaaaccggagcaacagcaggaagaacctccactgttggaactaaagcaggaacaagaggagcctcctcagacgaccgtggagggaccccagccagccgagggtccccagacagcggagggacctcagccaccggagcgcaagcggaggcgtcgcaccgcgttcacccagtttcagctgcaggaattggagaatttttttgatgaaagccagtatccggacgtagtggccagggagcgtctggcggctaggctcaatctcaccgaagatagagtgcaggtgtggtttcaaaacagaagggccaagtggaagagaaatcaacgggtactcatgctgaggaacacggctaccgccgatttggctcaccccctcgacatgtttctcgggggtgcatattacgctgctcccgcattggaccccgcactttgtgtgcatctcgtgccacaactgccccgtcctcccgtcttacctgtgccccctatgccccctcgaccgcctatggtgcccatgccgcctcgaccacctatcgctccaatgccacccatggcgcctgtgcctccgggaagccgtatggcacctgtccccccaggccctaggatggctccggtgccaccttggcctcctatggctcccgtgcccccatggccccctatggccccagttcccaccggaccacctatggctcctgtgccccctggaccacccatggccagggtccccccaggtccgccaatggcaagggtccctccaggcccaccaatggcacccttgccgcctggccctcctatggctccgctgccccctggcccacccatggccccattgccacctgggcctccaatggccccactgccccctagaagccatgtcccccacaccgggctcgcaccagtacatattacttgggccccagtgataaatagttactacgcctgccctttcttttag

SEQ ID NO: 28905 - DNA, 873 bp, synthetic construct
  source 1..873: mol_type = other DNA; note = Synthetic coding sequence
atgtctccctcagcaaagaagcgcccaaaaaacagccgggtgagcaaaatgcaagatgaaaaactgagagacgagaccgagcagcccgtgtcgaaagtgatcgagagaaatcgcctgcgcacagtgctcaaaaacttaagccttctaaaactgttaaagtcaagtaaccgtcggattcaagagctgcacaagctggccaagcgatgctggcactccctcctgtccgtcccaaagattctgcggatatcctcaggagaaaattctgcctgtaataagacaaagcaaaacaatgaggagttccaggagattgggtgttctgaaaaagaacttaagagcaaaaaactggaaagtacaggggacccgaagaaaaaggagtacaaggaatggaaaagccaggttcagtctgggatgcgaaacaaggagaaaacttctctcgcggctatgccgagaaaagagaagcacatcgaaccagaagttcctaggacctcccgggatgactccttaaatccaggggtacagggtcggcagccactgactgagggcccaagggttatctttatcaagccttatcgtaaccgcacccctatgggacacatgaagcagttggatgttgccgatcagtggatatggtttgagggattaccaacacgcatacacctgccagctccacgggtgatgtgccgctcctctactctgcgttgggtgaagcgaagatgtacgaggttctgctctgcctcactggagatgcccatgtggcacccttacaaggtcgatgtcacatggacgcgggcacgaggcgcttcacggggatggcgcagccgacaccaattgaaaggaaggaatggttggcgcaactctagggtctacaagtag

SEQ ID NO: 28906 - DNA, 1644 bp, synthetic construct
  source 1..1644: mol_type = other DNA; note = Synthetic coding sequence
atggcagggactaagaacaagaccagagctcaggccaagacagagaagaaggccgctatccaggccaaagccggtgcagaacgagaggctaccggagtcgtgcgtccagtcgccaaaactcgagctaaggcaaaagccaagacaggatccaaaactgatgcagtcgctgagatgaaggcggtgtctaagaacaaagttgttgccgaaaccaaggagggtgccctcagcgagcctaaaacgctggggaaagcaatgggcgatttcacacccaaggcaggaaatgagagtacgtcatcaacctgtaaaaacgaggccggtactgacgcctggttttgggcaggagaagaggctacgatcaacagctggttttggaacggcgaagaagccggaaattccttctccaccaaaaatgataagcctgaaataggagcacaggtctgtgcggaagagctcgaacccgctgccggagcagactgtaaacctcgctcgggagccgaggaggaggaagaagaaaatgtgatcggaaactggttttgggagggcgacgacacctcattcgatcctaatcccaagccagtttctagaatcgttaagcctcagcccgtgtatgaaatcaatgaaaaaaaccgtccaaaagactggtccgaggtgaccatctggcccaacgccccagctgtcacaccggctgtgcttggcttccgcagccaggccccaagtgaggccagcccaccttcttacatcgtgctggcgtcggcggaagaaaacgcgtgcagcctccctgtggcgacagcatgcagaccaagcagaaacacccggtcatgcagccagccaattcccgagtgcagattcgattcagatccctgtatccaaaccattgatgagattagacgtcaaatcaggattcgggaagtcaatggtatcaagccatttgcctgtccctgcaaaatggaatgctatatggattctgaagaattcgagaagctggtttcgcttcttaagtccacaaccgaccctctgatccataagattgctcgaatcgccatgggagttcacaacgtgcaccctttcgcccaagagttcatcaatgaggtgggtgtcgtgacgctgattgagtctctacttagctttccgagccctgaaatgcgcaaaaagacagtaattactctgaacccaccctctggtgatgaacgccaaagaaagatcgagctccacgtgaagcatatgtgtaaggaaaccatgagtttccccctgaattccccaggacagcaaagtggactgaaaattttaggccaactcactacagacttcgtacaccactatatcgtggctaattacttcagtgaactattccatctcctctcatccggcaattgtaagacaagaaacttagtcctgaagctgttacttaatatgtccgagaaccctacggcagcaagagacatgatcaacatgaaagctttagccgctctgaaacttatctttaatcagaaagaagccaaggcaaacctggtgtccggggttgccatattcattaatatcaaagagcacatcaggaagggcagtattgtcgtagtagaccacttgtcctataacacactaatggcaattttccgagaagtcaaagagataatcgaaacgatgtag

SEQ ID NO: 28907 - DNA, 1881 bp, synthetic construct
  source 1..1881: mol_type = other DNA; note = Synthetic coding sequence
atgtgctccactttgaagaagtgcggaacctacaggacggaagtcgccgagtgccatgatcacggaagcacttttcagggacgaaagaaaggaggcagttcttttagagacaactttgacaaacgctcttgccactacgagcatggcggttatgagcgacccccatcccactgccaagaaaatgatgggtctgtcgagatgcgagatgtacataaggaccagcaattgcgtcacactccgtattcaatacggtgcgagagacgcatgaagtggcacagcgaagatgagatacgtatcaccacctggcgcaatagaaagccccctgaaaggaagatgtcacaaaatacacaggatggttatacccgaaactggttcaaggtgaccattccgtatgggatcaaatatgacaaagcgtggctaatgaattcgatccagtcgcattgtagcgacagatttaccccggttgactttcactacgtccggaaccgcgcttgtttctttgtgcaagatgcaagcgccgctagtgccctcaaagacgtcagctataagatctatgacgacgagaaccagaagatctgcattttcgtcaaccactctaccgccccatatagtgtgaaaaataagcttaagccgggacagatggagatgctgaagttgactatgaacaagcggtataacgtctcccagcaggctttggatctgcagaatctgagattcgaccccgacctgatgggcagggatattgacattatactgaatcgcagaaactgtatggccgcaactctaaagattatcgagcgtaacttccccgagctgttgtcacttaacctgtgcaacaataagctgtaccaactggacggcctatccgacatcaccgaaaaggcgcctaaagtcaagaccctgaacctttcaaagaataaattggagtccgcctgggagctcggtaaggtcaagggtcttaaactggaggagctgtggctcgaggggaaccctctctgctcaacgttctccgatcagagcgcttacgtatccgccatacgcgactgctttccaaaattacttagactagacggccgtgagctctcagctcctgtcatcgtagacatcgattccagtgagacaatgaagccctgtaaggagaatttcacaggctcagagacacttaagcaccttgttttgcagtttttgcagcaatattacagtatttatgactctggggaccggcagggactgcttggcgcataccacgacgaagcatgtttttcgttagccatcccgtttgaccccaaggacagtgcgccttctagtctgtgtaagtatttcgaagactcccgtaacatgaagacactgaaagatccctacctgaaaggggagttactccgccgaacgaagcgggacatagtggattctttatctgctctgcccaagacccaacacgacctgtcctccatcttagtcgacgtgtggtgccagactgagcgcatgctctgctttagcgtgaacggtgtctttaaggaagtagagggccagtcccagggttccgtgcttgcgtttacaaggactttcattgccacccctggttcttcctcttccctgtgtattgtaaatgatgagctgttcgtgagagacgctagcccacaggagacacagtcagctttttccatcccggtctctacactgagctctagtagtgaaccatccttgagccaggaacagcaggagatggtgcaggccttcagtgcccagtccgggatgaagctggagtggtcccagaagtgcctgcaagacaatgagtggaattacacccgcgcagggcaggcttttactatgctccagactgaaggcaaaattccagcggaggccttcaaacagatctcttag

SEQ ID NO: 28908 - DNA, 1881 bp, synthetic construct
  source 1..1881: mol_type = other DNA; note = Synthetic coding sequence
atgtgttctaccctcaagaaatgcggaacctacaggactgaagttgctgaatgtcacgatcacggaagcactttccaggggcgaaagaaggggggatcgagcttccgtgacaattttgacaagcgtagttgtcactacgaacacggaggatacgagcggcctccaagccactgccaggaaaacgatggaagtgtggagatgagggatgtacataaggatcaacaacttcgccacactccttattcgatccgttgcgaacgccgaatgaagtggcactccgaagatgaaattcggattacaacctggaggaaccgaaaaccccctgaaaggaagatgtcccagaatactcaggacgggtacacccggaattggtttaaagtgacaataccctatggcatcaagtatgacaaagcttggctgatgaattccattcagtcacactgtagcgatcgcttcacccccgtggatttccactatgtgcggaacagagcctgcttcttcgttcaagacgcatctgcagccagcgctctcaaagatgtgtcctacaagatttacgacgatgaaaaccagaaaatctgcatctttgtgaatcactccacagccccttattccgtgaagaataagctgaaaccaggacagatggagatgctgaaactgactatgaataagaggtataatgtgtcacaacaagctcttgacctgcagaatctgcgttttgaccccgacctcatgggcagggacatcgacattatcctgaacaggcggaattgcatggccgctacattaaagattattgaacgcaattttccagagctgctgtctctgaatctgtgcaacaacaagctgtaccagctggacggtctcagcgatatcaccgagaaagctcccaaggtaaaaacactgaacttgtctaagaacaagctggagtctgcctgggagcttgggaaggttaagggccttaagctggaagaactgtggttggagggcaatcccctgtgcagcactttctccgaccagtccgcatatgtaagcgccattagagactgcttcccgaaactactacgcttggatggacgcgagctaagtgctccagtgatcgtggatatagattccagcgaaaccatgaaaccttgcaaagaaaatttcaccggaagcgagactctgaaacacctggtcctccaattcctgcagcagtactatagcatctacgattctggagatcggcagggactgctcggggcataccacgacgaggcatgttttagtttagctataccctttgatccgaaagactcagccccatcctctttgtgtaaatacttcgaagacagtcgcaatatgaagactttaaaggacccatacctgaagggcgaactcctgcggagaaccaagcgtgacatcgtggatagcctgtcagctctgcctaagacacagcacgatctgagcagtatcctggtggatgtttggtgtcagaccgagcggatgctatgtttctcagtcaacggagtgttcaaggaggtggagggccaatcccagggatccgtccttgcttttacacgcacatttatcgcaacgcccggtagcagtagtagtctttgcatcgttaacgacgaattgttcgtaagggatgcttcccctcaggaaactcagagtgctttttcgatccccgtctccaccttgtcctcgtcctctgagccctccctctcccaagaacagcaggagatggttcaggctttttctgctcagagcggaatgaaacttgaatggagtcagaaatgcctccaagataatgagtggaattacacgcgggctggccaagcctttacgatgttgcagaccgagggaaagattcctgcagaagcctttaagcaaatctcatag

SEQ ID NO: 28909 - DNA, 1230 bp, synthetic construct
  source 1..1230: mol_type = other DNA; note = Synthetic coding sequence
atgaagtggcactccgaagacgaaatccgtattaccacatggcgcaataggaaaccgcctgagagaaagatgtcccaaaacactcaagacggttacactcggaactggtttaaggtcactattccatatgggattaaatacgataaagcttggctgatgaactccatacagtcacactgtagcgataggtttacccccgtggatttccactacgtaagaaatagggcatgctttttcgtgcaggacgcgagtgcagcgtctgcactgaaagatgtttcatacaagatttacgatgatgagaatcagaaaatctgcatctttgtgaaccattctacggccccatacagcgtgaaaaataaactgaagccaggtcagatggaaatgctcaaactcactatgaacaagagatacaatgtgtcccagcaggcgctggacctgcagaatctaaggttcgatccggatctgatggggagggacattgatatcattttaaatcggcgaaactgcatggccgctacattaaagatcattgagcgcaattttccggagttgttgagcctgaacctctgtaataataagctctatcagctcgatggcttgtccgacattacagagaaagcgccaaaagttaagacactcaacttatccaagaacaaactggagtctgcttgggaactgggcaaagtcaaaggcctcaagttagaggagctgtggctggaaggtaacccactctgctccacattttccgaccagagcgcctatgtcagcgcaatcagagattgctttccaaaactgctgaggctcgacggacgtgagcttagcgccccagtgatcgtggatattgactcttctgaaacgatgaaaccttgcaaagagaatttcacaggttccgaaacccttaagcacttggttttgcaatttctgcaacagtactatagcatttacgactccggtgatcgacagggcttgcttggtgcctaccacgacgaggcatgtttctcccttgcaatcccattcgatcctaaagacagcgctccctcgtctctttgtaagtactttgaggatagcaggaatatgaaaactctcaaagacccttatctcaaaggggagctcctgaggcgtacaaagagagatatcgtcgactccctgtcggctttgcctaagactcaacatgatctctcctcgatcctggttgatgtgtggtgccaaaccgttccaagtgggcagtag

SEQ ID NO: 28910 - DNA, 1326 bp, synthetic construct
  source 1..1326: mol_type = other DNA; note = Synthetic coding sequence
atggcctcggtggccgcagctcgtgcggtgcccgtcggaagtgggttgcggggtctgcaacgcaccttgccacttgtagtcattctcggcgctactgggacggggaagagcactcttgcattacagctcgggcagcgcttgggaggagagattgtgtccgctgatagcatgcaagtgtatgaaggactagacataattacaaacaaagtgagcgcccaggaacagcggatctgccggcatcacatgatttcctttgtagaccctctcgtcactaattacacagtggttgactttcgtaacagggctaccgcactcattgaagatattttcgccagagacaaaatccccatagtcgttggaggcaccaactactacattgagagtctcctgtggaaggtgctagtgaacacaaagccccaggaaatgggcacagagaaggtgatcgaccgtaaggtggagcttgagaaggaggacgggctcgtgctgcataaaagactgagtcaggtggacccggaaatggctgcaaaactgcatccgcacgataaacgcaaagtcgcccgaagcctccaggtgttcgaagagacaggtatctctcattctgagttcctccacaggcagcacacggaagagggtgggggtccactggggggtcctctgaagttttcgaacccgtgcattttatggttgcacgccgaccaggccgtgctggatgaaaggctcgacaaacgagtagatgatatgctggcagctggactcctcgaagaactgcgggacttccacagacgctataaccagaaaaacgtcagcgaaaattctcaggactaccagcacggcatcttccaaagtatcgggtttaaggagtttcacgaataccttatcactgaaggcaagtgcacactcgagacttccaatcagctgctgaaaaaggggcctggcccaatcgtccccccagtctatggactcgaggtctccgacgtttccaaatgggaggaatccgtacttgagcctgccttggagatcgtgcagtcgtttatccagggccacaaaccgaccgctaccccaataaaaatgccttacaatgaggcggaaaataagcgatcctatcacctgtgtgacttatgcgaccgtatcattattggtgacagagagtgggccgctcacatcaaaagtaaatcccatttgaaccaactgaagaaaagacggaggttggacagcgatgctgtgaacaccatcgagtcgcagtccgtatctcctgatcacaataaggaaccaaaggagaagggcagccctgggcagaacgaccaagaactcaagtgttcggtatag

SEQ ID NO: 28911 - DNA, 1158 bp, synthetic construct
  source 1..1158: mol_type = other DNA; note = Synthetic coding sequence
atggccagcgtcgcagccgcaagggccgtaccagtgggtagcggcctgcgaggactccagcgcactttacctcttgttgtgatcttgggcgcaacaggtaccggtaagagcacgctggccctgcagttgggtcagaggttgggcggagaaatcgtttctgccgacagcatgcagcctcaagaaatgggtacagaaaaggtgatcgaccgcaaggttgaattggagaaggaggatggactggtccttcataaacgactgtctcaggtagatcccgaaatggcagccaaactgcacccccacgacaagcgcaaagtggctcgatccctgcaagtgtttgaggagaccggaatttcacatagtgagtttctgcaccgtcagcataccgaggagggtggcggtcccctcggaggtcccctaaagttttcaaatccttgcattctctggctacacgctgatcaagctgacgagcggctcgacaagagagtagatgatatgttagccgcaggtctcttagaagagctccgcgattttcaccgcaggtacaaccagaaaaacgtgtccgaaaattctcaggattatcagcacggcattttccagtccatcggctttaaggagttccatgagtacctcatcactgaaggcaagtgcacccttgagacgagcaaccagctactgaaaaaagggatagaggctctgaagcaggttaccaaacgttatgctcgcaagcagaacaggtgggtgaagaatcgcttcctgtcaagacctgggcctatcgtcccaccagtgtatggtctcgaagttagcgatgtatcaaaatgggaggagtctgtgctcgagccagctcttgagattgtgcagtcctttatccagggacataagcctacagctacgcctattaaaatgccttataacgaggctgagaataaacgcagctatcacctgtgtgacctctgtgatcggatcatcatcggggacagggagtgggccgctcacataaagagtaagagtcacctaaatcaactcaagaagagacgaagactggactccgatgctgtgaacacaatagagagtcagtctgttagccctgatcacaataaagagcctaaagaaaaggggagtccagggcagaatgatcaggaattgaagtgcagcgtgtag

SEQ ID NO: 28912 - DNA, 987 bp, synthetic construct
  source 1..987: mol_type = other DNA; note = Synthetic coding sequence
atgaaaaggcccaaggagccaagtggcagtgatggcgagagcgacggccctatcgatgtgggccaggagggacaattgtcacaaatggccaggcccctaagtacacccagctcctcacaaatgcaggcgaggaagaaacacagggggattatcgaaaaaagacgacgggatcgcattaactcctcgctatcagagctgcgcaggctggtcccaacagctttcgaaaagcagggatccagcaaactggagaaggcagaggtcctacagatgacagtggaccacctcaaaatgctacatgcaaccggcggaaccggattttttgatgcaagggctttggccgtggatttcagatcgattggctttcgtgagtgtctgactgaggtaataagatacctaggggtgttagaagggccttctagcagggccgatccagtcagaatccgactgctgagtcacctgaattcttacgctgctgagatggaaccctcaccaacacccactgggcctctcgcattccctgcctggccttggagcttcttccatagttgcccaggtcttcccgcattgtctaaccaactcgcaattcttggcagggtcccatccccggtgctgccaggtgtatcctctccagcttaccctataccagctctgagaacggccccactgaggagggcaacagggatcattctccccgctaggcgcaacgtcctcccctcacggggagcatctagtactcggagagcacgtcctctcgaacggccagccacccctgtccccgtggctccgagttcgcgagcagctcgctctagccacattgcacctctactccaatcctcctcgcctaccccaccgggaccaaccggatctgccgcatacgtggcagtgccgacaccaaatagctcctcacccggtcctgccggacgccctgcaggggctatgctgtaccattcctgggttagtgaaattaccgagataggagctttttag

SEQ ID NO: 28913 - DNA, 2262 bp, synthetic construct
  source 1..2262: mol_type = other DNA; note = Synthetic coding sequence
atggagacctttgaacctatctcacaagaacccctgtcgcaggcgtcttacgataaggcaccggacccagtaccagaactgcaggattcgttctatgcagaattgcagagggccgaatctctccaggagaaatctatcaaggaggccaagaccaagtgtagaaccatcgccagcctgctgaccgccgctcccaaccctcattccaaaggagtcttgatgttcaaaaagcggaggcagcgagccaagaaatatacactcgtgagcttcggcgcagctgccggaactggcgctgaagaagaggacggcgtgccaccaactagcgagtcggagttagacgaggaggccttctccgatgcacgctccttaaccaaccagtccgattgggacagcccatacctcgatatggagctagcacgcgcaggcagccgggctagcgaaggccagggcagcgggttgggcggacagttatcagaagtatccgggcgaggcgtgcagctgtttgagcaacagaggcaacgggctgactcgtcgacacaagaactcgcccgtgtcgaacccgctgcaatgctgaacggcgagggactgcaatcccctcccagggcccaaagcgccccacccgaggcggctgtgctgcctccctcgcccctccccgctcccgttgcctctcctcgtccattccaacccggagggggtgcacccacccccgcaccctctatctttaaccggtcagcgcgaccttttacacctggcctgcagggccagagacccaccaccacatccgtgattttccggcctctggcaccaaagcgggcaaacgattctctgggaggtctgtcccccgctcctcctcctttcttgagctctcaggggcctactcctctgcccagcttcacatctggcgtcccctcccacgccccagtatcgggaagcccgtctactccacgatcatctgggcctgttaccgcgacttcaagcctgtacatccccgcaccaagccgccctgtaacaccaggaggggctccggagccaccagctccaccttccgcagccgcaatgacttcaaccgcgagtatatttcttagcgcccctctcaggccttcagctcggcctgaggcccctgctcctggtccgggtgcccctgagccacctagcgcccgagaacaacggatatccgtgcccgcagccagaaccggcattttacaggaggctcgccgaagaggcacacgcaagcagatgttccgcccaggcaaggaggagacaaagaattccccaaacccagagctgcttagtctggtccagaatctcgacgagaagcctagggctgggggagccgagagtggtccagaggaagatgccttgtccttaggcgctgaggcttgcaactttatgcagcccgtgggggctaggtcctacaaaactctgccacacgtgaccccaaagacaccgcctcctatggccccaaaaacgccgcctccaatgacccccaagactcctcccccagtagcacctaaaccaccctctcgcggactgctggacggactggtgaatggagccgcatcgagtgctggtatccctgagccccctcgcctgcagggcagaggaggagaactgttcgcgaagaggcaatctcgggcagataggtacgtggtggagggcacaccgggtcctgggttgggccctagaccacgatctcccagccccacacctagcttgccacccagctggaagtacagtcccaacatccgggctccccctcccatcgcttataacccattgctgtcgccattctttccacaggccgctcgtacactgcccaaggcacaatcccagggccctagggctacgccaaaacaggggattaaggctctggacttcatgaggcaccagccgtatcaactcaagaccgcaatgttctgtttcgacgaggtgcctccaacaccgggaccaatagccagtgggtctcctaagactgccagggtgcaggagatccgaaggtttagcacccccgcaccccaacccactgctgagcctcttgcaccaacggtgctggctcctcgggctgctacgactctggacgagccaatctggcgtactgaactggcgagcgccccagtaccctcgcctgcaccacccccagaggcaccccgagggctcggcgcatctccctcatcttgcggtttccaggtggctaggcctagattttctgccaccagaactggattgcaagctcatgtgtggcggcctggcgcaggtcaccagtag

SEQ ID NO: 28914 - DNA, 1041 bp, synthetic construct
  source 1..1041: mol_type = other DNA; note = Synthetic coding sequence
atggagtccgtgagctgcagcgcagctgcagttcgcaccggcgacatggagtcccaacgggacctgtcattagtgcccgaacggctccaaagacgcgaacaggagcgtcaactcgaggttgaacggagaaagcagaaaaggcagaatcaggaggtggaaaaagagaatagtcactttttcgtagcaacattcgtcagagagcgtgctgcagtggaagaactccttgagcgcgcagagtctgtggagagattggaagaggccgctagtcgcctgcaaggactgcaaaaactcattaatgattcggttttctttcttgccgcttatgacctgcgccagggccaggaggccctagcccgattacaggccgcactggccgagagaaggaggggcttacaaccgaagaagagattcgcctttaagactcgcggtaaggacgccgcatcatccactaaggttgatgcggctcctggaattcccccagccgtggagtctatccaggattcacccctgcctaaaaaagctgaaggagatctcggtccgtcatgggtctgtggtttcagcaacctcgagtcacaagtcctggaaaaaagagcttccgagctgcatcagagggatgtactcttaacagaattaagcaattgtaccgtccggctgtatgggaatccaaatacgcttcggcttacaaaggcccactcatgcaagctgctgtgcgggccagtctctaccagtgtcttccttgaggattgcagcgattgcgtgttggccgtggcctgccaacagctgagaatccatagtactaaggacacccgcatattcctccaggtgacttcaagagcaatagtggaagattgctctggaattcaattcgccccttatacgtggtcatatccggagattgacaaggatttcgaatcatccggactcgataggagtaaaaataattggaatgacgtcgacgatttcaattggttggccagagacatggcttctcccaactggtctatcctgccggaggaggaacggaatatccaatgggattag

SEQ ID NO: 28915 - DNA, 1569 bp, synthetic construct
  source 1..1569: mol_type = other DNA; note = Synthetic coding sequence
atgtcaccgcagaaacgcgtcaagaatgtccaagcccaaaacagaacttcacagggctctagttcgtttcagaccaccctctctgcatggaaggtcaagcaagatccctcaaacagcaaaaacatttctaaacacggtcagaacaacccggtcggtgactatgagcacgccgatgaccaagcagaggaagatgcattgcaaatggcggtcggatatttcgaaaaagggcctattaaagcatcccaaaacaaggacaagaccctggagaagcacttgaagaccgtcgagaatgtcgcctggaagaatggactggcatctgaagagattgacattctgctaaacattgctctttcaggaaaattcggaaatgcagtaaacacccgaatcttaaagtgtatgattcccgctactgtgattagcgaagacagcgtggtgaaagcagtgagctggctgtgcgttggcaagtgtagcggtagcactaaggtgctcttttaccgatggcttgtggcaatgtttgattttatcgataggaaggagcaaataaatttgctgtatgggttcttcttcgcatccctgcaggacgacgcgctttgtccctacgtgtgccatcttttatatctgttgacaaagaaagagaacgttaaaccgttcagggtgaggaagctgctggacctccaggcaaaaatggggatgcagccgcacctacaggctctactttcactctacaagttcttcgccccagccctgatatctgtctccctccccgtcagaaagaaaatctatttcaagaatagcgaaaacctatggaagaccgctctgcttgccgtgaagcagcgcaatcgcggtccaagtcctgagccactcaaactgatgttagggcctgccaacgtgcgcccactgaaacgcaagtggaattcactaagcgtgatccctgtcctgaattcatccagctatacaaaagagtgtggaaaaaaggagatgtcactttcagactgtttgaataggtccgggagtttcccactggagcaattgcagtccttcccccagctcctgcaaaatatccactgtcttgagctcccgtcacagatgggtagcgtgctgaacaactctctgctccttcactacatcaactgcgttagggacgaacctgttctactaagattctactactggctttcacaaaccctacaagaggagtgcatttggtacaaggtgaataattatgagcacggaaaggaatttaccaacttcctcgatactatcatccgagcggagtgctttctgcaggaggggttctactcttgtgaagcattcctctacaagtctctgcccctctgggatggcttatgttgcagaagccaattcttacaactggtgagctggataccattcagcagcttctcggaagtgaaacctttactctttgaccacctggcgcagctgttcttcacatctaccatttatttcaagtgtagcgtgctccagagcctgaaggaactcttgcaaaattggcttttgtggctgagcatggacattcatatgaagccagtcacgaattcccctctgtag

SEQ ID NO: 28916 - DNA, 2271 bp, synthetic construct
  source 1..2271: mol_type = other DNA; note = Synthetic coding sequence
atgtctccccagaagcgcgtgaaaaacgttcaagcacagaatagaacctcgcagggcagctctagctttcagaccacactgagcgcttggaaagtgaaacaggatccctccaactcgaaaaatatctccaagcatggccagaacaatccagtgggagattatgaacacgcagatgaccaagccgaggaggatgcactgcagatggcagtcgggtacttcgaaaaagggcctatcaaggcttcccagaataaggataaaaccctggaaaagcatttaaaaactgttgagaatgtggcctggaagaatggtttggcatccgaagagattgatattttgcttaacatagccctgtctggcaagttcggaaatgctgttaacacgcgtattttaaaatgtatgatcccagcgaccgtgatcagtgaagatagcgtggtgaaagctgtatcctggctttgcgtgggcaagtgttccgggtcaactaaggtcctgttctatcggtggctggtggctatgtttgatttcatcgatcgtaaggaacagatcaaccttctttacggttttttctttgcaagtctgcaggacgatgcactgtgcccctatgtgtgtcacctgctgtacctactgaccaagaaagaaaacgtgaagccctttcgtgtacgaaaacttctagacttgcaggctaagatgggtatgcaaccccatctccaagccctactgagcctttacaagtttttcgctcccgcactgattagtgtttctctccctgtgagaaagaagatctattttaagaacagtgagaacctgtggaagacagctttgcttgccgtcaaacagaggaaccggggaccaagtccagaacctctgaagctgatgcttgggccagccaacgtgcgccctctgaaacgaaaatggaatagcctgtccgtgattccagtgctcaactccagttcctatactaaggagtgcgggaaaaaagagatgtctttatccgactgtctgaaccgctccggcagttttccgctggaacagctacagtcttttcctcagctcctgcagaatatccactgtttagagttgcccagccagatggggtctgtcttaaacaatagccttctgctacattacatcaattgtgttcgggacgagcccgtgctgctcaggttctattactggctgtctcaaacactccaggaggaatgtatctggtacaaagtgaacaattacgagcatggaaaggagttcacaaacttcttggatacaattatcagagcagagtgcttcctgcaggaggggttctactcctgcgaggcttttctgtacaaatcactgccactgtgggatgggctatgctgccgtagtcagttcctgcagcttgtcagctggattccatttagcagcttttccgaggtcaagccacttttgttcgatcatttggctcagctgttctttacgagcactatctacttcaaatgctcagtccttcagtctctgaaggaactattgcagaattggctgttgtggctgagcatggacattcacatgaaaccagtgacgaactccccactggaaactaccctcggaggctctatgaattcagtgagtaaactgattcactacgtaggctggctcagtacaacagctatgaggctagaatcaaacaacacattcctgctgcacttcatactggatttctatgagaaggtttgcgacatttacatcaactacaatctaccactcgtggtgctattccctccaggaatattttacagtgccctgctcagtttggacacatcgattcttaatcaactttgcttcatcatgcaccggtacaggaaaaatctgaccgccgctaagaaaaatgaactagttcagaagacaaagagcgagttcaatttctcctcaaagacataccaggagttcaaccattacctgacctctatggttgggtgcttgtggacaagcaagccgtttgggaagggtatttacattgaccctgaaattttggagaagaccggggttgcagagtacaagaactctctgaatgttgtgcaccatccaagctttctgtcgtacgcagtgtctttccttctccaggaatcacctgaggagcggacggtgaatgtaagctccatacgcggtaagaagtggtcctggtatctcgactatttattcagtcagggactgcagggtctgaaactgttcattcgttcttctgtacaccattcctccatcccccgagccgaggggatcaattgtaacaaccagtattag

SEQ ID NO: 28917 - DNA, 933 bp, synthetic construct
  source 1..933: mol_type = other DNA; note = Synthetic coding sequence
atggctgatgcagcggctactgcaggagccggtggctcagggacacgatctgggagcaaacaatcaaccaacccagcagacaattatcacctggcaaggagaagaaccctgcaggtggtggtctctagtcttctcacagaagccggattcgaaagcgctgaaaaggccagcgtcgagacactgacagaaatgctacagagctacatctctgagattggcaggagtgcaaaaagctactgcgaacacacagcccgtacccagcccactttaagcgacatagtcgtgacattggtagagatgggattcaatgtagataccctccctgcatacgcaaagcgatcgcagaggatggttattactgcgcctccagtaactaaccagcccgtcactcccaaggcactgactgcgggtcagaaccgacctcaccctccccatattccttcacacttccccgagtttcctgatccccatacatatatcaagacacctacttacagagagcccgtctcagattatcaagtgctgagagaaaaagctgccagccagcggagagatgttgagcgagcacttacccgcttcatggctaagaccggcgaaactcagtcactatttaaagatgatgtgtcaacattcccacttatcgctgctcgtccatttacaatcccttacctcacagcactgctgccatcagagctagagatgcagcagatggaggagactgattcctccgagcaggatgagcagactgatacagagaacctcgcgctgcatatttccatggaggattccggggctgaaaaggagaatactagcgtgcttcagcagaatcccagcctaagcggctctagaaatggtgaggagaacatcattgacaacccctacctaagaccagttaagaagccaaaaatccggaggaagaagagcctcagttag

SEQ ID NO: 28918 - DNA, 1935 bp, synthetic construct
  source 1..1935: mol_type = other DNA; note = Synthetic coding sequence
atggaagagaccatgaaattggcaacaatggaagatactgtcgagtactgcttgtttctgataccagacgagtcccgtgatagtgacaagcacaaggagatcttgcagaagtacatcgagcgcattattacccgctttgccccaatgctggtgccatatatctggcaaaatcagccctttaacctgaagtataaacctggcaagggtggggttcctgcccatatgtttggtgtgactaagttcggcgacaacatagaagatgaatggttcatagtgtatgtaatcaaacagatcaccaaagagtttcctgagctcgtcgctcgaatcgaagacaacgacggcgaattcctccttattgaagccgcagattttctcccaaagtggttggacccagagaattctacaaatagagtattcttttgccacggggagttatgcatcatccccgctcctagaaagagtggcgctgagagctggctgcccactaccccgccaaccatccctcaagctctgaatattattacggcacactccgagaagatcctggcttccgagtcaatcagggcagccgtgaacaggagaattagagggtatccagagaaaatacaggcatccctacacagggctcattgctttctgccagcaggtatagttgctgtgcttaagcagcgccctcgattggtggcagcagccgtgcaggccttctacctcagggacccaatagacttgagagcctgtcgggtgtttaagaccttccttcccgagacccgcatcatgacctctgtgaccttcacaaagtgcctgtatgctcaactggtccaacagaggtttgtgccagatcggaggtctggataccggcttcctcccccatccgatccccagtaccgtgcccatgagctcggaatgaagttagcccacggctttgagatcctgtgttcaaaatgctcgccacacttctctgattgtaaaaagtccctggttaccgcatcacctctgtgggccagttttcttgagagcctaaagaaaaatgattattttaagggactcatcgaaggatctgctcagtatagggaaaggctggaaatggcagagaattatttccagctctccgtggactggcccgagtcatctctggcgatgagtccaggagaagaaatcctcacattgctgcagaccatcccgtttgatattgaggatctgaaaaaggaagctgccaacctcccacccgaggacgacgatcagtggctcgatctcagtcccgaccagctcgatcagcttctgcaagaggccgttggtaaaaaggaatccgagtccgtcagtaaggaggaaaaggagcagaactacgatctgacggaagtgtccgagtctatgaaagccttcatctcgaaagtttccacacacaaaggggctgagctgccacgcgagccgtctgaagcacccattaccttcgacgcggactcttttcttaattacttcgacaaaattctcggcccaagaccaaacgagtccgacagcgacgatttagacgacgaggactttgagtgcctagattccgatgatgaccttgatttcgagacacacgagcctggggaggaggcttcgctcaaaggcacactggataatctgaaatcatacatggctcagatggatcaggagcttgcacatacatgtattagcaaatcattcacgactagaaaccaggtggaacccgtctcacagaccactgacaacaatagcgatgaagaggacagtggcaccggcgagtccgtaatggccccagtggacgtcgatctgaatctggtctccaatattctggaaagttattctagccaggccggactggccggtccagcgagtaacctcctgcagagcatgggcgtgcagctgcccgataataccgaccaccggcctacaagtaagcccacaaagaactag

SEQ ID NO: 28919 - DNA, 2163 bp, synthetic construct
  source 1..2163: mol_type = other DNA; note = Synthetic coding sequence
atgagcgtctcaggcaagaaggagtttgacgtaaagcagattcttcggttgaggtggcgatggttttcgcacccattccaaggatcaaccaatacggggagctgtttacaacaggagggctatgagcatcgtggcaccccagtccaaggaaggctgaagtcccattcccgcgatcggaatggtttaaagaaatccaacagtccagtacaccacaatatactagcccctgttcccggacctgctccggctcaccagcgagcagtgcaaaatcttcagcagcacaaccttatcgtgcactttcaggccaatgaggacactccaaagtccgtccctgagaaaaacctctttaaagaagcctgcgaaaagagggcccaggatttggagatgatggcagacgataatattgaagactcaaccgcccgattggacacacagcacagcgaggatatgaacgctacccggtccgaagagcagtttcacgttatcaatcacgcagagcagactttgcgcaaaatggagaactaccttaaggagaaacagctgtgcgatgttctgctgattgcgggtcatctccggattccagcccatcgattggttttgtctgccgtcagcgactactttgctgcaatgttcacgaacgacgtgctagaggcaaagcaagaggaagtcagaatggaaggagtcgatccaaacgcgttgaattcactggttcagtacgcatacacaggcgtcctgcagctcaaggaggatacaatcgaatcgctactcgccgctgcctgtctgctgcagcttacccaagtgatcgatgtttgctcaaatttccttataaagcagctgcatccatccaattgtctaggcatccggagttttggggatgctcagggctgtacagaactgctaaatgttgcccacaaatatactatggaacacttcatcgaagtgataaaaaatcaagaatttctattgctgcccgctaacgaaatctccaaactactttgttccgatgacataaacgtacccgatgaagaaacgatctttcacgctctgatgcaatgggtgggccatgatgtgcagaatcgacagggggaactgggtatgcttttgagctacatcagactgccactgttgccaccgcagctgttggctgaccttgaaaccagttccatgttcacaggcgatctagagtgccaaaagcttctcatggaagcaatgaagtatcacctgctgccggaaagaaggtctatgatgcagagcccaaggaccaaacctcgaaaatccacagtcggtgctctgtacgccgtaggcggaatggacgccatgaaagggaccacgaccatcgagaagtacgacctccgcaccaattcctggctgcacattggtaccatgaacggacgccgtctgcaattcggcgtcgccgttattgacaacaagctttacgtcgttggtggcagggatggacttaaaacactcaacaccgtggagtgctttaaccccgtgggaaaaatttggacagtcatgccaccgatgagtacccatagacacggcttaggtgtagccaccctggagggcccaatgtatgccgtcggtggtcatgacggctggagttatctgaacacagtggaacgatgggatcctgagggccgacagtggaactacgtcgcttcaatgtctactcctcgttctacagttggcgtggtggcgctaaacaataaactgtatgcgatcggagggagagatggcagcagctgtctgaaatctatggagtacttcgacccccacactaataagtggagtctgtgtgcaccgatgtccaaacgcagaggtggcgtgggcgtggccacttataacggctttttatatgttgttggcggtcatgatgctcctgcctcaaaccactgttcacggttgtcagattgcgtggaaagatacgacccgaagggagattcttggagcaccgttgccccactctctgtgccacgcgacgccgtcgcagtgtgccctctgggcgataagttatacgtagtaggtggatacgatggccacacttacctgaacaccgtggaatcgtacgatgcccagcgaaatgaatggaaagaaagtatgcaggagctccttcaaaatttctacaccacacagaagttaaaggagaccttaggccattag

SEQ ID NO: 28920 - DNA, 2157 bp, synthetic construct
  source 1..2157: mol_type = other DNA; note = Synthetic coding sequence
atgtctgtcagtgggaaaaaggaatttgacgtgaaacaaatactgaggctcagatggaggtggttcagccatccatttcagggcagcaccaacacaggaagttgtctgcagcaggagggatacgagcaccgagggacacccgtgcagggcagactcaaatcacattcgagagatcgcaatggactaaagaaaagcaactcgcccgtacaccataacatacttgcaccagtccccggacccgctcctgctcatcaaagggccgttcagaacttgcagcaacataacctgatagtgcattttcaagccaatgaagacactcctaaaagcgtacctgagaagaacctgtttaaggaagcttgtgagaagcgggctcaagatctggagatgatggccgatgataatattgaagactccaccgcacggctagatacacagcactctgaggacatgaatgctactcggtctgaagagcaattccatgtcattaaccacgcagaacagacactgcgaaagatggaaaactaccttaaagagaagcagctctgtgacgttctcttaatcgcaggacatctccgcatacccgctcataggctggtgctttctgcggtcagtgattactttgctgccatgttcacgaacgatgtactggaagccaaacaagaagaggttcgaatggagggagtagacccaaacgctctcaatagcctggtccagtacgcatacacgggggttctgcagctgaaagaagacactattgaatctctcctcgcagccgcttgtctgctccaactcacccaggttattgatgtgtgtagcaacttcctgattaagcagctgcatccgagcaactgcctaggcatcagaagtttcggagacgcgcaagggtgtactgaattgctgaacgtggcccacaagtatactatggaacatttcatcgaagttatcaagaatcaggagtttctgctcctgccagcaaatgagatatctaaactgctgtgttctgacgacatcaatgttccagacgaagagacaatatttcatgccctaatgcaatgggtcggacatgatgtgcagaatcgtcaaggcgaattgggaatgttactctcctacatccggctaccactgctgcccccacagctgctggcggatctcgaaacaagctccatgttcacaggcgatctggagtgtcaaaaactgttgatggaggcaatgaagtatcacttactgccagaacgtcgcagcatgatgcagtccccaaggacaaaaccaaggaaatccacagtgggagcactgtacgctgtgggtggcatggacgccatgaaggggaccaccactattgagaagtatgatttacgtaccaactcctggcttcatatcggtaccatgaacggccgacggctccagtttggtgtggcagtcattgacaacaaactctatgtggtcggtggtagggatggcctgaaaaccctgaacacagtcgagtgttttaaccccgtgggtaagatttggaccgtgatgccaccaatgtcaactcaccgtcatggcttaggggtagccacattggaagggcctatgtatgcggtaggtggccacgatggttggagttacctgaatacagtggaacgttgggacccagagggacgccaatggaactatgtagccagcatgtcaactcccagatcaactgtgggcgtagttgctctcaacaacaaattgtatgccatagggggacgtgacggttcatcatgtctcaagtccatggagtattttgatccacacacaaacaaatggagcctgtgcgctccaatgtctaaacgtaggggtggggttggagttgctacttataacggattcctgtacgtcgtgggagggcacgacgcccctgctagtaaccactgcagtcgattgtccgactgcgtggaaaggtacgaccccaaaggtgacagttggagcacagttgctcccctgagcgtgccacgagacgccgttgcggtctgtcctttgggggataagctctacgtggtgggtggctatgatggacatacataccttaacacagtggagtcatacgacgcccagcgcaatgaatggaaagaggaagtgcccgtgaacataggtagagctggagcctgcgtcgttgtagtgaagctaccctag

SEQ ID NO: 28921 - DNA, 1134 bp, synthetic construct
  source 1..1134: mol_type = other DNA; note = Synthetic coding sequence
atgaacggaccagtctcacccaagtccaaagccaggccatcttctcccagcaccagctggcataggcctgcctcaccctgtccttcacccggacccggtcacactttgcccccaaagccacctagccccagagggaccaccgcctccccaaaaggtcgggttaggcgcaaggaggaggctaaagaatccccgagtgccgctggtccagaagacaaatctcagagcaagagacgagccagcaacgaaaaggaaagcgccgcacctgcgtctcctgctccttctcctgcaccttcacccacacccgctccccctcagaaagaacagcctcccgcagagactccaacagcccctgcgccacctgtcacaccaagtaaacccatggcgggtactacagaccgagaggaggctactcggctgcttgccgaaaagaggaggcaggcaagagagcaacgcgagagggaagaacaagagcggagactgcaggccgagcgtgataagcgcatgcgcgaagagcagctggcaagagaggctgaggctcgcgcagagagagaagccgaagcacggcgtagagaggagcaggaagctagggaaaaagcacaggctgagcaagaagagcaggagcgcttgcagaagcagaaagaagaagcagaggcccgttcccgagaggaggcagagaggcagcgcctcgagcgcgaaaagcatttccagcagcaagaacaggagaggcaggagagacgaaaaagactcgaggagatcatgaagcggaccaggaaatccgaagtgtccgagaccaagaaacaggattctaaagaagcaaacgcaaacggctcttcccctgaaccagtgaaggctgtggaggccagatctcccggactgcaaaaggaagctgtgcagaaggaggagcccatcccccaagagccccagtggagtctaccgtccaaagagctcccagcttctcttgttaacggccttcagcccctaccagctcaccaggaaaacggcttctcaacaaatggtcccagcggagacaagagcctgagccggacccctgaaacacttctccccttcgccgaagccgaggcatttctgaaaaaagccgtcgtccagagcccccaggtgaccgaagtgctttag

SEQ ID NO: 28922 - DNA, 2427 bp, synthetic construct
  source 1..2427: mol_type = other DNA; note = Synthetic coding sequence
atggagtccgggcctagggcggagctcggcgcaggagccccacccgctgtggttgctagaacacctcctgagccaagaccctctcctgagggcgatccttcgccgccaccgccacctatgagcgccctcgtacctgatacacctccagacacaccccctgccatgaagaacgccactagcagtaagcagcttccactggaacctgagagccccagtgggcaggttggaccgagacctgcaccaccccaggaagaaagccccagctctgaggcgaaaagccgaggacctacccccccagccatgggtcccagggacgcgaggccccctagacggtcttctcagccatctcctaccgctgtccctgcaagtgattccccacctacaaaacaggaggtgaaaaaggccggtgaacgccacaaactggcgaaagaaaggcgcgaagagagagcaaagtacctggctgctaagaaagctgtgtggcttgaaaaggaggaaaaagccaaggccttaagagagaaacagctgcaggagagacgccgtcgactagaggagcagcgccttaaagcagagcaacggagagcggcactggaggagagacagcgacagaaactggagaaaaataaggaaagatatgaagccgctattcagcgatccgtcaagaaaacatgggctgaaatccgacagcaaaggtggagctgggccggagcactacatcattcctccccaggccataaaacatcaggtagcagatgtagtgtgagtgccgtaaacctcccaaagcatgttgatagtatcattaacaaacgtttgtcaaaaagcagcgccactttatggaattcaccttcccggaatcgctccctacaactgagtgcttgggaaagctccattgtcgacagattgatgacacctacactttctttcctcgcacggtcccggagcgccgttactttacccagaaacgggagagatcaagccgtacccgtgtgtcctcgcagtgcatccgccagtcctctgacaccatgtagcgtgacacgaagtgttcaccgttgcgcacccgctggggaacggggagagaggaggaagcccaatgctggaggcagtcctgcccctgtgagacggcgtcccgaagcaagccccgtccagaagaaagagaagaaagataaagagagagagaacgagaaggaaaaaagtgctttagcacgggagagatcgctaaaaaaacggcagtcgctgcctgcgagccctcgcgctcgtctttcagcttcaacggcctcagagctctctcctaagtctaaggccaggccttcctcccctagcacaagctggcatcgcccagccagtccttgcccgtcaccaggacccggacacaccttgcccccaaagccgccaagtcctcgcggaacgacagcttctccgaagggtcgcgtgcggaggaaagaggaagcgaaggaaagtccaagtgccgctggtcccgaggataaatcccagtctaagcgcagggcctcaaacgaaaaggaatctgctgctccggcaagccctgccccttcccctgcaccgtcaccaacacccgctcctccgcagaaggagcagcctcctgctgaaacccccacagatgccgctgtactgacctctcctcccgctcctgcaccacccgtgaccccctcaaaacctatggcgggaacaaccgatcgggaagaggctacaaggttgcttgccgagaagcgacgacaggctagagagcaacgcgaacgggaagagcaggagcgccgtttacaggctgagagggacaaaagaatgcgggaggaacagctggcccgtgaggcagaggcgagagccgaaagggaagcggaggccaggcgaagggaggagcaggaggcccgagagaaggcccaggcagaacaggaagagcaagagcgccttcaaaaacaaaaggaagaggctgaagcccgatctcgcgaggaggccgagcggcaaaggctcgagcgggaaaaacactttcagcaacaggaacaggagagacaggagagacgcaaaagactagaggaaatcatgaaaagaacccgaaagtctgaagtcagcgagaccaagaagcaagatagcaaggaggcgaacgcgaatgggagctcaccagaacccgttaaagcagtcgaggcccgatcacctggcttgcagaaggaggcagtgcagaaggaggaacctattccccaggagccccagtggtccctcccctccaaagaactgccggctagcctggtcaatggccttcagcctttgccagctcaccaagagaacggattttctacaaatggtccatcaggggataaaagtctcagcagaacaccagagaccctgctcccctttgcagaagcagaagctttcctgaaaaaggccgtggtgcaaagcccacaagtcactgaggtcctgtag

SEQ ID NO: 28923 - DNA, 2526 bp, synthetic construct
  source 1..2526: mol_type = other DNA; note = Synthetic coding sequence
atggaatcgggccctcgtgctgagcttggagctggcgctcccccagccgttgtggccagaacacctccagaacctcgccctagcccagaaggggatccttctcccccacctccccctatgtcggccctggttcccgatactccacccgatacacctccagcaatgaaaaacgccacgagttcaaagcagttgccgctggagccagagtcacccagcggtcaggtagggccaaggccggcacccccacaggaggagtccccaagttccgaggcaaaatcacgtggccctacaccaccagcaatgggccctcgtgacgccaggccacctcgcagatcctcccagccatcaccaaccgccgtgccagcctctgactcccctccaacaaaacaggaggtcaagaaagccggagagcggcacaagcttgctaaggagagaagagaggagcgtgccaaatatctggctgctaaaaaagctgtgtggcttgaaaaagaagagaaggccaaagccctgagagaaaagcagctccaggagagacgcaggagactggaggaacagcggcttaaagccgaacagcggcgagccgcacttgaggaaagacagagacagaaactggagaaaaacaaggagaggtacgaggccgctattcaaaggtcagtcaagaagacatgggcagagattcgccaacagcgttggagctgggccggagcgcttcaccattccagtcctggtcacaaaactagcggatcaaggtgtagcgtgtcggccgtgaacctccctaagcatgtggacagtatcatcaataaaaggctgtcgaagagcagcgctacactgtggaattcaccatcccgcaataggtccctacagctgtcagcatgggaatctagcattgtcgatagactgatgacacccacgctttcctttcttgcacgcagtaggagcgccgtaacgcttccacgcaacggtagagatcaaggacggggatgcgacccaggcaggggccctacctgggggagagccggagcctctcttgctagggggcctcagcccgaccgcacacatccctcagcggctgtacccgtttgcccaagaagtgcctcagcttctccgttaactccatgctcagtcacccggagcgtgcaccgctgcgccccagccggtgagagaggtgagagacgcaaacccaacgccggaggttcccccgcaccagtgaggagacggccagaggcgtcgcccgttcagaaaaaggaaaaaaaagacaaggagagggaaaacgagaaagaaaagagcgccttggcccgagagcggagtctgaaaaagcgccagagtctcccggcaagccctcgggctcgcttgtccgctagcaccgcctctgaactgtcccccaaaagcaaagccaggccaagctccccttcgactagttggcataggccagcttcaccatgcccatcacctggccctggacatactctaccaccaaagccacccagccccaggggtacaacggcctcacctaagggcagggtgaggcggaaggaagaagctaaggaaagtccttctgcagcgggacctgaggataaatctcagagcaagaggagggcctcgaatgagaaggaaagcgcagcccctgcttctccagccccaagtcctgcaccctctcctacaccagccccaccgcagaaggagcagccccctgccgagactccgacagatgccgctgtgttgacaagccctcctgcgcctgcacctccggtcaccccaagcaagccgatggccggtacgaccgatagggaagaggctacccgcctgctggccgagaagcgcaggcaggctcgggaacagagggaacgagaagagcaggagcggagactgcaggctgagcgcgataagcggatgcgtgaggagcagctggcaagagaggccgaagcgagggccgaacgtgaagcagaagcaagacgcagagaagaacaggaggcaagggaaaaagcccaagccgagcaggaggaacaggagagactgcagaaacaaaaggaggaagccgaggctcgctcccgcgaagaggccgagagacagcgattagaaagagagaaacacttccagcagcaagaacaagaacggcaggaaaggcgcaagaggctggaagagattatgaagcgcacacgaaaatcagaagtgagcgaaacgaagcagaaacaagactctaaagaggctaacgctaatggatcaagtcccgaaccagtaaaggctgtagaggccaggtctcccggactccaaaaggaagctgttcaaaaggaggagcccatccctcaggagccccagtggagtctgcccagcaaggagcttccagcttctctagttaatggtttacagcctctaccagcgcaccaggagaatggattctcgacaaacgggcctagcggtgacaaatccttgtctcggacacctgaaactctgctgccgtttgccgaggcggaggccttcctgaagaaggcagttgtacagtctccacaagtgaccgaggtgttatag

SEQ ID NO: 28924 - DNA, 495 bp, synthetic construct
  source 1..495: mol_type = other DNA; note = Synthetic coding sequence
aatcttcctaagcacgtggactccatcatcaataagcgccaacggctcgaacgcgagaaacacttccagcagcaagagcaggagagacaggaacgtagaaagcggttagaagagattatgaaaagaactagaaaatccgaggtcagcgagaccaaaaaacaggactcaaaggaagcgaatgccaacggcagctccccagaaccggtgaaagccgtggaggcgcgttcacccggacttcaaaaagaagctgtgcagaaagaagagcccatcccacaggagcctcaatggtctctcccaagtaaagaactgccggcaagcctagtcaacggactgcagcccttgcctgcccaccaggaaaacggcttctcgacaaatggtccctcaggcgacaaatcactcagtaggacacccgaaactcttctgcctttcgcagaggctgaggccttcctgaagaaggcggtagttcagtcaccccaggtgaccgaggttttgtag

SEQ ID NO: 28925 - DNA, 345 bp, synthetic construct
  source 1..345: mol_type = other DNA; note = Synthetic coding sequence
atggtgatcagggtctatattgcaagcagctctgggtccaccgccataaaaaaaaagcagcaagacgttctggggttcttagaggcaaacaagattggattcgaagagaaggatatcgctgcaaatgaagagaacagaaagtggatgagagagaacgtcccagaaaattctaggcctgcgacagggtaccctctcccaccacagatttttaacgagagtcaataccgcggtgactatgatgcattcttcgaagccagagaaaataacgcggtttacgcatttctggggctgacggcgccacctgggtccaaagaagccgaggtccaggccaagcaacaggcctag

SEQ ID NO: 28926 - DNA, 537 bp, synthetic construct
  source 1..537: mol_type = other DNA; note = Synthetic coding sequence
atgagcggtttctccaccgaagagcgggcagcgccattcagtttggaataccgggtgttcctgaagaacgaaaagggacagtacatcagcccttttcacgatattccaatctacgccgacaaggacgttttccatatggttgtggaagtgccgagatggagtaacgccaaaatggagattgccacaaaggacccactaaacccaataaagcaggatgtgaaaaaggggaagcttagatatgtcgcaaacctgtttccctataaaggatatatttggaactacggcgcaatcccccagacttgggaggatcccggacataatgacaagcacaccggctgctgcggagacaacgacccgattgacgtatgtgagattggctccaaggtgtgcgctagaggggaaatcatcggagtaaaagtcctcggtatactcgctatgatcgatgagggagaaaccgattggaaggtcatcgccatcaacgtggacgatcccgatgcagctaactacaacgtctgcaacagcgtagtgattttgtag

SEQ ID NO: 28927 - DNA, 870 bp, synthetic construct
  source 1..870: mol_type = other DNA; note = Synthetic coding sequence
atgagtgggtttagtacagaagagcgggctgctcccttttcgctggagtaccgggtcttcctcaagaatgaaaaaggtcagtacattagtccttttcacgacattcccatctatgctgataaagatgtctttcatatggtggtggaagttccaagatggtcgaatgctaagatggagatagctaccaaggaccctctgaatcctatcaagcaggatgtcaaaaaggggaagcttagatacgttgctaacttattcccctacaagggttatatttggaattacggggcaataccccagacttgggaggaccctggccataacgacaagcatacggggtgttgcggcgataacgatcccattgacgtgtgtgagattggctccaaggtgtgtgccagaggtgagatcatcggcgtaaaagttctcggtatcctggctatgattgatgagggcgaaacagattggaaagtaatcgccatcaatgtggatgatccagacgcagcaaactacaatgacattaacgacgtaaaacgcctgaagcctggatatctcgaagccacagtggactggtttaggaggtataaggtcccagacggcaaacctgaaaatgaatttgcattcaatgccgagttcaaagataaagactttgcaattgatatcattaaaagcacgcatgaccactggaaagcactggtgacaaagaagaccaacggaaaggggattagttgcatgaacaccactctgtccgaatcgccttttaaatgtgatcctgatgctgctagggctattgtggatgctcttcccccaccctgcgaatctgcctgcaccgtgccgacagatgttgataagtggttccaccatcagaaaaattag

SEQ ID NO: 28928 - DNA, 2103 bp, synthetic construct
  source 1..2103: mol_type = other DNA; note = Synthetic coding sequence
atgactgagagatgctcactctggtccgcgttgtccgctgccgcttgctgtttctatcgaggctctttcgttcagttctcgaaggaaaaatatattttggactcatctcctgagaaacttcataaagagctcgaggaggaactcaagctctccagtacagacctgcgctcgcacgcatggtatcatgggcgtataccaagggaagtgagtgaaactcttgtgcagaggaacggagattttttgatccgagattctcttacatctctgggcgactacgttctaacttgccgctggcggaatcaagcccttcattttaagatcaataaagtcgtcgtcaaagcgggagagagttatacccacatccaatatttgtttgaacaagagagtttcgaccatgttccagctttggtgcgctaccacgtggggtctagaaaggccgtctctgaacaatcgggagccatcatctactgcccagtgaatcggacatttccgctgagatacctggaagccagctacggattaggtcaaggctcttccaaacctgcgtctccggtgtcccccagcggacccaaaggcagccatatgaagcggaggtcggtgactatgacggatggactcacggccgacaaggttacgaggagcgacggttgtccgacatcgacatcactacccaggcctcgtgattccatacgcagttgtgctctttcaatggatcagattccggatcttcactctccaatgtcccccatctccgagagtccctcgagtccagcgtactcaaccgtcacgagagttcacgccgcacctgccgctccctcggccaccgccctccctgcatcacctgtcgccaggcgctcgtccgagcctcaactgtgtcccggtagcgctcctaagactcatggagagagcgataaaggccctcacacatcaccatctcacacgctcggcaaggcttcaccctcaccatctctgtcaagttatagtgatccagattccgggcattattgtcagttgcagccccctgtgcgcggaagcagggagtgggccgcaaccgagacatcctcccagcaagctaggtcgtacggagagcgccttaaggagctgagcgagaatggcgcaccagagggtgactggggaaaaaccttcactgtgccaatcgtagaggtgacaagttcattcaatcccgcaacattccagtcattacttataccccgagataaccgcccactagaagtaggccttctgaggaaagtaaaggagctgctcgctgaggtcgatgctagaaccctcgccagacacgtgaccaaggtcgactgtctagttgcgagaattctgggagtgacaaaagaaatgcagacactgatgggcgttagatgggggatggagctcctaactctgcctcacggaagacagctgaggctagacttacttgaacgcttccatactatgagcatcatgctggccgtggatatcttgggctgcactgggagcgcggaggaacgcgcagccttactccataagaccatacaactggcggctgaacttcggggaaccatgggcaatatgttttcttttgcagcggtcatgggtgccttggacatggctcaaatcagccgactggaacagacatgggtgaccctgcgccagagacacacagagggagccatactgtatgagaaaaagctaaagcccttcttgaagagcctgaacgaagggaaggaggggcctcccctgtcaaatacaaccttcccacacgtactacccctgattacactgctggaatgtgactccgccccaccagaagggccagagccctggggctctacagaacatggggttgaagtggtgctggctcacctcgaggccgctcgcaccgtggcacaccatgggggactttaccatacgaatgctgaggtgaagctgcagggcttccaagccagacccgagctcttagaagtattttccacagaattccagatgcgcctcctctggggaagtcagggcgctagctcctcacaggcccgtcgatatgagaagttcgacaaggtgctgactgctctttcacacaagttggagcctgccgttagaagctcagagctttag

SEQ ID NO: 28929 - DNA, 2379 bp, synthetic construct
  source 1..2379: mol_type = other DNA; note = Synthetic coding sequence
atggcaccagcactgccatcccctcataaggctgttgcacgcccagagcttctactcgacaccgccgctcatagcggaaaacttagagctcccgatgggggtgagggagccgaatgtgcgggtcataacggcggaccgtcttggggggtggggcagggacagagccaagaacccagtcgacaggggatacctcaggctccgtggttagtttcatggcagcgtcggggatttccacccagtagcttctgcccaggacccttgcggacggagaaactgagggctgggcgatgcccactcttgctgtgcgggggagccgctggggagcccgaggctggtagcgattatgtgaagttcagtaaagagaagtacattttggacagttctcctgagaagctgcataaggaactggaagaggaactgaagttatcatcgactgacctcagatcccatgcatggtaccacggcaggatccctcgtgaggtgagtgagactctcgtacagcggaatggtgactttctcatccgcgatagcctgacttcgctcggtgactacgtcctgacgtgtagatggcggaaccaagccctacatttcaaaattaacaaagtcgtggtcaaggcaggcgagtcttacactcacatacaatacctgtttgagcaggagagctttgatcacgtgccggcactggttcggtaccacgtgggtagtcgcaaggccgtttccgagcagtcaggggctattatctactgcccagtgaataggaccttcccacttcgttatctggaagcttcttatggcttggggcaggggtcctcaaagccggcaagtccggtctcccccagcgggcctaaggggtctcacatgaagcggaggagcgtgactatgaccgacgggctcactgccgacaaagtcacacgcagtgacggatgtcccaccagtacctccctacccaggcctcgcgactccatcagaagttgtgccctgagtatggatcagataccagacttgcacagtcctatgtctcccatatcagaaagcccctcaagtcccgcttatagcacagtaacaagagttcacgctgccccagccgctccttctgccaccgctcttccggcaagcccagtggcccgacggtcgtcggaaccgcagctctgtcccggatcggcaccaaagacacatggcgaaagtgacaagggaccccatacatcaccaagccacacactcggaaaggccagcccgtcgccctcactctcttcttacagcgacccggacagtggacattactgccagcttcagccccctgtcaggggtagcagggagtgggctgccacggaaactagttcccagcaagccagatcttatggggaaagactcaaggaactgagcgagaatggcgcacccgagggcgactggggcaaaactttcacggttcccatagtggaagtgaccagttctttcaatccagccaccttccagtctttgctgatacccagagacaatcgcccactggaggtggggctgctccgtaaggttaaggagctcctggctgaggtagatgccaggactctggcaagacatgttactaaggttgactgcttagtggccaggattttgggagtcactaaagaaatgcagactttgatgggggtgcgctggggtatggagttgctgaccctgccacacggcagacaactcaggctggacctgctagagcggttccacactatgagcatcatgctggctgtcgacatattgggatgtactgggagcgcggaggaaagggccgctcttctccacaaaactatacagctggcagctgaactgagaggtactatgggaaacatgttcagtttcgccgcagttatgggggctctcgacatggcccagatctctcggctggagcaaacctgggttacattgcgtcagcgccatactgagggggcaattctatatgagaagaaactaaagccatttttgaaatctcttaatgaaggaaaggaaggcccaccattgtccaacacaacgtttcctcacgtcctaccactcattacgctgctggagtgcgactctgcacctccagaaggcccagagccatggggaagcaccgagcacggcgtggaagtagtgcttgcccacctggaagcagcgaggactgtggcccaccacggcggtctctatcacactaacgccgaagtcaaactgcaaggcttccaagcccgacctgagctcttggaggtgttcagtactgaattccagatgcggctgctatgggggtcacaaggcgcttctagtagccaggcgagaaggtatgaaaaattcgataaagtattaactgctttgagccataagctggaaccagccgtgagatcgagcgaattatag

SEQ ID NO: 28930 - DNA, 2112 bp, synthetic construct
  source 1..2112: mol_type = other DNA; note = Synthetic coding sequence
atgactgcagtcggcaggagatgcccagccctcggatcccgcggagccgctggtgagcctgaggccggatccgactacgtgaagtttagcaaggaaaaatacatcttagatagctcccctgaaaagctgcataaggaactcgaggaagaactcaagctctctagtactgacttgcgatctcacgcgtggtaccacggtcgcattccgcgagaggtgtctgaaaccttggtccagaggaacggtgacttcctgatcagggactcactcacctccttaggtgactacgtgctgacctgccgatggcgcaatcaggcccttcatttcaaaatcaataaagtcgtggtaaaggcaggagagtcctatacgcatatacaatatctattcgaacaggaatctttcgaccacgtgcctgcactcgtccggtaccatgttggcagccggaaagcagtgtctgagcagagcggagctataatttactgcccggtgaatagaaccttcccgctccgctatctggaagccagctatggcctgggacagggttctagtaagccagccagccctgtcagcccttctggacccaagggctctcacatgaaaaggcgctccgtgacaatgacagatgggttaaccgccgacaaagtcactcgttcagatggctgtcccacttctacatccctgccaaggccccgtgattccatcaggagttgcgccctgtctatggatcagatacctgacctgcactctcccatgagtcctattagcgagagcccatcatcaccggcttactctacagttacacgcgtccatgccgcacccgctgcaccatctgcgaccgccttgccggcttctcccgttgcaaggcgcagctccgaaccccagctgtgcccagggagcgcgccaaagacacatggggagtccgataaaggccctcacacttccccatcccacacactgggcaaagcctctccttcgcccagcttgtcatcctacagcgacccagattctgggcactactgtcagctgcagccgccagttagaggctcacgcgaatgggccgctacagagacaagctcacaacaggcacgctcatatggggagagactcaaggaattgtccgaaaacggtgctccagagggagattgggggaaaaccttcactgtgccaattgtcgaggtgactagtagcttcaaccccgcaacttttcagtccttactcatccctcgggacaataggccgttggaagtgggtctgctgcggaaggtaaaagagttgttagccgaggtcgatgccagaaccctggctcggcatgtcacgaaagtggattgcctggttgctaggatcctcggagtgaccaaagagatgcagacgctgatgggcgtacggtggggtatggagctcctaactcttccacatggacgccagctccgcctggacctgttggaacggtttcacactatgagcatcatgttggcagtggatattctgggctgtaccggctccgctgaggaacgggcagctctgctccacaaaactatccagctggcagcggagctcagaggcacaatgggcaacatgttcagttttgccgcagtgatgggcgctttagatatggcacagatcagccgcttagaacagacctgggtgactctgcgacagagacacactgagggcgctattctctatgagaagaagcttaagccctttctgaaaagtctcaatgagggaaaggaaggcccacctttatcgaacaccaccttccctcacgtgctgcctctgatcaccctgctggagtgcgattccgcaccccctgaggggcctgagccctggggtagtacagagcacggagtggaggtcgtcctcgcacatctggaggcggcaaggaccgtggctcatcacggaggcctgtaccatacaaacgcggaggttaagctgcaggggtttcaggccagaccagagctattggaggtgttctctacagagtttcaaatgcggctcttgtggggcagccagggagccagtagctcacaggctcgacgttacgaaaaatttgacaaggtgctgacggccctgtcacacaagcttgaaccagccgtcagaagttctgagctctag

SEQ ID NO: 28931 - DNA, 1869 bp, synthetic construct
  source 1..1869: mol_type = other DNA; note = Synthetic coding sequence
atggatcaactgcctcaaaaaaacctgctcaggctgcatcctgctggaagcgccggatgttctacaggagtcgagagctcctctatggatggcttctggatggaagtagagcagatccagcaacgcgatgaacttagggaagaggactccggcggaaacgagggacagttacccgaggagggcgaggccgagagtcagtggctgcaggacaccggtctgtccggcctcttaggaggacttggattggatggtgatcatcaggaattactgagcactctgacacagactcaggtcgcagcagtgtgtcggagacttgatatatatgcgcgttccgtgaggagacagcacaagacccctgtgcgagacgtccgcgatgtgtttggagtcttcaactcagggaaaatgagtagcgagaacggtgacagtggcatgaaaggcgctcagttgtcatccggagcatcgaagttccctccagccgcagaacctgggggacttcaagagcaggcaggtcgcgaggaggcttttaacatggattccgcctattcagagcaggccgctgtcttgctccagaggagcaggcctagccggggtggtacatctgcttggggcaagtgttccctacctaagttcaccgtgcccaagggtagactcggcgtcacacgcataggcgacctgtcattacaagatatgcgcaaagtcccttctctggctctgattgagctgactgctttgtgtgatattttaggcctagatttgaaaaggtctaaggccggaaagtggaaggccgcagagacgagactctttggggtcccgcttgacagcctgctggaagctgaccacaaagtgctgcctagtactcaggtgccattggtattacaagcattactttcttgcctggaaaagcgaggactcgatatggaggggatactgagggtgcccggatcacaagctcgtgttaaaggtctggagcagaagctcgaacgggatttctacgcagggctgttcagctgggacgaagtgcatcataatgacgcctccgacctgctgaagaggttcatccggaaactaccaactccgcttttgacggcagaatacctccccgcattcgccgtggtcccaaacatacctaacctcaagcaaaggctgcaggtgttacacttattgatccttatcctgccggaacctaacaggaacgcgctgaaagcccttctggaatttctccgaaaggtcgtcgcaagggaacaacacaacaaaatgacccttagaaacgtgagcacagtgatggcgcctaatctattcttacatcaaggacgaccgcctaaactgccaaaggggaaagagaagcaactggctgaaggagccgcagaggtggtgcagattatggtgcactaccaggatcttctgtggacagttgcctcatttctggtggcacaagttagaaagttgaacgacagtagctcaagaaggccccagctttgcgatgctgggctgaagacctggctacggcgaatgcacgccgaccgcgacaaggcaggcgatggactagaggctactcctaaggtggcgaagattcaggttgtttggcctatcaaggaccctctgaaagtaccactcactccatcaaccaaggtcgctcacgtgctgaggcagttcacagaacacctgtccccaggatccaaaggacaggaggactccgaggacatggacagcttgctgctgcaccatcgctcaatggagtctgccaacatcctcctgtacgaagtggggggaaacataaatgaacacagactagacccggatgcttatctgctggacctctatcgggcaaatcctcatggggagtgggtactcaaacagaatcccacatag

SEQ ID NO: 28932 - DNA, 846 bp, synthetic construct
  source 1..846: mol_type = other DNA; note = Synthetic coding sequence
atggctacggaattgcagtgcccggattctatgccgtgtcacaaccagcaggtgaattcggcgtccaccccgtctcccgagcagcttaggcccggagaccttattctcgaccacgcaggtggcaaccgtgcctccagggccaaggttatcctgctgaccggatacgcacattccagtctgccggcagagttggatagtggagcttgtggcggtagcagtttaaactctgagggtaatagtggaagcggggatagtagctcctacgatgcaccagccggaaactcctttttggaagattgtgagttatcgcgacagataggcgcacagctgaaactgctgcctatgaacgaccagattagagagctccagacaatcattcgtgacaaaaccgcctcccgcggagattttatgtttagcgccgacaggctgatcaggctggtagttgaggagggtttgaatcagcttccatataaggagtgtatggtgactacgcccacaggctataaatatgagggagtgaaattcgagaaagggaactgcggggtgtctattatgcgatccggagaagcaatggagcagggactgagggactgctgtagatccatcagaataggaaagatactgattcagagcgacgaggagacacaacgtgctaaagtctactacgcaaagttccctcctgatatctacagacgcaaagtactgctaatgtatcctatcctgtccacagggaacaccgttattgaggctgtcaaagtgctaatagaacatggcgtgcagccatccgtcatcattctcctgtctctattctccactccccacggggagttctcaatgcgacagtag

SEQ ID NO: 28933 - DNA, 930 bp, synthetic construct
  source 1..930: mol_type = other DNA; note = Synthetic coding sequence
atggccacagagctccaatgtcctgattcaatgccatgtcacaaccagcaggttaacagcgcttccactcctagccccgaacaattgagaccaggagacttgatactcgaccatgccggaggcaaccgcgcaagtagggccaaagttattctcctgacagggtacgctcacagcagcctgcccgcagagctggatagtggagcatgcggaggttctagcctgaactccgagggtaattccggaagtggggattcctcctcttacgatgcacctgcagggaactcttttcttgaggactgtgagttgtcccggcagatcggcgctcagttaaaactgcttcccatgaatgaccaaatccgtgaattgcagacaatcatccgggacaagaccgctagcaggggtgactttatgttttccgcggaccgattgatccgcttggtggtcgaagaggggctcaatcaactgccgtacaaggaatgtatggtgactactcctaccgggtacaagtatgaaggagtcaagttcgagaagggcaattgtggtgtgtcgatcatgcgatctggagaggccatggagcaaggcctcagagactgttgcaggagtattagaattgggaagatcctcattcagagcgacgaggaaacgcagagagcaaaagtatactacgcaaaatttcccccagacatttaccggaggaaagttctgctgatgtaccctattctcagtactgggaacacagttattgaggctgtgaaggtcctcattgaacacggagtgcagcccagtgtaatcattttactatcactcttttctacaccacatggagccaagagcattattcaggaatttcccgagattacgatcttgacaacagaagtccatccggtcgcacccacacattttggtcagaaatacttcggaaccgactag

SEQ ID NO: 28934 - DNA, 633 bp, synthetic construct
  source 1..633: mol_type = other DNA; note = Synthetic coding sequence
atggtttccggttcagaacagaagtttctgatagggctcggaaagtcccagatctatacttgggatggacgacaaagtgatcgctggatcaagttggacttaaaaaccgaactgccacgcgatacattgctctctgtggaaatagtgcacgagttaaagggagaggggaaagcccaacgtaagatctccgcaattcacatcttggacgttctggtgctgaacgggacagacgtgcgggagcaacacttcaatcaacgaattcagctggcagagaagttcgtaaaagcagtttcaaaacccagcaggcctgatatgaaccctatccgtgtcaaggaggtatacaggctcgaggagatggagaagatcttcgtcaggctggaaatgaaaattatcaaggggagtagcggcaccccaaagctgtcatataccggtcgagacgatagacactttgtacctatgggcttatatatcgtaaggaccgttaatgaaccgtggactatgggattttccaagagctttaaaaaaaaattcttctacaacaagaagactaaggacagtacattcgacctgcccgctgactctattgccccatttcacctgccaagtctggcgtgcctgagcaaaatggactag

SEQ ID NO: 28935 - DNA, 1119 bp, synthetic construct
  source 1..1119: mol_type = other DNA; note = Synthetic coding sequence
atgaagcggaggacggaccccgaatgcaccgcacctatcaagaaacaaaagaagagagtagcggaactcgccctgagtctgtccagcacctcagacgacgagccgccaagctccgtgtcccatggcgctaaggcatccacgacaagcctctcgggctcagatagtgagactgaaggaaaacagcatagttccgattctttcgacgatgccttcaaggccgacagtcttgtggaaggcaccagctctagatacagcatgtacaattcagtgagccagaaacttatggcaaaaatggggtttagagagggggagggactggggaaatattcgcaaggacgtaaagacattgtcgaggcgagttcacaaaaagggagacggggactaggactgacattgcgcggatttgatcaggagctaaacgtggactggcgggatgaaccagaaccctccgcttgcgagcaggtctcatggttccccgagtgcacaactgaaataccagatacacaggagatgtcagattggatggtggtggggaagagaaaaatgatcatagaggacgagaccgaattttgtggggaggaactgctgcactccgtcctacaatgcaagaagcccttggtgaaagatcgcgaagccgaactgctctactttgccgatgtgtgcgcagggcctggcggattcagcgaatatgttctgtggcgtaaaaaatggcatgctaagggctttggcatgacgctcaagggtcccaacgattttaagctggaagacttttactcggccagttccgagctctttgaaccctattatggcgagggcggaatcgacggagatggcgatattacccgaccggagaatatttccgcgttccgaaatttcgtcctcgacaatacagatcgtaaaggcgtccactttctcatggccgatgggggattcagcgttgaaggccaggagaacttacaagagatcctgtctaaacagctcttactttgccagtttttgatggccctatccatcgtgcgcaccgggggtcatttcatatgtaaaacgtttgatctgttcacgccattcagtgtcggcctggtttatctgttatattgttgtttcgaacgggtctgttag

SEQ ID NO: 28936 - DNA, 615 bp, synthetic construct
  source 1..615: mol_type = other DNA; note = Synthetic coding sequence
atggccggatacctctctgaatcagacttcgtaatggtggaggagggattctccacgcgggacctgttgaaagagttgactctgggtgcctcgcaggcaacaaccgacgaggttgcggcttttttcgtggccgacttgggggcaatcgtgagaaaacatttttgctttcttaagtgcctgcctcgcgtgcgacctttttacgctgtcaagtgcaattcttcaccaggagtcctgaaagtcctggcacaactgggcttgggctttagctgtgctaacaagattgcaagtgtcataaattccgctctagacctctatttcccggaggggtgtggggttgatatctttgccgagctgggcagatactacgtgacctccgctttcacggttgctgtgtccataatcgctaaaaaggaggttctgttggatcagcctggcagagaggaggagaacggctctacgtcaaaaactatcgtctatcatctggatgagggggtctatgggatcttcaatagcgtcctattcgacaatatctgcccaactcctattcttcaaaaaagcaagaatcactccccctgttacatgtcactagagtctattcacttcatcgcggtttag

SEQ ID NO: 28937 - DNA, 1443 bp, synthetic construct
  source 1..1443: mol_type = other DNA; note = Synthetic coding sequence
atggcagggtatctgagcgaatcagattttgtgatggtagaagaaggcttttcgacacgggatttgctgaaagagcttaccttaggcgcatcccaggctacaactgatgaagtggcagcctttttcgtggctgacctgggcgcaattgtccggaaacacttctgctttttgaaatgcctcccccgagtgcgccctttttatgcagtgaagtgtaacagctcgccaggggttttaaaagttctggcccaactcggtttgggcttttcctgcgccaacaaggcggagatggagcttgtgcagcacattggcatccctgcttcgaagatcatttgcgccaatccatgtaaacagatcgcacagattaagtatgctgccaagcacgggatccagttgctttcctttgacaatgagatggaactggcgaaagttgttaagtcccaccccagtgcaaagatggtgctgtgcattgcaacagatgattcacattcccttagctgtctgagcctgaaattcggcgtgagtcttaaaagttgtaggcatctccttgagaatgccaaaaagcatcacgtagaggtggtgggggtctcatttcacattggctctggctgtcctgatccacaagcatatgcccaaagcatcgccgacgccaggctggtgtttgaaatgggtactgaactcgggcacaagatgcacgtgcttgatctcggaggaggatttcccggaacggaaggcgctaaggttcgcttcgaagaaattgccagtgtgattaatagcgcgttggacctctatttccctgagggttgcggggtagacattttcgccgagctagggaggtactacgtgacatctgcattcaccgttgccgtgtccattatagctaagaaggaagttctgcttgatcaacctggcagggaggcccctctgcctcccccacacattgctacctgtgcagctagcgaaccatctccaccagccgaggaaaacggatccaccagtaaaactattgtatatcaccttgacgagggcgtctatgggatctttaacagcgtgctgtttgacaacatttgcccgacccccatcctgcagaagaagccttctaccgagcagcctctgtattcctcttcactatggggccctgcggtggacggttgtgattgtgtggcagagggcctctggttaccacagctccatgttggcgattggttagtttttgataacatgggtgcctatacagtggggatggggtcaccattttggggaacacaagcatgccacattacctacgctatgagcagggtggcttgggaggctctccgaagacagctgatggccgctgaacaggaggatgacgttgagggcgtctgcaagccgctttcttgcggttgggaaatcacggacaccctctgcgtggggcctgtcttcacgccagcttctatcatgtag

SEQ ID NO: 28938 - DNA, 1383 bp, synthetic construct
  source 1..1383: mol_type = other DNA; note = Synthetic coding sequence
atggccggatatttatcagaatcggactttgtgatggtcgaagaaggctttagcaccagagaccttctaaaggaactgacgctcggtgcaagtcaggctactacagatgaggtagccgctttcttcgtcgcagatctcggggcaatcgtccgcaaacacttttgttttctcaagtgcctgccccgagtgcgcccattctatgcagttaagtgcaattcaagcccaggcgtactcaaagttctggctcagttgggtttgggattttcttgcgcaaacaaggctgagatggaactggttcaacacatcggtatccccgcttctaaaattatatgcgctaatccctgtaaacagatcgcccagatcaagtatgctgccaagcacggcatccaactattgtcttttgataatgagatggagttggccaaggtggtaaagagccaccccagcgccaagatggtgttatgcattgccactgatgactcccattccctctcctgtctttccctgaagtttggggtgtcattgaagtcatgcagacatctgctcgaaaacgcaaagaagcaccatgtggaggttgtaggcgtttccttccacatcggcagtgggtgtcccgatccgcaggcctacgctcaatctattgctgacgccaggctggtctttgagatggggacagagctgggccataagatgcatgtgcttgatctcggtggcggatttcctggcaccgagggggctaaagtgcgcttcgaggagattgctagcgtgatcaattctgctctggacctctactttcctgaggggtgcggcgtcgacatcttcgctgaattaggaaggtactacgtgacctcagcatttacagtggctgtcagcatcattgcaaaaaaagaggtcctattggaccagcctggaagagaggaagaaaacgggagtaccagtaaaacaatcgtttatcacctggacgaaggcgtttacggaattttcaacagcgtgcttttcgacaatatctgccccacaccaatccttcaaaagaaaccctctacagagcagccactttacagctctagtttatggggccctgccgtggacgggtgcgactgtgtggccgaagggttgtggcttccccagttgcatgttggggattggcttgtgtttgataatatgggcgcttatactgtggggatgggtagcccattttgggggacgcaagcctgccacattacttatgccatgtccagagttgcatgggaggccctccgccgacagcttatggctgctgaacaagaggatgacgtagagggggtgtgcaagcccttgagctgcggctgggagatcactgacaccttgtgtgtcgggcctgtgttcacaccagcgtctataatgtag

SEQ ID NO: 28939 - DNA, 2508 bp, synthetic construct
  source 1..2508: mol_type = other DNA; note = Synthetic coding sequence
atgaagcgcagaacagaccctgagtgcaccgcccctatcaaaaaacaaaagaaacgggtcgctgagctcgcacttagcctgtcctccaccagtgatgacgagcctccaagttccgttagccatggtgcaaaggcttccactacctcactgtccggcagtgactccgaaactgagggcaagcagcacagctctgacagctttgacgatgcctttaaggccgacagtctggttgagggtactagtagtagatattcaatgtataattccgtaagccaaaagcttatggctaaaatggggttcagagaaggggagggactgggtaaatactcacaagggcgtaaggacatagttgaagccagcagccagaaagggaggaggggactcggcctcacactgaggggcttcgaccaggaattaaatgtggactggcgggacgagccggagccttctgcctgtgaacaagtgagctggttccccgaatgcaccactgaaatcccagatactcaggaaatgtcagattggatggtcgtgggtaagagaaagatgattattgaagacgagacggaattctgcggggaggaactgctgcactccgtgcttcagtgtaaaagcgtgtttgacgttctggatggcgaggagatgaggcgagccaggactcgggctaacccatacgaaatgattcggggagtcttttttttaaaccgagccgcaatgaaaatggctaatatggacttcgtgtttgataggatgttcacaaacccccgagattcttatggcaaaccgcttgtgaaagaccgcgaggccgagctcctgtattttgccgatgtgtgtgcagggccagggggttttagcgaatatgtcctgtggcggaagaaatggcacgccaaaggatttgggatgacgctgaagggaccgaacgacttcaaacttgaagatttctatagcgcttccagcgagctgtttgagccctactacggggaagggggtatagatggagatggggacatcactaggcctgaaaacattagtgctttcaggaatttcgtccttgataatacagaccgaaagggcgtacattttctgatggccgacggcggtttctccgtggagggtcaagagaacctgcaggaaattctttctaagcagctgctcttatgccaattcctgatggccctgtcgattgtaagaaccggagggcacttcatttgcaagacgtttgatctttttacccccttcagtgttggactcgtttatctgctgtactgttgcttcgagagagtgtgcctgttcaaacctattacatcaagacccgctaacagtgagcgctatgtcgtctgcaaggggttaaaagttggaatcgacgacgtgagggactatctgtttgctgtcaatataaagttgaaccaactccgaaacaccgatagtgatgtcaacctcgttgtgccacttgaagttatcaaaggagatcacgagttcacagactatatgattcgaagtaacgaaagccactgttctttgcagattaaggccctggcgaagatccatgcgtttgttcaagacacgactctcagcgagccacgccaggccgaaattcgaaaagaatgtctacgcctttggggcattccggaccaggcccgagtggccccttcatcttccgaccccaagtccaagtttttcgagttgatccagggcaccgagatcgatatcttcagctataaacccacgcttctgacctctaaaaccctagaaaagattcggcctgtgtttgattaccggtgcatggtgtccgggtctgagcaaaaatttctgatcgggctggggaaaagtcaaatctacacttgggacggacgacagagtgaccgttggattaagctggacctgaagacagagttgccgagagatactttacttagtgtggaaattgtccacgagctaaagggcgaaggcaaggcccaacgtaagatctctgccatacacatcctggatgttctggtgctgaacgggaccgatgtccgggaacagcattttaaccagcgcatacagcttgctgaaaaatttgtaaaagccgtgagcaagccttccagaccagatatgaatccaattcgagtcaaggaggtctaccggctagaagagatggaaaagatctttgtcaggctcgaaatgaagataatcaaagggtcttcaggtactcccaaactctcgtatacaggacgcgacgatagacacttcgttccgatgggattatacatagtcaggacagtcaatgagccttggacaatgggtttcagcaagagcttcaaaaagaagttcttctataacaagaaaacaaaagacagtacctttgaccttccggcagatagtatcgctccattccacatctgctattatggacgcctgttctgggagtggggggatggaattagggtccacgactcacagaagccacaggatcaagacaaactgagtaaggaggatgtgttgtcattcatacaaatgcaccgcgcttag

SEQ ID NO: 28940 - DNA, 252 bp, synthetic construct
  source 1..252: mol_type = other DNA; note = Synthetic coding sequence
tgacaggaactcctgaaggagaaaactcttgccgagcagaacttagaggacacaagacaacaactgctggccgcacgctcgtcacaagccaaggccatcaacaccctggagacgcgagtgagggaacttgaacagactcttcaagcctctgaggaacagttgcagcaaagcaaaggtatcgtcgctgcacaggagacgcagattcaagagttggtatctgcctattggtcctgttgcatccctggaccttag

SEQ ID NO: 28941 - DNA, 2304 bp, synthetic construct
  source 1..2304: mol_type = other DNA; note = Synthetic coding sequence
atgttcgccaaacttaagaaaaaaatagcagaggagacggctgtcgctcagcgtccgggtggcgcaacacggataccaagatccgtgagcaaggaatcagtagcatcaatgggcgcagactcaggagacgacttcgcatcggatggaagctcctccagagaggatcttagttctcagttactcagaaggaacgagcagattcgcaaacttgaggcaagactaagcgactatgccgaacaggtgcgaaatctgcagaagattaaggaaaaactcgagattgcccttgagaagcatcaggacagctcaatgcgtaaattccaagaacagaacgagacatttcaggccaatagagcgaagatggctgaaggactggcacttgccctggcaaggaaagatcaggaatggagtgagaaaatggatcaactggagaaggaaaaaaacattttgaccgcacagctgcaggagatgaagaatcagtccatgaatttgttccaaagacgcgatgagatggacgagcttgagggatttcagcagcaagaactcagtaagatcaaacatatgctactgaagaaagaggagtctctagggaagatggaacaggaactggaagcaagaacaagggaactgagcaggacccaggaagagctaatgaactcgaaccagatgagcagtgatttaagccaaaaattagaggaactccagcgccattacagcaccctggaagagcagcgagaccatgtcattgcgtctaaaaccggtgccgaaagcaagataacagcgctggagcagaaggagcaggagctacaggcacttattcagcaactgagcatcgatttgcagaaggtaaccgctgagacccaagaaaaggaggacgtgatcacccacctccaggagaaagtggctagcttggagaaacgcctggaacagaatttatcaggcgaggagcacctccaggagctactgaaggagaagaccctggcagagcaaaacctggaggatacgaggcagcagcttttggccgcaagatcttcccaggcgaaagccatcaacactctcgagacccgggttcgggaactggagcagactctacaagccagcgaagagcaactgcaacagtctaaaggaattgtggccgctcaggagactcagattcaggaactggccgctgctaaccaggagtccagtcacgtacaacagcaggcccttgccctggaacagcagttcctggaacgaacccaggcattagaggcacaaatcgtggccttggagaggactagggcggcagaccagacgaccgccgagcaaggaatgcggcaactagaacaggagaatgcagctctcaaggaatgtaggaatgaatatgagagatcactccagaaccaccaattcgaactcaagaagttgaaagaagaatggtcacagcgcgagatcgtgtccgtggctatggcccaggccctcgaagaagttcggaaacagcgagaagaattccaacaacaggcggctaacttgactgctatcatcgacgaaaaggagcagaaccttcgcgaaaaaacagaggtgctgctgcaaaaggagcaggagatcttacaactcgaaagggggcacaacagcgctttactgcagatccaccaactccaggcagaactggaggccctccgtacactgaaagccgaagaagcagccgtggtggcagaacaggaagatctcttgagacttcgaggaccactgcaagcagaggctctaagcgtcaacgaatcacatgttaccagccgcgctatgcaggatcccgtgttccagctaccgactgccggacggacccccaatggcgaggtaggggctatggacctcactcagctgcagaaggaaaaacaggatctggagcagcagctgctggagaagaataaaacaatcaagcagatgcagcaacgtatgcttgaattacggaaaactctacaaaaggaactcaagatccgacctgacaatgaactattcgaggtgcgggagaagcccggacctgagatggctaatatggctcccagcgtcaccaataacactgacctgactgatgcaagggaaatcaacttcgagtatttgaagcatgttgtcctgaaatttatgtcttgtagagagtctgaagcatttcatcttatcaaagccgttagtgtactcctgaatttctctcaggaggaggaaaacatgttaaaggagaccctagaatataaaatgtcctggttcgggtcaaaacccgctccgaaaggttccatacgcccaagcatatctaaccctagaattccttggagctag

SEQ ID NO: 28942 - DNA, 291 bp, synthetic construct
  source 1..291: mol_type = other DNA; note = Synthetic coding sequence
tgagctaaaatcaaagccagagatcttcggggaaagaaaaaggaggagctgctcaagcaactcgatgacttaaaagtcgagttatctcagctgcgggtcgccaaagtgacagggggagccgcaagcaagctatctaagatcagggtggtgcggaagtcaattgctagggttcttaccgtgattaaccaaacccaaaaagagaatctcaggaagttttataaagctgccgctggcggtccatgcatccaaatggatcgagtgctcccgcagcccccagcatgctcttgctag

SEQ ID NO: 28943 - DNA, 1035 bp, synthetic construct
  source 1..1035: mol_type = other DNA; note = Synthetic coding sequence
atgcgcaggcgcagagaggaggagggcattcaactgagaaagcagaagagagaacagcagctgtttaagcgcaggaatgtagaactcatcaacgaggaagccgctatgtttgattcattattgatggactcctacgtcagctctactaccggcgagtctgttataacacgcgagatggtcgaaatgctattctcagatgacagtgatctgcagctggccaccactcaaaagttccgcaagctgctgtcaaaggagccgagtccgcctattgacgaagttataaatacacctcgggtggtggatcgtttcgtcgagtttttgaaacgaaatgagaattgtaccctgcaggctgtgtgggctttggggaacattgctggcgactcaagcgtgtgtagagactatgtgctgaattgctccatcttgaatccactcctcactttactgacaaaatctaccagactcacaatgactcgcaatgccgtttgggccctgagcaacttgtgtaggggcaaaaacccgcctccagagtttgccaaagtgagtccatgcctccctgttctaagtagactgctgttcagtagcgactcagatcttcttgctgacgcctgctgggcgctgtcatatctgtccgatggtcctaatgaaaagatccaagccgtcatcgacagcggcgtatgtaggcggcttgtggagcttctcatgcacaatgactataaagtcgcctcacccgcactgcgagcagtgggcaatattgtgacgggggatgatattcagacgcaggtcatactcaactgttctgcactaccatgcctcctgcatctattgtcctcaccgaaggaaagcattaggaaggaggcttgctggactatctcgaacattaccgcaggaaaccgcgctcagattcaagccgttatcgatgcaaatattttccctgtcctaatcgagatcctgcagaaggcggaatttaggacgagaaaggaggccgcatgggccataacaaatgccacttctggcggaacaccagagcagatatag

SEQ ID NO: 28944 - DNA, 582 bp, synthetic construct
  source 1..582: mol_type = other DNA; note = Synthetic coding sequence
atgcctacgacatctagacccgctctggatgttaagggcggtacctctccagcaaaggaggacgctaaccaggaaatgtcttcagtggcgtactctaatcttgcggtgaaagaccggaaggctgtcgcaatcctgcattaccccggagttgccagcaatggcactaaggcctccggagccccaacttcttcgagcggctcccctataggaagccccaccactacacctcccaccaagccaccgagttttaacctccatcccgcaccccaccttcttgcatccatgcacctgcagaagcttaactctcagtatcaaggtatggctgccgctacaccaggccaacctggcgaagcgggacccctgcagaactgggattttggagcacaggcgggaggggctgagagcctgtccccgtcagccggagcccaaagccctgccatcatagatagcgatccagtggacgaggaggtgctgatgtctctggtcgtggagctgggtcttgacagggctaatgagctgcccgagctgtggctggggcagaacgaatttgacttcacagctgacttcccctccagctgttag

SEQ ID NO: 28945 - DNA, 1611 bp, synthetic construct
  source 1..1611: mol_type = other DNA; note = Synthetic coding sequence
atggaaacaatggcatctccaggtaaggataactaccggatgaaaagctataaaaataatgcactgaatcctgaggaaatgagaaggaggagggaggaggagggaatacaactgaggaagcaaaaacgcgagcaacagctttttaaaaggaggaacgtcgaactgattaacgaagaggcggctatgtttgatagtctgctgatggactcttacgtttcgagtaccaccggggagagtgtaatcactcgtgagatggtggagatgttgttttccgacgactctgaccttcagttggcgactactcaaaagttccggaaattgttaagtaaggagccgagccctcccattgatgaagttatcaacacacctagagttgttgaccggtttgtggagtttctgaagcggaacgaaaactgcaccctgcagttcgaagctgcctgggctctcactaatattgcctcaggcacctcgcagcagactaagattgtgattgaagccggtgccgtgccaatttttatcgaactccttaacagtgatttcgaagacgtgcaagaacaagctgtttgggccctggggaacatagccggagatagctcggtgtgtcgggattacgtattaaactgcagtatcctcaatccacttctgaccttattaaccaagtcaacgaggctgacaatgacccgcaacgcagtttgggccttgagcaacctgtgcagaggcaagaacccaccaccagaattcgcgaaggtctccccttgtcttcccgtcctgagcaggctgctttttagctcagacagtgacctcctggccgatgcctgctgggccctcagctatttatctgacggtcctaacgaaaaaatccaggctgtcatcgatagcggagtctgccggcgacttgtggaactcctgatgcacaacgattacaaggtcgcctctccagctctgcgtgctgtgggtaacattgtaacaggcgatgatattcagacccaggtgattcttaactgtagcgctctcccttgcctattgcaccttctgtcatctccaaaggaatctattcggaaagaggcgtgttggacaatctccaacatcacagccggaaatcgggcacaaatacaggctgtgatcgatgccaatatatttccagtcttaattgagatactgcagaaggctgagttcagaaccaggaaagaggctgcttgggcgataacaaatgcgacttctggcggaacccctgagcagataagataccttgtcagtctaggttgtataaaacctctctgcgacctcttgaccgtcatggattctaaaattgtgcaggtggccctcaacggactggagaacatcttaagactaggggaacaggaggggaagaggagtggctcaggagtgaatccttattgcgggttaatcgaagaagcttacggactcgataagatcgaatttctgcagtcgcatgagaatcaggaaatctatcaaaaagcgttcgatcttatcgagcattatttcggcgtggaagatgatgatagttctttggctcctcaggtggacgaaacccagcagcagtttatcttccagcagcctgaagcgcctatggaggggttccagctgtag

SEQ ID NO: 28946 - DNA, 2769 bp, synthetic construct
  source 1..2769: mol_type = other DNA; note = Synthetic coding sequence
atgattacatcagccgctggcataatctctctccttgacgaggatgaaccgcagttgaaggaatttgccctgcacaaactcaatgccgttgtgaatgatttttgggccgaaatctccgagtcagtcgataagatcgaagtgctctacgaggacgaaggctttcggagtagacagtttgctgccttggttgcctccaaggtcttttaccatttgggtgccttcgaagaaagcctgaactacgccctcggggcaggcgacctcttcaacgtgaatgacaactccgagtacgtggagacaatcattgcgaagtgtatcgaccactacactaagcaatgtgtggaaaacgccgatctccctgaaggggagaaaaaacccattgaccagcggctggagggcattgttaacaagatgttccagcgctgcctcgacgatcataagtacaagcaggcaatcggtattgctctcgaaaccagacgcctggatgtatttgaaaaaactatcctggagtcaaacgacgtgcctggcatgctggcctattcactgaaactgtgcatgtccctgatgcagaataaacaatttaggaataaagtgctgcgcgtcctggttaaaatttacatgaacctcgagaaacccgattttatcaacgtttgccaatgtctgattttcctggatgacccccaggcagttagcgatattctcgagaagttggtgaaagaagacaatctcctgatggcatatcaaatatgctttgacctctatgagtctgcaagccagcagttcctgtcaagtgtgatccagaatttgcgcactgtggggactccgattgcttccgttccagggagtactaatacaggaactgtgcctggaagcgaaaaggacagtgattctatggagacagaggagaagactagttctgcgttcgtgggtaagacacccgaagcctccccagaacccaaggatcaaaccctgaaaatgatcaaaattctgagcggggaaatggccatagaactgcatctgcagtttctcattaggaacaacaacactgatctgatgattctgaagaacaccaaagatgccgttcgaaattccgtgtgccacaccgcaaccgtgattgctaatagcttcatgcactgcggcacaacttcggatcagttcttgcgcgataatttggaatggctagcacgcgctaccaattgggcgaagtttaccgctacggcatccctgggagtcattcacaaagggcacgagaaagaggccctgcaattgatggccacatacctgcccaaagacaccagcccaggcagtgcttatcaagaaggcggagggctgtacgccttagggctaatccacgcaaaccacgggggtgatataatcgactacttactgaaccaactaaaaaatgcctccaacgatatcgtgcgtcacgggggtagtcttgggctggggctcgctgccatgggcactgcaagacaggatgtttacgacctcctgaaaaccaatctttaccaggatgacgcagttaccggagaggctgctgggcttgccctcggcctggtcatgctcggatcaaagaacgcccaggctattgaagacatggttggctacgcccaggagactcaacacgaaaaaatcctgcggggacttgcagttggcatcgcactcgtaatgtacgggaggatggaggaggctgacgccttgatcgagagcctgtgcagagacaaagatcctattctgaggaggagcgggatgtataccgtagctatggcttactgcggttccgggaataataaagcgattcggaggctcctgcatgtagccgttagtgacgtaaacgacgacgtaaggcgggctgccgtagagagtttaggctttatcctgttccgcacacccgaacagtgtcctagtgtcgtctcactgctgtcggaatcatacaatccccacgtccggtacggcgcagctatggccttaggcatatgctgtgcgggaactggcaataaggaagccataaatctcctggaaccaatgactaacgaccctgttaactacgtgcgccagggcgctctgatagcttcggctcttattatgatacagcaaaccgagattacttgtccaaaagttaaccaattccggcagctctactctaaggtgatcaacgataagcacgatgatgtcatggcaaagttcggggcaatcttggcacaaggcatcctggacgccggaggtcacaacgtaacaatttccctacagtcccgcactggtcacacgcacatgccctccgtggtgggagtgttggtgtttacccagttttggttctggttccctttgagtcactttctgagcctagcctatactcccacctgtgtcatcggtctcaataaagatcttaaggtgtcaacggcggtcctttcgattacggcgaaagcaaaaaagaaagagaaggagaaagagaagaaagaagaggagaaaatggaagtcgatgaggctgaaaagaaagaagaaaaagagaaaaaaaaagagccggaacccaactttcagctgctggacaacccggctcgcgtgatgcctgctcagcttaaagtccttaccatgccggagacatgcaggtaccagccatttaagccactttcaattggtggtattattatcttaaaagacacttcagaagacatcgaggagctggtagagcctgtcgccgctcacgggcctaaaatcgaggaggaggagcaggagcctgaaccacctgaaccattcgagtacattgacgattag

SEQ ID NO: 28947 - DNA, 1227 bp, synthetic construct
  source 1..1227: mol_type = other DNA; note = Synthetic coding sequence
atgcctgaggaacaggctttcagtgtgctggtgaaaattatgttcgactatggactgcgggagctgtttaaacagaattttgaggacctgcactgcaaattctatcaactggaacgcttaatgcaagaatacattcctgacctgtataatcacttcctagatatttctctggaggcgcatatgtacgcgtcacagtggtttttgacactctttaccgctaagtttcctttgtatatggtgtttcacatcattgaccttttgttatgcgagggaattagcgtgattttcaatgtcgcactggggctcctgaagacctcaaaggatgatttgctcctcacggattttgaaggggctctgaaattcttcagggtgcagctgccaaagcgctaccggtctgaggagaacgccaaaaaactcatggagttggcgtgtaatatgaaaatcagtcagaagaagctcaagaagtatgagaaagagtatcatacaatgcgggagcaacaagcccagcaagaggatccaatcgaacggttcgagcgcgaaaacagaaggctgcaggaagccaacatgcgtcttgagcaggagaatgacgatctggcacatgaactggtgacctctaaaatcgctttacgaaaggacctcgataacgccgaggagaaagctgatgcactcaacaaggagctgctaatgactaagcaaaaacttatcgatgccgaagaggaaaaaagacgtctcgaagaggaatccgcccaattaaaggagatgtgtcggagggaattagacaaagctgagtcagagattaagaaaaattcgtccattattggagactacaagcagatttgtagccagctcagcgaacggttagagaagcagcagaccgccaataaagttgagattgaaaagatcaggcagaaagtggatgattgcgagcgctgcagggaatttttcaataaggagggccgtgtcaaaggaatctccagcaccaaggaggtattggacgaggatacagacgaggaaaaagaaacactgaagaaccagcttcgcgagatggagctggaactcgctcagacaaaactgcaattagtggaggccgaatgcaagatacaggatctggagcatcatctaggtctggccctaaatgaagtgcaggccgctaagaagacatggtttaaccgtactctgagctctataaaaacagctaccggcgtgcagggaaaagagacgtgctag

SEQ ID NO: 28948 - DNA, 3210 bp, synthetic construct
  source 1..3210: mol_type = other DNA; note = Synthetic coding sequence
atggacgataaggccagcgtgggtaagatctctgtgagttctgattcagtcagcacccttaattccgaggactttgtccttgtgtcccgccaaggagacgaaactccatcaacaaacaacgggagtgatgatgaaaaaacaggtctgaaaattgtcggtaacggctccgaacagcagctgcagaaagaattggccgacgttttgatggacccgccaatggatgatcaacccggagaaaaagagctagtcaaacgctctcaactcgatggtgagggggacggacctttgtccaaccagttgtccgcatcttccaccataaacccagtcccattggtggggctccagaaacccgagatgagcctcccagttaagcccggtcagggggattccgaagcttctagcccatttacacccgttgccgatgaagacagcgttgtcttcagcaagctcacatacctgggctgtgcctccgtgaatgctccaagatccgaggttgaagcccttcggatgatgtctatcctacggtcacagtgccagatttccctagacgtgactctcagtgtgccaaatgtgtctgagggaatagtccgattgcttgatcctcagacaaataccgaaatcgctaactacccaatatacaagattcttttttgtgtcaggggccacgatgggacaccagagtccgactgcttcgctttcactgaatctcactacaacgccgaactgttcaggatacatgtgtttagatgcgagattcaggaagcagtttctcgcattttgtactcattcgctacagcttttagaaggagcgctaagcagacccctctgtcagccacagccgctccccagacccccgactccgacatcttcactttcagcgtgagcctggagatcaaggaggacgatggaaaaggctacttttcagccgtgcccaaagataaagacagacagtgcttcaagctgcgccagggaatcgataagaagatagtcatatacgtgcagcagactacgaacaaagagcttgctatcgaaagatgttttggactcctcctcagccccggaaaggacgttcgcaactccgacatgcatctgttggacctggaatccatgggcaagtctagtgacggcaagtcttatgtgattaccgggtcttggaaccccaagagtccccattttcaggtggttaatgaagagacacccaaagacaaggttttgttcatgaccactgctgtggacttggttatcacagaggtccaagaaccagtgaggtttctgctggagactaaggtgagagtgtgcagcccgaacgagcggttgttctggcccttttcaaaaagatccacaaccgaaaacttttttctgaaactaaaacagatcaaacagagagagaggaaaaacaataccgacactctatatgaggtggtgtgcttggagtccgaatctgagcgagagcgtcggaagacaacagctagtccatccgtgcgattaccacagtctggatcacaaagttcagtgatcccttcgccgccagaagatgacgaggaagaggataatgacgaaccactcctgtcgggatctggcgatgtgtctaaggagtgcgccgaaaagatactggaaacgtggggggaacttctcagcaaatggcatttgaacctgaatgtgaggcccaagcagctatcttccctggtaaggaacggggttccagaggctctaagaggggaagtgtggcagctgctggctgggtgtcacaacaatgatcacttggtggaaaagtatagaatcctgatcaccaaagagagtccgcaggactccgctattaccagagatattaatagaacattccctgcacacgattacttcaaagacacaggaggtgatggtcaggactcactttacaagatctgtaaagcttattctgtgtacgacgaagaaatcggctactgtcaagggcagtctttcctggccgcagtgctattgctacacatgcccgaagaacaggccttttctgttttggtaaagattatgttcgattacggcctaagagaactgtttaagcagaattttgaggacttacactgcaagttctatcagctggagcgcttgatgcaggaatacatcccagatctctataatcatttcctcgacatatccctagaggcacacatgtatgccagccagtggtttctgacattatttacggctaagttccctctctatatggtctttcacattatagatctgctactgtgcgagggaatttcggtgatctttaacgtggccctgggcttactgaagacatccaaggatgaccttctattaaccgattttgaaggagccttaaaattttttagggtgcaactgccaaaacgctaccgctctgaggagaacgctaaaaaacttatggagttggcgtgtaacatgaagatatctcagaaaaaactcaagaagtatgaaaaggaatatcacaccatgagagaacagcaagcacagcaagaagatcccattgagcgctttgagcgcgagaaccgaaggctgcaggaggcgaacatgaggcttgaacaggagaacgacgatcttgcccacgaactagtgacaagtaaaattgcactgagaaaggacttggataatgccgaagaaaaggctgatgcgctcaataaggagctgctaatgactaaacagaagctgattgacgccgaagaggagaagcggcgattagaggaggaatcggcgcaactgaaagaaatgtgccgaagggagcttgacaaagccgagagtgaaattaagaaaaatagttctattataggagactacaaacagatctgcagccaattgagcgaaaggctggagaagcagcagaccgcaaataaggtggaaatagaaaaaatcagacagaaggtggatgactgtgagcggtgtagagaatttttcaacaaggaaggccgagtgaaggggatcagctcaaccaaagaggtcctggacgaggacactgatgaggagaaggagacactgaaaaatcaactgcgtgaaatggagttggagctggcccagacgaagcttcagctagtggaggcagagtgcaagatacaagacctcgaacaccatctgggtctggcactaaacgaagtacaggctgcaaagaagacctggttcaataggaccctcagctcaattaagaccgcaacaggcgtgcaaggcaaagaaacttgttag

SEQ ID NO: 28949 - DNA, 2808 bp, synthetic construct
  source 1..2808: mol_type = other DNA; note = Synthetic coding sequence
atgcaacggaagctagtgactctcgttaattgtcagttggttgaggaggagggacgagtgcgcgcaatgagggccgcaaggagtctcggcgagcggactgtcacagagctcatactccaacaccagaacccacagcaactcagtgccaacctgtgggcagcagtgcgagcgaggggctgccagttcctgggtcctgccatgcaggaagaggccttgaagctcgtgttgctcgcgctcgaagacgggtccgccctcagcagaaaagtgctagtgctgttcgtcgtgcaacgattggagcctcgcttcccccaggctagtaaaacctccattggccatgtggttcaactgctctaccgggcttcatgctttaaggtgaccaaacgtgatgaagacagttcactaatgcagctcaaggaagagtttaggtcatacgaggccctccgaagggaacacgatgcccagattgtgcatatcgcaatggaagcaggccttagaatctcccctgaacagtggtcaagcttgctttacggagatctcgcacataagtctcatatgcaatcgattattgataagttgcaaagccccgagagtttcgccaagtctgtgcaagaactgacaatcgtcctgcaaagaaccggagatccggcaaacctgaatcgactcaggccccacctagagctgctcgcaaatatcgatccgaatccggacgccgtctccccaacatgggagcagctcgaaaatgccatggtagctgtcaagaccgtggtgcatggcctggtggacttcatccagaactacagccggaagggccatgaaacaccccagcctcaacctaattccaagtacaaaacatctatgtgtcgggacctgagacagcagggcggatgtccgcgtgggacaaattgtacattcgctcacagccaggaggagttggagaagtacaggctgcgaaataagaagatcaatgcaacagttaggacatttccgttgctgaataaggtgggcgtgaataatacagttactacgacagccggaaatgtaatttctgtgatcgggtcaaccgagactactgggaagatcgtccccagcactaatggtatctcaaacgccgagaactccgtttcacaactgatcagcaggtctaccgattcaacattacgagcgctggagaccgtaaaaaaagtaggaaaagttggcgcaaatggccagaatgctgccggtccgagtgctgatagcgtgacagagaacaagattgggtcgccgccaaagacccccgtgtccaacgtggccgctacctctgctgggccttcgaatgttggaaccgagttgaactccgtgccacagaaaagtagtccctttctgacaagggtgccggtctatcctcctcacagtgagaacatccagtattttcaagatccacgcacacagatcccgttcgaggtcccacagtatccccagactggatactaccctcctcctcccacagtgccagccggagttgcaccctgcgttccgaggttcgttcgctcgaataatgtgccggaatccagcctgcccccagcatctatgccatacgccgaccactactcgaccttttctcccagagacaggatgaacagctctccttatcagccccctcctccccagccttatggcccagtcccgccagtaccttccggcatgtatgctcctgtgtacgactcacggaggatctggcgacccccaatgtaccagcgagatgatatcatccgttctaattccctcccacctatggacgttatgcatagctccgtataccagacttctctccgtgaacggtataattcattagacggatactacagcgtggcctgtcaacctcctagtgagccaaggactacagtgcctttgccgagagagccttgcgggcacttgaaaacatcgtgcgaagaacagattcgtcgcaagcctgaccaatgggcccagtatcacacccaaaaagcacctctcgtaagctctacactccctgtcgccactcagagtcctacaccgcctagcccactcttctcggtcgactttagagctgacttttctgaatccgtttcagggactaaattcgaggaggaccacctgtcacactattctccatggagctgcggaacaatcggatcctgtattaacgccatagatagcgagccaaaagacgtaattgctaactcgaacgcagttctaatggacttagatagtggcgatgttaaaaggcgcgtgcacctatttgagactcaacggaggaccaaggaagaggaccctattatccccttcagtgatgggcctattatatcgaagtggggagcaattagccggtctagtagaactggttatcacaccactgatccagtccaggccacggcaagtcaggggagcgcaaccaagcccatatctgtgagcgactacgtcccgtatgtaaacgcggtggacagccggtggagttcatatgggaatgaagccacaagctccgcccactatgttgaacgcgatagatttatcgtcactgacctttccggccaccggaagcatagttcaacaggcgacctgctctcactggaactgcaacaagctaaaagcaactccctactgctccaacgggaggccaacgcgctggcaatgcagcagaagtggaatagtctggatgaaggacggcatctcactctgaatctgttgagcaaggaaatcgagttgcgaaatggcgaggtgaagaagctgaatttgtcagcatcatgtctgatgtacctttttagtgcagcagcgtcgtggctgtatcattactag

SEQ ID NO: 28950 - DNA, 1437 bp, synthetic construct
  source 1..1437: mol_type = other DNA; note = Synthetic coding sequence
atgcctgtccaggctgcgcagtggaccgagttcctctcttgcccaatttgctataatgagttcgacgagaatgtgcacaaacccatttcactgggctgtagtcatactgtatgtaaaacatgtctgaacaaattgcacagaaaggcatgtccgttcgaccagactgcgataaatacagacatcgatgtactgcccgtgaacttcgctctactgcagttagtaggagctcaggtgccagaccaccagagtattaaattatctaacctcggggagaacaaacactatgaggttgcgaaaaagtgcgtggaggacctggccctgtatctaaagccattgagcggcggtaaaggagtcgcgtccctcaatcagtctgccctctcacgtcctatgcaaagaaaactggtcactcttgttaattgccagctggtggaggaggaaggcagggtgcgggctatgagagcggctaggtcactgggggagcgtaccgtaactgaactgatcctccagcaccagaatccgcagcagctgtcagcaaatctatgggctgccgtcagagcaaggggttgtcagtttctaggtccagccatgcaagaagaggccctcaaattggtgttgttggcactggaggatggctccgccctgtcacgtaaagtacttgtgctattcgtcgtccagagactcgaacctaggtttccccaggccagcaaaacatccattggacatgtcgtgcagctgttgtacagagctagttgttttaaggttacaaagagggatgaagatagctccctgatgcagcttaaggaagagttcaggagttacgaggccctaaggcgtgagcatgatgcccagatagtacacattgcgatggaggccggactgcgcatctcccctgagcaatggtctagtctcctctacggagacctcgctcacaaatctcatatgcagagtattatcgacaagctgcagtcacctgaaagcttcgccaaaagcgtgcaggagctcaccatagtgttgcagcgtacgggcgatccagctaacctgaaccgcttgcggcctcacctggagctgctggctaacattgaccccaaccctgatgccgtgagtcccacatgggaacagttagaaaacgccatggtcgccgttaaaaccgtagtgcatgggttggtggatttcatccagaattactcaagaaaagggcacgaaactccccagccacagccaaactcaaagtataaaacctcgatgtgcagggatctaagacagcagggcggatgccctcgcggaacaaattgtacctttgctcactcccaagaagagctcgagaagtaccgcctgagaaacaaaaaaataaacgccacagaagttctcaagcaacagggcaagttgtttcaggttcagacagagtttcagatgcagaaaactgtgtttcccagctag

SEQ ID NO: 28951 - DNA, 3576 bp, synthetic construct
  source 1..3576: mol_type = other DNA; note = Synthetic coding sequence
atgcctgtccaggcggcacagtggacagaattcctgtcttgtcctatatgttacaatgaattcgacgaaaatgtccacaagcccatcagcctcggttgctcacacacagtctgtaagacctgcctgaacaaacttcatcgcaaggcgtgcccctttgatcaaacagcaatcaatacggatatcgatgtcctacccgtcaatttcgcgctactgcagctcgtcggcgctcaggtgccagaccaccagtctattaagctgtctaatcttggggaaaataaacactatgaagttgcgaagaagtgcgtcgaagatctagccttatatctgaagccattgtccggaggcaagggggtggcctctttgaaccagtccgcgctgagcagacctatgcagaggaagctggtaacactagtgaattgtcagctggtcgaagaagaggggcgtgtgcgcgctatgagggcagccagatctctgggggagcgtaccgtgacggagctgatcctgcaacatcagaaccctcagcagctgtcagctaacctgtgggctgcagtgcgggctagaggctgtcagttcctggggccagctatgcaagaggaagcgctgaaactcgtacttctcgcactcgaggacggatccgctctgagtcgaaaggtattggtgctgtttgtggtgcagagactggagcccagatttcctcaagcttcgaagacaagtataggacacgtcgttcagctgttgtatcgagcttcgtgctttaaggtgacgaagagagatgaagacagtagccttatgcagctgaaagaggaattccgatcttacgaagcactcagacgcgaacacgacgcccagattgtgcacatagccatggaggccggactgcgaatctcaccagagcagtggagttcgctgctgtacggcgacttggctcacaaatcgcatatgcagtctattattgataagctccaatctcctgagtcattcgcaaaaagcgtgcaggaactgaccattgtactccagcgaactggcgaccccgctaaccttaatcggttgcggccacaccttgaacttctggccaacattgatcccaaccctgacgccgtgtccccaacatgggagcagctggagaatgctatggtggctgtgaagactgtagtgcatggcctggtggattttatccagaactactctagaaagggtcatgaaacaccacagcctcaaccaaattccaagtataaaacaagtatgtgtagggatctgagacagcaggggggatgtccacgtggcaccaactgtaccttcgcccatagtcaggaagaactggaaaaatatagactccgtaataaaaagatcaatgccacagtccgtacatttcctctgctgaacaaggtgggcgtgaacaataccgtgactactactgctgggaatgtgatttccgtaataggttccacagagactactgggaagatcgtccctagcaccaatgggataagtaacgctgagaatagtgtgagtcagctgatctctcgatccaccgattcaaccctgagagcactcgagacagttaagaaggtcgggaaggtcggtgcaaatggacagaatgcggctggcccatccgccgactctgtgacagagaacaaaataggttcgccacctaagaccccagtgtcgaatgtggccgctaccagcgccggtcctagcaacgtcggtacagagcttaacagtgtgcctcaaaagtcgtctccctttctgacccgggtccccgtttatcccccacacagcgagaatatccaatatttccaagaccctaggacacagatccccttcgaagttccacagtacccacagaccggatattacccccctccccctacagtgccagctggggtagctccatgcgtacccagatttgtgcgcagcaataacgttcccgaaagttcacttcccccagccagtatgccttacgccgaccattactcaaccttcagtcctcgagatcgtatgaactctagcccgtaccaaccccctcctccacagccgtatgggccagttccgccagtgccatccgggatgtatgctccagtgtacgattccaggcggatttggaggccaccaatgtaccagcgcgacgacatcattagatccaattctctgccgcctatggatgtgatgcactcctccgtgtaccaaacaagccttagggagagatacaattcactggatgggtactattctgtcgcttgccaaccgccatccgaacccaggaccacagttccattgccaagagaaccatgtggccacctgaagactagctgcgaagaacagatccgcaggaagcccgaccaatgggcccagtatcacactcagaaggcgcctctggtctccagtacattgcctgtcgctacgcaatcacccacccctccgagtccactctttagcgtagactttcgcgctgactttagcgaatcagtgagtgggacgaaattcgaagaagaccacctcagccactactctccgtggtcgtgcggaacaatcggctcatgtatcaacgccatcgatagtgaaccaaaggacgtgatcgcaaattcaaacgctgttctgatggatctggacagtggcgatgttaaacggagggttcacttgttcgagacgcagcgcagaactaaggaagaggatccaatcattccattttctgacggtccaatcatctcaaagtggggggctatttcacgctcgtcacgcacgggctatcacactacagatccagtccaggccaccgcatcccaaggtagcgctacaaagcccattagcgtcagcgactatgttccatatgtaaacgctgtggactcccgttggtcctcttatggcaatgaggctaccagtagcgctcattacgtggagagggaccgcttcatagtaactgatctgagcggccacaggaagcactccagcacaggagacctgctctcactggagctccagcaggccaagtctaactcactgctcctacaaagggaagcgaatgctctcgcaatgcaacagaagtggaatagtcttgacgaaggtcgacacctcaccctcaaccttctaagtaaagagattgaactgagaaacggggagctccagagcgactatactgaggatgctacagataccaaacccgaccgtgatattgagctggagttgagcgctctggacaccgacgagcccgatggccaatctgaacctatcgaagagatcctcgacatacagctggggattagttcccagaacgatcagttgcttaatggaatggcagtggaaaatggccaccccgtgcagcagcaccagaaagagcccccaaagcagaaaaagcagagccttggcgaggaccatgtgatcctggaagagcagaagactattctacccgtgacttcttgcttttcccagcccctgcctgtctccataagtaacgccagctgcttaccaatcaccacaagtgtcagtgctggcaacttgattttgaaaactcatgtgatgagcgaggacaaaaacgatttcctgaagcccgttgccaacggcaaaatggttaactcctag

SEQ ID NO: 28952 - DNA, 1569 bp, synthetic construct
  source 1..1569: mol_type = other DNA; note = Synthetic coding sequence
atggccgctagcgcaaaacggaaacaggaggaaaaacatttgaaaatgctccgggatatgaccggcctcccccacaaccgaaaatgttttgattgtgaccagagggggcctacatacgtcaatatgactgtggggagctttgtgtgcacttcgtgcagcggttcactgcgtggtctgaatccaccccaccgagtaaagtctatctctatgacaactttcacacagcaggagattgagtttctgcagaagcacggaaatgaggtgtgtaagcaaatctggttaggtctattcgatgaccggagttcggctatcccagacttcagagacccccaaaaggttaaagaattcctgcaggagaaatatgagaagaaaagatggtatgtacctccagagcaggccaaggtagtggcgtctgtacacgcgagtatcagcggaagtagcgcttcttcaactagtagtacaccagaggtgaaaccgctaaagagcctgctcggcgactctgcacccacactgcaccttaataagggcaccccctctcagagccccgtcgtaggcaggagccagggccagcaacaggagaaaaagcagttcgaccttctaagcgatcttggcagtgacatttttgcggctccggcaccccagagcaccgcaaccgccaacttcgccaatttcgcgcatttcaactcccacgctggcggaagcgccgcaagcgttaacgcaaatttcgcccacttcgacaacttccctaaaagctccagcgccgactttggcacctttaatactagtcagtcccatcagacggctagtgccgtgtcaaaggttagcaccaacaaagcgggacttcagacagccgataagtacgccgcactggcgaacttggacaacatcttttcagccggacagggaggcgatcaggggtccggattcggcactactggcaaagcccctgtgggctctgtcgtgagtgttccctctcagagtagcgcctcaagcgataagtacgcggctcttgccgagctggatagcgtgtttagcagcgctgcaaccagctccaacgcgtacacatccacatctaacgcttcttctaatgttttcggcaccgttcccgtggttgcgtcggcccagacacagcctgcaagttcttccgtgcctgcgccattcggcgctacgcctagcacgaaccctttcgtcgccgcagcagggccatctgtcgcaagctcaacgaatccatttcagacgaacgccagaggggcaacagctgcgacattcggcactgcaagtatgagcatgcccaccggattcggcactcccgcaccttatagcctgccgacttctttttctggatcttttcagcagccagctttccctgcccaagccgcttttccacagcagactgcattttctcagcagcctaacggtgccggatttgctgcttttggacagacgaagccagtcgtcaccccttttggccaggtggccgcagccggtgtatcttccaatccattcatgaccggcgctccaactggccagttccccacaggcagttcctcgactaacccgttcctgtag

SEQ ID NO: 28953 - DNA, 1524 bp, synthetic construct
  source 1..1524: mol_type = other DNA; note = Synthetic coding sequence
atgcaggatgactccatcgaggcatctacctccatcagccagctgcttcgggaatcgtatctcgctgaaacgaggcaccgtggcaacaatgaacggagtagggccgagccttccagcaatccctgccactttggttccccttcgggagcagcggaaggcggaggcggtcaggacgacttgccagacctctctgcttttctttcccaggaggagcttgatgaatcagtaaatctggcacgtttagcaatcaactatgatccgctggaaaaggctgatgaaacccaggcacgcaagagattatctcccgatcagatgaaacattcccccaacctgtcgtttgagcctaacttctgtcaggataacccgaggagtccaactagttcaaaagaatctcctcaggaggctaagcggcctcaatactgttccgagactcagtctaagaaggtatttctgaataaggctgctgatttcattgaggagttgtcctccctttttaaaagccattcaagtaagaggatacgcccaagggcatgcaaaaaccacaaatctaagctggagagtcagaataaggtcatgcaggagaacagctcttcattctccgatctatctgaacggagagaacggagttcagtgcctatccctattcccgctgataccagggataatgaggtgaatcatgccctggagcagcaggaggcaaagcgacgggaggcagagcaggcagcttccgaggcggcagggggagacacgacaccgggatcatcaccctcttccctgtactatgaagagccacttggccagccgcctcgttttacacagaagctgcggagcagagaagtgcccgaaggaacacgagtccagcttgactgcatcgtggtcggaatcccccctcctcaggtgcgatggtactgtgaaggaaaagagcttgaaaactccccggatattcacattgtccaggccggtaaccttcactctctgacaattgctgaagcgttcgaagaggacaccggaagatattcatgttttgcctcgaacatctacggaacggattccaccagtgctgaaatctacatcgaaggcgtctcatcttctgactcagaaggcgacccgaacaaggaagaaatgaacaggattcagaagccgaacgaggtctcatcccccccaaccacaagcgctgtgatcccgcctgccgtgcctcaggctcagcacctggtggcacaaccaagagtggcaacaatccagcagtgccagagccccacgaattacttgcaaggcctcgatggcaaacctatcatcgccgctcctgtatttacaaaaatgctgcagaatttgtccgcctcggaaggccagctcgtcgtatttgagtgtagagtaaaaggggcaccaagcccaaaagtcgagtggtatagagaaggaacactgattgaggacagtcctgacttccggatcttgcagaagaagccaaggagcatggcagaacccggtaaggacgacttcaacttcaacctcctcgtctacgaatag

SEQ ID NO: 28954 - DNA, 3150 bp, synthetic construct
  source 1..3150: mol_type = other DNA; note = Synthetic coding sequence
atgttatgttggggtaacgctagctttgggcagctggggctgggagggatcgacgaggagattgtgctcgagccaaggaagtccgatttcttcataaataagcgggttcgcgatgtcgggtgcggattgagacatactgtgtttgtgctcgatgacggaaccgtgtacacttgcggatgtaatgatctggggcagctgggccacgagaaatcccggaaaaaaccggagcaagtagtagcactggacgcgcagaacatagtcgccgtatcttgcggggaggcacacactctcgccttgaacgataagggacaagtctacgcctggggtctggactcagatgggcagcttggcttggtgggttctgaagaatgcatacgcgtgcctcgaaatattaaatcattgtcggacattcagattgtgcaagtggcttgtggatattaccactcactcgcgctctccaaagcctcggaggtcttctgttgggggcagaataaatatggccaattgggactcggaaccgattgcaaaaagcagacatcacctcagcttttgaagtcattgctgggcattccttttatgcaggtggccgcagggggtgcacactcctttgttctcacattgtctggggcaattttcggctggggcagaaataaattcggccaactgggtcttaacgacgagaacgatcggtatgtccctaatctcctgaagagccttcgcagtcagaagatcgtttatatttgttgcggagaggaccacacagcggctttgactaaggaaggcggagtgttcactttcggggcagggggatatggacaactgggccacaactccacctctcacgagattaatccccgtaaagtgttcgaactaatgggctctattgtgaccgagatcgcatgcgggcgacagcatacgagcgcgttcgtgcccagctcagggcgtatctatagtttcggattggggggaaatggtcaactaggaacaggcagtacttccaacaggaagtctcccttcacggttaagggaaactggtacccgtacaacggacagtgcctgcccgatatcgattccgaggaatacttctgcgtgaaacggattttctcagggggtgaccagagcttctctcattatagctccccacagaactgcggccctcctgatgactttcgctgccccaatcctaccaagcagatttggaccgttaatgaagctttgatccagaagtggctgtcatatccgagcggcaggttcccggttgaaatcgccaatgagattgacgggacattttcctcttccggttgtctgaacggtagctttttggctgtgagcaatgacgatcactataggaccgggacacgcttttccggggttgacatgaacgcagctcgtcttctgtttcacaagttgattcagcccgatcaccctcagatttcccagcaggtggccgcaagcctggagaagaaccttatccctaagctgactagcagcttgcctgacgtggaggccctccggttttacttgaccctgcctgagtgtcctctaatgtccgattccaataattttacaacaatcgccatcccatttggcactgccctggtcaatctggagaaagccccactgaaggtcctggagaattggtggtcagtgttagagccccctttgttcctgaaaatcgtggagttgttcaaggaggttgtcgtgcatctgctgaagctgtacaaaatcgggattcctccttctgagcgcagaattttcaactctttcctccacacagccctcaaagtgttggagatcctacatagggtgaacgagaaaatgggccaaattatacaatacgacaagttttatatacatgaggtacaagaactgatcgacatcaggaatgactatatcaattgggtccagcagcaggcatacggcatgctagccgacatcccagtcaccatttgtacgtacccattcgtgttcgatgcccaggctaaaacgaccctgctacagactgatgctgttctgcagatgcagatggctatcgaccaagcccatagacaaaatgttagcagtctgtttctgcctgtgatagagtcagtgaacccatgcctgatcctggtagtgcgcagagagaacattgttggcgacgctatggaggtcttgcgcaagaccaagaacatagattacaagaagcccctgaaagtgatctttgtaggagaggacgcagttgatgcaggcggagtccggaaagagttctttctgttgatcatgcgggaactcctggaccctaaatacggaatgttccggtactacgaggactcgaggctgatctggttttctgacaagacttttgaggacagcgatctctttcatctgattggcgttatttgtggactggccatctataactgtacaattgttgacctccacttccccctggccctgtataaaaagctacttaaaaagaagccatctctggacgacctcaaggagcttatgcctgatgttggtcgcagtatgcagcagttactggattaccccgaggacgatatcgaagaaacattctgcctgaatttcacaatcactgtggaaaatttcggagccaccgaagttaaagagttggtcctgaatggagccgacaccgctgtgaacaaacaaaaccggcaggagtttgtcgatgcctacgtggactatatatttaacaagtcggttgcatcactgttcgatgcattccatgctggatttcacaaagtgtgcgggggaaaggtcctgctccttttccaaccaaatgaactccaggcaatggttatcggcaataccaattacgactggaaagaactcgaaaaaaatacggagtataagggggagtattgggctgagcaccctacgataaaaatcttctgggaagtgtttcatgagctgcctcttgaaaagaagaaacagttcctgctcttcctgaccggaagtgatagaatccccattctgggaatgaagtcacttaagctggtcatacagtccaccggtggaggcgaagaatatttaccagtgtcgcatacgtgtttcaacctgctggatctgcccaagtatacagagaaagagaccctacgaagcaagttgatccaggccatagaccacaatgagggtttctccctaatctag

SEQ ID NO: 28955 - DNA, 726 bp, synthetic construct
  source 1..726: mol_type = other DNA; note = Synthetic coding sequence
atgaacagcggtcggcctgaaacaatggaaaatctccctgccctctatactatcttccagggagaggttgcgatggtgaccgattatggagcctttatcaaaatacccggttgccggaagcagggcttggtgcaccgcacgcacatgtcctcctgtcgcgtggacaagccttccgaaattgtggatgtcggtgataaggtgtgggttaagttaattgggagagagatgaaaaacgatcggatcaaggtttcactgtctatgaaagtggttaaccaaggcaccgggaaagacctcgatcccaataatgtgatcatagagcaggaggagcgcaggcggagaagctttcaagactatactggtcaaaagattacgctggaagccgtgttgaacaccacttgtaagaagtgtggctgtaaagggcacttcgccaaggactgttttatgcagcccggaggcactaaatattccctgatccctgacgaggaagaagagaaggaagaggctaagtcagccgaatttgagaagcccgaccccacaaggaatccaagtcgcaaacgcaagaaggagaagaaaaagaagaaacacagagatcggaagagctctgacagcgattcttctgacagcgagtcagacaccggcaaaagagccaggcacaccagcaaggactccaaggccgctaaaaaaaagaaaaagaagaaaaaacataagaagaagcataaggagtag

SEQ ID NO: 28956 - DNA, 870 bp, synthetic construct
  source 1..870: mol_type = other DNA; note = Synthetic coding sequence
atgattattaattggaatcaggtgtctgtactatggaagtgcctcctgaaacaatccgctagctatcaagatcgtaggcaatcctggagacgtgcaagtatgaaggagactaacagaaggaagtccctccaccccatccaccaaggaatcaccgagctctcgaggtccatatccgtcgatctggccgagagtaaaaggctgggctgtctactgctgtccagcttccagttctcaatccagaaacttgaaccatttctgagagatacgaaagggttctcacttgagtccttccgagccaaggcatctagtcttagcgaggagctaaaacacttcgcggacggactggaaactgatgggactctgcagaaatgtttcgaggactccaacggcaaagcttctgatttcagcctagaggcctccgtggccgagatgaaagagtatatcaccaagttttctctggaacggcagacctgggatcagctgcttctgcactaccagcaggaggcaaaggagatcctctctcgcggttcgaccgaggccaaaattaccgaagtaaaagttgagcccatgacctacctcggttcttctcagaacgaggtgctaaacaccaagcccgactaccagaagatacttcagaaccagagcaaagttttcgactgcatggagctcgtgatggacgaactacagggctcagttaaacaactccaggcatttatggacgaaagcactcagtgtttccagaaggtaagtgttcaactgggtaaacgctccatgcagcagctggatccatcccccgctagaaaactgctgaaacttcagctgcagaatcctccagccatccacggaagtggatctggcagctgtcagtag

SEQ ID NO: 28957 - DNA, 750 bp, synthetic construct
  source 1..750: mol_type = other DNA; note = Synthetic coding sequence
atgaccagcgtgactcgaagcgaaataatcgatgagctgagcaggagtatcagcgtggacctggccgagtcaaagcgtctggggtgcttgcttctgtcatcttttcaatttagtattcagaaactggaacctttcctgcgggataccaagggcttttctctggaatctttccgggctaaggcctcttctctctccgaagagctgaagcacttcgctgacggcctggagacagatggtactctccaaaagtgctttgaggactctaacggcaaggccagtgattttagtttagaagcctcagtggctgagatgaaggagtatatcactaagttcagtctggaacgacaaacatgggaccagctgttgctccattatcagcaggaagcaaaggagatcttgagtagaggcagcaccgaggcgaaaattacagaagtgaaggtggaacctatgacgtatctgggctcatctcaaaacgaggtactcaatacaaaacctgactaccagaagatcctgcagaaccagagcaaggtgtttgactgcatggagctcgtgatggacgagctccagggttctgtgaaacagctgcaggccttcatggatgagtcaactcagtgcttccagaaggtttctgtacagctgggcaagaggagcatgcagcagttggacccttctcctgctagaaaactgttgaaactgcagctgcagaatccacctgcgatccacggatctggatcaggaagttgtcagtag

SEQ ID NO: 28958 - DNA, 855 bp, synthetic construct
  source 1..855: mol_type = other DNA; note = Synthetic coding sequence
atgacctctgtcacaaggtctgagattatcgacgaacagagcgcctcttaccaagataggcgacagtcatggcggagagccagcatgaaagaaaccaaccgtcgcaaatcgcttcacccaatccaccagggaatcacagaactatccagatctatctctgtcgacctcgccgaaagtaagagacttgggtgtctgctgttgtcaagcttccagtttagcatccagaaactggaaccatttctacgcgacactaaggggttcagcctcgaatcttttagggctaaagcttcatctctctcggaggagttaaagcactttgctgacggactggagaccgacggcaccctgcagaagtgcttcgaagacagcaatggaaaagcaagtgactttagtctagaggcatctgtcgccgagatgaaggagtatattacaaaattctcactggaacgccagacttgggatcagctcctcctgcactaccagcaagaggctaaggaaatcctgtcacggggaagcaccgaagcaaagatcacagaggtgaaggtggaacccatgacttatctgggaagttctcagaacgaagttcttaataccaagcccgattatcaaaagatactccagaatcagtctaaagtgtttgattgcatggagctcgtcatggacgagctccagggatccgtcaaacagctacaggcttttatggatgaatctacccagtgctttcagaaggtcagcgtgcagctgggcaaacgatctatgcagcagctggacccttcgcctgctagaaaactcttaaagctgcaactccagaatcctcccgctatccatggttcagggagtgggtcttgtcaatag

SEQ ID NO: 28959 - DNA, 1071 bp, synthetic construct
  source 1..1071: mol_type = other DNA; note = Synthetic coding sequence
atgacctccgtaacccgatcggaaattattgacgagaaaggtcctgtgatgtctaaaacgcacgatcatcagctggaatcttccctatcgcctgtcgaagtgttcgccaagacctctgcctcgctggaaatgaaccagggagtttctgaagaacggattcacttgggaagcagccccaaaaagggcggaaattgcgacctgagtcatcaagagcgcctgcagagtaagtctcttcacctgagcccccaggagcaatctgccagctatcaggatcgccgacagagttggagacgggcttcaatgaaggagacgaatcggaggaagtccctgcaccccatccatcagggcatcactgagcttagcaggtctatctccgttgacctcgcagagagtaagcgcttgggttgtctgctgctctcctctttccagttctcgatccagaagctcgagccctttttacgggacaccaaagggttttccctggaatcattccgcgcaaaggccagctcgctgtccgaggagctgaaacactttgccgacggattggaaactgacggaacactacagaagtgcttcgaggacagcaacggaaaggcttccgacttctctctcgaggccagtgtggccgagatgaaggaatatatcacaaagttttctctggagaggcagacttgggaccagctgcttctgcactaccagcaggaagcgaaagagatcctgtctagggggagcaccgaggcaaaaatcacagaggtgaaagtggaaccgatgacttaccttggaagcagccagaacgaggtgttgaataccaagcctgactatcaaaaaattctgcagaaccagtcaaaggtgtttgactgcatggaacttgtgatggatgagctccaggggtccgtaaagcagctacaggccttcatggatgagtcaactcaatgttttcagaaggtgtcagtgcagcttggaaaacgtagcatgcaacagttggatccgagccccgcacgaaagttactgaaactgcagttgcagaaccctccagcaattcacgggtccgggagtggttcatgtcagtag

SEQ ID NO: 28960 - DNA, 1071 bp, synthetic construct
  source 1..1071: mol_type = other DNA; note = Synthetic coding sequence
atgaccagtgttacccgctctgagatcatcgatgaaaagggcccagtgatgtcgaagacccacgaccaccagctggaatctagtctctctcctgtggaggtattcgccaaaacctcagcttctttggagatgaaccagggagtgagtgaagagcgcatccaccttggctctagccccaaaaaaggcggtaactgcgacttatcccatcaggagcggctgcagagcaagagtctgcacctgtctcctcaggagcaatcagccagttaccaggaccggaggcagtcctggagaagggcatcaatgaaagaaaccaacaggcggaagtctctccatccgatccatcagggaattaccgagctgtccaggtcaatatcagtcgatctggccgaatcaaagcggctcggttgcttactactatccagctttcaattctctattcagaaactggagccattcctgagggacacaaaaggttttagcctggagtcctttcgcgctaaagccagtagcctcagtgaagagctgaaacacttcgcagatgggttggagactgatggcactctgcagaaatgctttgaggacagtaatggcaaggcctccgatttttctctagaagcctcagtggctgagatgaaggagtacataaccaagttttctctggaacgacaaacatgggaccaactgctgctgcattatcaacaggaggcgaaggaaattctttctcggggatctaccgaggcgaaaatcaccgaggtaaaggttgaaccaatgacctacctcggttcctctcagaatgaggtcctaaacacaaagccagactatcagaagattttgcagaaccagtccaaagtctttgactgcatggagctggtgatggacgagcttcaggggagtgtgaagcagttgcaggcattcatggacgaatctacacagtgtttccagaaagtgtctgtgcagctaggaaagcggtcaatgcaacagctcgatccatctcctgccaggaagctgctgaagctgcagttgcaaaacccccctgccattcacggatctggctctggttcatgccaatag

SEQ ID NO: 28961 - DNA, 1617 bp, synthetic construct
  source 1..1617: mol_type = other DNA; note = Synthetic coding sequence
atggccgctgctgcctcagtcacaggacgtgtcacctgggctgcttcaccgatgcgtagtttaggccttggccgtcgcctgagtctgcctggaccccgactggacgcggtgactgcagccgtaaacccatctctgtcggatcacggaaacggcctaggccgaggcaccaggggctctggttgctctgggggatctctggttgctgactgggggggtggcgcagccgcagctgccgctgtggccctggctctggcgccagccctgtcaactatgagacgtgggtcttccgagagcgagctcgcagcaagatgggaggctgaagctgtcgccgctgctaaagcagcggctaaggccgaagcagaggctaccgccgagactgtagcagagcaggtgagagtggatgcaggagctgcgggagagccagagtgcaaagccggagaagaacagccgaaggtactggcccctgctcccgcacaacccagtgcagccgaagaggggaatactcaggtcctgcagaggccgccaccaacactcccgccaagcaagccaaaacctgttcaggggctctgcccccatggcaagcccagagataaggggcgtagctgtaagcgttccagcggccatgggtccggcgagaatggatcccaaaggccggtgaccgtggactcgagcaaggctcggacgtcgctcgatgccttaaagatctcaataaggcaactcaaatggaaggaattccccttcggcaggcggctgccctgtgatatctattggcacggggtctcatttcacgacaacgacatcttctctggacaggtaaataaatttcccggaatgaccgagatggtcaggaagatcaccctctcccgggcagtgcgaaccatgcagaacctgtttccagaggaatacaacttttatcccagatcatggattctccctgatgagttccagttgtttgttgcccaggtgcagatggttaaggatgacgaccccagctggaagcccaccttcatcgtaaagcctgacggcggatgccagggtgacggcatctatctcattaaagacccgagtgatattcgccttgccggtacgctacagtcccggccagcagtggttcaagaatacatctgtaaaccgctgttgattgacaaacttaagttcgatatccgcctatatgtcctgttgaaatcactggatccactcgagatctacattgccaaagacgggctttccaggttttgcacagaaccgtaccaggagcctacacctaaaaacctccaccgcatattcatgcacctgacaaattatagtcttaacattcacagcggtaactttattcactcagacagtgcctctacggggtctaaaagaacattttcatccattctgtgtcgactatcgtccaaaggcgtcgacatcaagaaagtctggtcagacattatctcagttgtaattaagactgtaatcgctctgactccggaactgaaggtgttctatcagtccgacatcccaacaggacgcccaggaccaacttgctttcaggtaactattgcgtcatctcagccagcattccctgctctgacaggactcaaacgtgcattgtggctgcgggtgggatag

SEQ ID NO: 28962 - DNA, 1356 bp, synthetic construct
  source 1..1356: mol_type = other DNA; note = Synthetic coding sequence
atgacagagatggtgcggaagattacgctgtcgcgggctgtccggaccatgcagaacctttttcccgaggagtatatttgtaagccactgcttattgacaagttgaaatttgatattagactctatgttttgctgaaatccttagacccgttggagatttatattgctaaggacggcctatctcggttttgcaccgaaccgtaccaggaacccacccccaaaaacctgcatcggatatttatgcaccttacgaattacagcctgaacattcattctggtaatttcattcacagcgattccgccagcaccggttccaagcgcacctttagttctatcctctgtcggcttagctctaagggggttgatattaaaaaggtctggagcgacattatctcagtggtgataaagactgtgattgcgctgaccccggagcttaaagtcttctatcagtctgatattccaaccgggaggcctggccctacctgcttccagatcctggggttcgacatactgctgatgaagaacttgaaacctattcttttggaggttaatgccaacccatccatgagaatcgaacatgaacatgaattgagtcctggtgtttttgagaatgtaccctcccttgtggacgaggaggttaaagttgcagttatccgcgatacacttcggctgatggaccctctgaagaaaaaaagagaaaatcagtcccaacagcttgagaaaccttttgctggaaaagaggacgctttagacggtgagcttacatccgccccagattgtaatgcgaatccggaggcccacttgccttccatttgtttaaaacaggtgttccccaagtacgctaaacaatttaattacctcagactggtggatcgcatggcaaacctgtttattaggttcctcggcattaagggaaccatgaagctcggacccactgggttccggactttcattcgcagttgcaagctcagctcatcttctcttagtatggccgctgtcgacatcctgtacatagacatcaccagacgctggaattctatgacgttggaccagagggattctggaatgtgcctgcaagcctttgttgaagcattcttctttttggctcagcgaaagttcaagatgttgccactgcacgagcaggtggcctccttgatcgatctgtgtgaatatcacttgtcgctcctggacgaaaagagattggtgtgtggccgaggggttccatcgggaggcaggccacctcaccgaggacccccacaggaaccatctccgtcagcccagccggcaggcgacaacccccctccccgaacatcttgtgccaacaaactgtctcatccaagacatacactgtcatag

SEQ ID NO: 28963 - DNA, 1644 bp, synthetic construct
  source 1..1644: mol_type = other DNA; note = Synthetic coding sequence
atgaaagtggtgaagtcggctgagcactataccgaaaccgcattggacgaaatccgactgctgaagagcgtccggaattccgatccaaatgaccctaatagggagatggtggtgcagctgctcgacgacttcaaaatttcaggcgtgaatgggacccacatttgcatggtgttcgaggtgcttgggcaccacctcctgaaatggattatcaagtctaattaccaggggttgccactgccctgtgtgaagaaaattatccagcaagttctgcagggattggactatttgcataccaaatgcagaattatccacaccgatataaaaccagagaacattctgctttctgtgaacgaacagtacattcggcgtttggcagctgaagccaccgagtggcagcgctccggagccccacctccgagtggaagcgctgtgtccaccgcccctcagcctaagccagccgataagatgagtaagaataagaagaaaaagctaaaaaaaaaacagaagcgacaggcagagttgctggagaagagaatgcaggagatcgaagagatggagaaggagtctggccctggacagaagagacctaataagcaagaagagtcggaatcccctgtggaacggcctttgaaagaaaaccccccaaacaagatgacccaagagaaattagaagagagttcgacgataggacaggatcagacattaatggaacgggacactgagggcggagccgctgagattaactgcaatggagtgatcgaggtcataaattatacccagaacagcaataatgaaacactacgccacaaggaggaccttcacaacgccaatgactgcgatgtccaaaatctcaatcaggaatcatcctttctgagctctcagaatggcgattcgagtacttcccaagagactgactcctgcactcctatcaccagcgaagtctctgatacaatggtttgccagtctagcagtactgtaggacagtccttctctgaacagcacatctcccagctgcaggagagcattagggcagagatcccgtgcgaagacgaacaggaacaagaacataacggccctcttgataacaaagggaagagtaccgcaggaaacttcctcgtcaacccacttgaaccgaagaacgccgagaagcttaaggtcaaaatagctgacttaggcaacgcatgctggcataagcactttacggaagacatccagacgcggcaatatagatctctggaggtgcttatcggcagcggctacaacactccagctgacatttggtctaccgcatgcatggcttttgagctggccaccggcgactacctcttcgagccccactccggcgaagagtatacgcgggacgaagatcacatcgtgcatataatcgagctaatcggcaggattccccgtagattctccctctctggcaagtactcacaagacttttttagccataggggtgacctgaaacatatcacaaaactgaaaccctgggggctctttgaagtgctggtggagaaatatgagtggtctcaggaggaggctgccggtttcaccgatttcctgctgcccatgctggaactgatcccagagaagagggcgaccgcggctgaatgtctgaggcatccatggctcaattcctag

SEQ ID NO: 28964 - DNA, 1968 bp, synthetic construct
  source 1..1968: mol_type = other DNA; note = Synthetic coding sequence
atggaaaggaaagtgctagcattgcaagctcgcaagaagcgtaccaaagccaagaaggataaggctcaaagaaaaagtgaaactcagcacagggggagtgcgcctcatagcgaatcggacctgccggagcaagaggaggagatccttggttccgatgacgatgagcaggaggacccgaatgactattgcaagggtgggtaccatttagtgaaaatcggagaccttttcaacggccgttaccacgtgatccggaaactgggctggggacacttttctaccgtctggctctcttgggatattcaaggaaaaaagttcgtcgccatgaaggtggttaagagcgcagagcattacacagaaactgcccttgatgaaattagactactgaaatctgtgcggaattccgatcctaatgaccccaaccgggaaatggtcgtacagctccttgacgattttaagatttccggagtgaacggcacccacatttgtatggtgttcgaggttttaggacaccaccttctgaagtggatcattaaatccaattatcaggggctgccactgccttgcgtgaagaagataatccagcaggtattgcaggggctagattaccttcatacaaagtgtcgtatcatacataccgatattaagcccgagaacatcctcctgtccgtcaacgaacagtacatccggcgtctcgcagcagaggctactgaatggcagaggagcggcgctccacccccttctggctctgccgtgtctacagccccacagcctaagcctgccgacaagatgtcaaagaataaaaagaaaaagcttaaaaaaaagcagaaacggcaggctgagctgttggaaaaacgcatgcaggaaatcgaagagatggagaaggaatcaggcccagggcaaaaacggccaaacaaacaagaggaatcagaatcccccgtggagagaccactcaaggagaatcctccaaacaaaatgacccaagagaaattggaagagagttctaccatcgggcaggatcagaccttgatggagcgagatactgaaggcggtgctgctgaaatcaattgcaatggtgtcattgaggtgatcaattacacacagaatagcaacaacgagaccttgaggcataaagaggatttacataatgcaaatgattgtgacgtccaaaatctgaaccaggaatcttccttcttatcatctcagaatggcgactcttcaacttcacaagaaaccgattcttgtacccccattacctccgaagtgagcgatacaatggtctgtcagagctcctccacagtcgggcagagtttctccgagcaacatatttcacagctgcaggaaagcatcagagcagagattccgtgtgaggacgagcaggaacaggagcacaatggcccactggacaataagggaaagtctacagccggaaatttcctggtcaatcccctcgagccgaagaatgccgaaaaactgaaggtgaaaattgccgacctggggaatgcatgctgggtgcacaaacactttactgaagacatccaaacacgtcagtatcgcagccttgaggtgttgattggctccggatataacacgcccgcagacatttggagtaccgcctgcatggcgtttgagcttgctacgggagattacctgtttgagcctcactccggcgaagagtacactagagacgaggaccacatcgcactaatcatcgagctgctcggcaaagtgccaagaaagctcattgttgcgggtaagtactccaaagagtttttcacaaaaaaaggcgatctcaaacacattaccaagctcaagccatgggggctgtttgaggttttagtggaaaaatatgaatggagccaggaggaagcagctggctttactgactttttgttacccatgctggagcttattcccgaaaagagagctacagccgctgagtgtttacggcatccttggctgaatagctag

SEQ ID NO: 28965 - DNA, 864 bp, synthetic construct
  source 1..864: mol_type = other DNA; note = Synthetic coding sequence
atggcagcatctctctggatgggtgacctggaaccatacatggacgaaaactttatatcccgcgcatttgccacaatgggagagaccgtgatgtctgtgaagattatccgaaacaggctaaccggaattccggcaggctattgcttcgtggagtttgcggacctggcaacagcggaaaaatgcctgcacaagatcaacggtaagcctctgcccggtgccactccagctaagagatttaaattgaattatgctacatacggaaaacaacctgacaattccccagaatattctctgtttgtgggcgatctgacccctgacgtcgatgatggtatgctgtacgaatttttcgttaaagtctacccaagttgccgtgggggtaaggtggtgctggatcagaccggcgtgagcaaaggctatggatttgtgaagttcacagatgagctggagcagaagcgtgctttaactgagtgccagggagccgtggggctcgggagtaagcctgtgcgcctaagcgttgctatcccaaaggcctctcgcgtgaagcctgttgagtatagtcaaatgtactcttatagctataatcaatattatcaacagtatcagaattattatgcgcagtggggatatgatcagaacactgggagttattcatattcctacccccagtatggctatactcagtctaccatgcagacctacgaggaggtcggggatgatgcactggaggacccaatgccccagcttgatgtcaccgaggctaacaaggaattcatggagcagagtgaggaactctacgacgctctgatggactgtcactggcaaccgcttgataccgtttctagcgaaattcctgccatgatgtag

SEQ ID NO: 28966 - DNA, 438 bp, synthetic construct
  source 1..438: mol_type = other DNA; note = Synthetic coding sequence
atggccgagagaaacgaagatcaccatctgcaggtactgaaggaaagcgaagtgttgctccaagcgaagcgcgcagagttggagaaattgaagtcacaggtgacaagtcagcagcaagaaatggcagtgctggacagacagcttggtcacaaaaaggaagagttgcacctgctgcaggggtcaatggtgcaggccaaagccgatctgcaggaggctctccggctgggcgaaaccgaggtgacagaaaagtgcaaccatatccgcgaggtgaagagcctcctagaggagctctctttccagaagggagagttgaatgtccagatctcggaaaggaaaacccagcttacactgataaagcaggaaattgagaaagaggaggaaaatctgcaggtggttctgcggcagatgagtaagcataagaccgccttcctgcaatag

SEQ ID NO: 28967 - DNA, 3024 bp, synthetic construct
  source 1..3024: mol_type = other DNA; note = Synthetic coding sequence
atgcagcatcttaagtcaaagaagcgagaagaaagatggatgagagcaagcaaaagacaaagcgaaaaggaaatggaggagctgcaccataatatcgacgacctgctgcaggagaaaaagtccttggaatgcgaggttgaggagctacacagaactgtgcagaagagacagcagcagaaggactttatagacggcaacgtggagtcactgatgacagagctcgagattgaaaagtccttgaagcaccacgaggacattgttgacgagatcgaatgcatcgagaagaccctattaaagagacggtctgagctcagagaggcagacagactcctggcagaggctgagtcagaactatcttgcaccaaggagaaggtgtgcttattggtggtctggggtgtttcttccgtctggactaagaatgcagtcgagaagtttacagatgccaagcgttcccttctacagacagaaagtgacgccgaagagctggagaggagagcgcaggagaccgcagtcaacttagttaaagccgaccaacaattgagaagcctgcaggctgatgcaaaggatttggagcagcataagataaagcaggaggagatcctgaaagagataaataaaattgtggctgccaaggactcggatttccagtgcctttccaagaaaaaggaaaaactgacagaggaactccagaagttacaaaaagacattgagatggccgaacgaaacgaagatcaccacctgcaagtcctgaaggaaagtgaggtcctactccaggccaagagggccgaacttgaaaaactgaagtcacaggtgacaagtcagcagcaggagatggccgtgcttgacagacagttgggtcacaaaaaggaggagcttcacctattgcaaggctcaatggtgcaggccaaagccgacctgcaggaggctttaagactgggagaaacagaagtcacggaaaaatgcaaccatatccgtgaagtgaaaagcttgctcgaagagttgagtttccagaagggggaactgaacgtccagatatcggaacgcaaaacgcagctgactctgatcaagcaagagatcgagaaagaagaggagaatttgcaggtggtcctccggcaaatgtctaagcacaagacagagcttaaaaacatattagatatgttgcagctcgagaaccacgaactgcagggtcttaagttgcagcacgaccagagggtgagcgaacttgaaaaaacccaggtcgctgtgcttgaggaaaagctcgaactggagaacttgcagcagatcagccagcagcaaaaaggcgaaattgaatggcagaagcagcttcttgagcgggacaaacgtgagatcgaacgcatgactgcagagtctagggctcttcagtcttgcgtcgaatgcctgtcaaaagaaaaggaagatctgcaggagaaatgtgacatctgggaaaaaaagctggcacagactaagagggtgcttgctgcagccgaggaaaattctaaaatggaacaatctaatctggagaaacttgagctgaacgttcggaagcttcagcaggagttggatcagctcaatagagataaactctcactgcacaatgatattagcgctatgcaacagcaactgcaagaaaagcgtgaggcagtgaactccctccaggaagagcttgccaatgttcaggatcatctgaacctggccaagcaggatctcctccatacaacgaagcatcaggacgtgcttctctcagagcagaccagattgcaaaaggatatttcagaatgggccaaccgctttgaggactgtcagaaagaggaagaaacaaaacaacagcagcttcaggttcttcaaaacgagattgaggaaaacaagttaaaactcgtccagcaggaaatgatgttccaacgcttgcagaaggagcgcgagtcggaggagtctaaactggagacatcgaaagtcactttaaaggagcaacagcatcagctggagaaagaattaacggatcagaaatccaagctggatcaggttctcagtaaggtcctggctgccgaggaacgggtccgaacgctgcaagaggaggagcggtggtgcgaatctcttgagaagactctttcacagacaaaacgccagctgagcgagagggagcagcagctggtagagaagtctggggagttgttggccctacaaaaggaagcagattctatgagggccgattttagtcttctaaggaatcagtttctgaccgaaagaaaaaaggcggagaagcaagtggcgagtctcaaggaggctctaaaaatacagaggtctcagctggaaaagaatcttctcgagcagaagcaagagaactcgtgtatccagaaagagatggcgaccattgagttggtggctcaagataaccacgaacgcgctcgccgactcatgaaggaactgaaccaaatgcagtacgaatatactgagttgaagaaacagatggcaaaccaaaaagatctggaacggaggcagatggagatttcagacgccatgaggaccctgaagtctgaagtcaaagacgaaattagaactagcctcaaaaatctgaaccagttcttgcctgaactgcctgccgacctggaggcaattctcgagagaaatgaaaatctggaaggtgagctagaatctcttaaagagaacctgccattcacaatgaacgagggcccatttgaggagaagcttaacttctctcaggtccatatcatggatgaacactggcgaggggaggcactgagagagaagcttaggcatagggaggatcggcttaaggcccaactgcgccactgtatgtctaaacaggcggaggttcttatcaagggtaaacggcagactgagggtaccttgcatagtctgcgcagacaagtggatgctctcggcgagctggtgacgtctacaagcgccgacagtgccagcagcccctctctgagccagttggagtccagtcttacagaagactcacagctgggtcagaaccaggagaagaacgcctctgcaaggtag

SEQ ID NO: 28968 - DNA, 2985 bp, synthetic construct
  source 1..2985: mol_type = other DNA; note = Synthetic coding sequence
atgaaggcccagaaatccgggaaggagcaacagctcgacatcatgaacaaacagtatcagcagctcgagagtcgcctggatgagattttatctcgtattgctaaggagaccgaagagatcaaggatctcgaggagcagttgaccgagggacaaatcgccgcaaacgaggcactcaaaaaagatctggagggcgtgattagtggtctgcaggaatatctcgggactattaaaggacaggctacccaggcccaaaatgagtgtcgtaagctccgcgacgagaaagagacactcttgcagcgcttaacagaggtagagcaggagagagaccagctggagatcgtcgcaatggacgctgagaacatgagaaaagagttggccgagctcgagtccgctcttcaggaacagcacgaggtgaacgcatcattgcagcagacccagggtgacctgtctgcatacgaggccgagctcgaggcccgtctgaatctgagggacgccgaggctaatcagctgaaggaggagttggagaaagtgactcgattaacccagttggagcagagcgcgttgcaggcagaactggaaaaggaacgccaggcactgaagaacgccctgggtaaggcacagttctcagaggaaaaggagcaagaaaactccgaattgcacgccaagttgaagcacctgcaggacgataacaatctgttaaagcagcagcttaaggattttcagaatcacctaaaccacgtggtagatggtctggtccgcccagaggaggtcgctgctcgagtggatgaactgcggagaaaactgaagttaggaacaggagagatgaacatccacagcccctccgatgtcttggggaaatcgctggccgaccttcaaaagcagtttagtgagatactggcacgtagtaaatgggaacgagacgaggcacaggtgcgagagcgtaagctccaggaggagatggcgctgcaacaggaaaagttagccaccgggcaggaagaatttcgtcaggcctgtgaaagagctctggaagcacggatgaatttcgataaaaggcagcacgaggcgagaatccagcaaatggagaacgagatccactatctccaagagaacttgaagagcatggaagaaatccagggcctcacagaccttcagctccaggaggccgacgaggaaaaggaaaggatcctggcacaattacgcgaactcgaaaaaaaaaagaagctggaggacgctaagtcccaggagcaggtgtttggacttgacaaggagctgaagaaattgaaaaaggctgttgccacatccgataaactggccaccgcagagcttacgatcgctaaagatcagctgaaatcgctccacggaaccgttatgaagataaaccaggaacgggcagaagaattgcaagaggcagaacgctttagcaggaaggctgcgcaggctgcacgggacctaacacgcgctgaggcggagatcgaactgctccagaatctgctgagacagaaaggggagcagttccggcttgagatggagaagaccggagtgggaaccggggcaaacagtcaagttcttgagattgaaaaactaaacgaaaccatggagagacagcggaccgagattgctcgtctgcagaatgtcttagaccttacaggcagcgataacaagggaggctttgagaatgtgcttgaagaaatcgcggagctgcgcagggaagtctcttatcagaacgactacattagctcaatggccgacccttttaaacggaggggttactggtattttatgccaccgccacctagctctaaggtaagttcgcactcctcacaggccacaaaagactctggggtggggctgaaatattcagcatcaacccctgtgcgaaaacccaggccaggtcaacaggacggaaaggagggttcccagcctcccccagccagcggatattgggtatactcacccatccgaagcgggttacacaaactgttcccctcaagagacgccgatagcggaggggattcacaggaggagtctgagctcgacgatcaagaagagccccctttcgtgcctccccctggctacatgatgtacacggtcctccccgatgggtcgccagtgcctcagggcatggcactgtatgcgcctcccccacccctgcccaacaattctcgtcccctcacaccaggtactgttgtatacggacctcccccagccggagccccaatggtgtacggcccaccacccccaaactttagcatcccatttataccaatgggagtcttgcactgtaacgtgccagaacatcacaacctggagaacgaggtttcccgacttgaggacattatgcagcatctcaagtccaagaagagggaggaaaggtggatgcgggcttccaaacggcagagtgagaaggagatggaggagctccaccataatatcgacgatcttctccaggagaagaaaagtttggaatgcgaagttgaggagctccatcgcacagtccagaagcgacagcagcagaaggattttatcgacggcaatgttgagagtcttatgaccgagctggagatcgagaaaagtctaaaacatcacgaggatatcgttgacgaaatcgagtgcattgaaaagacactcctgaaaagacgctctgagctgagggaggccgataggctgctagctgaggctgaatctgaactgagttgcaccaaagaaaaaacaaaaaacgctgtcgagaaattcacagatgcaaagcgatccttgctacagacggagtccgacgccgaagagctggagagaagggctcaagaaaccgccgtaaacctcgtgaaagcggaccagcagctgcggtcgctgcaggccgacgcaaaagacttggaacagcataagatcaagcaggaagaaattctcaaagaaatcaacaagattgtggcagccaaagatagtgactttcagtgtctcagcaagaagaaggaaaagctcactgaggagtag

SEQ ID NO: 28969 - DNA, 5321 bp, synthetic construct
  source 1..5321: mol_type = other DNA; note = Synthetic coding sequence
atgaaagctcagaaatcggggaaggagcagcagctggatattatgaacaagcagtatcagcagcttgaaagcaggctcgatgaaattctgagccggatcgctaaagaaacagaggaaataaaagacctggaggagcagctgacagaaggacagattgccgcaaacgaggcactaaaaaaggacctggagggcgtgatctccggcctgcaggagtaccttggtactatcaaagggcaagcaacgcaggcacagaatgaatgtcgcaagctcagggatgaaaaagagaccttactgcagagactgacagaggtagagcaagagcgagaccaactggaaattgttgccatggacgccgagaacatgcggaaagagttggctgagctggagtctgcgcttcaagaacagcatgaggttaacgcctctttgcagcagactcagggggacttatctgcatatgaagctgaactggaggcgaggcttaacctacgggacgccgaagccaaccaactgaaggaggaactggaaaaggtcacccggctcacgcaactcgagcagtccgctctgcaggccgagctggaaaaggagagacaggcccttaagaacgcgctagggaaggctcagtttagcgaagagaaggagcaagagaacagtgaactgcacgccaagctgaagcacctgcaggacgacaacaaccttctcaaacaacagctaaaagattttcagaaccacctgaaccacgtggtggatgggctggtcaggcctgaagaggtcgctgcgagggtggatgaactgagaagaaaactgaagcttggcaccggcgagatgaacatccatagtccttccgacgtgttgggcaagtcactggcagatctgcagaaacaattctccgaaatcttggccaggtccaagtgggaaagagatgaggcacaagttcgggagagaaagctacaggaggagatggctctccaacaagaaaagctagcgacaggtcaggaggagttccgccaagcttgcgaacgtgctttggaagcgaggatgaacttcgataagagacagcatgaggccagaattcagcagatggaaaacgagatccactacttacaagagaacctcaaaagcatggaggagattcagggtctgaccgatctgcaactgcaagaagccgatgaggagaaggaaaggattctggcccagcttcgagaactggagaagaagaaaaagctggaagacgccaagagtcaggaacaggtattcggacttgacaaagagctcaagaagctaaaaaaggccgttgctacatcggacaaattggctacagctgagttgacaatcgcaaaagatcagctcaagtcgcttcatgggaccgtgatgaaaattaaccaggagcgggctgaggaactccaagaggccgaaagattttcccggaaggcggcacaggccgctagggatctgaccagagcagaagcggaaatcgagctactgcagaatttgctgagacagaaaggagaacagtttcgcctcgagatggagaagactggtgtgggcacaggtgctaactctcaggtgctcgaaatcgagaagctcaacgagacgatggagcggcagcgaacagagattgcccgtcttcagaatgtcctggacctcaccgggagcgacaataaaggtgggttcgagaacgtactggaagagatcgccgagttacgtcgggaggtctcctatcagaacgattacatttcaagtatggccgaccccttcaagagaagaggctactggtatttcatgccacctcctccgtcaagcaaagtgtcatcccatagctctcaggccaccaaggactctggggtcggactgaagtatagtgcttcaacccccgtgagaaaacccagaccgggtcagcaggatggaaaagagggctctcaacctccccctgcttcaggttattgggtgtattctcccatccgcagcggactgcacaaactgtttccaagcagagacgcagattctgggggagactcccaagaagagagcgaactggacgatcaggaagagccaccgttcgtccccccacccggatacatgatgtacacggtgctccctgatggcagccctgtaccacaggggatggccctgtatgctccgccaccaccccttccaaacaattcccggcctctcacccctggcacagtagtctacggacccccacccgctggcgctccaatggtctacggccctcctcctccaaattttagcatcccattcattccgatgggcgttctgcactgcaatgtgcccgagcaccacaatctggaaaatgaggtgtccagactggaagatatcatgcagcacctgaagagcaagaagagggaagagaggtggatgcgagcctccaaacgccaatccgagaaggaaatggaagagttgcaccataacatagacgatctcttacaggaaaagaagtctctagaatgcgaggtcgaagaattgcacagaacggtacagaagagacagcagcagaaagactttatagatgggaatgtggagtcactcatgaccgagcttgagatcgagaagagcctgaagcaccatgaagacatcgttgatgagatcgaatgtatagagaaaactctgctcaaacgcaggagtgaactgcgagaagctgatcgcctgttggctgaggccgaatccgagctgtcatgcactaaggaaaaaaccaagaacgctgtggaaaagttcaccgatgcaaagagaagtttgctccagactgagtctgatgccgaagaactggaacgacgggcacaagagacagctgtaaacctggtaaaagctgatcaacaactcagatcattacaggctgacgctaaggacctggaacagcataagatcaagcaagaagagatcctaaaagaaataaacaagatcgtggctgccaaggactcggattttcaatgtttgtccaaaaagaaagagaaactgactgaggaactgcagaagcttcaaaaagacattgaaatggctgagcgaaacgaggaccatcacctgcaggtactgaaagagagtgaagtgttactgcaggccaaacgggctgagctcgaaaagcttaagtcccaggttacttcacagcagcaggaaatggctgtgctggatcggcagctgggtcacaagaaggaagaactgcacttgctgcaaggctctatggtgcaagcaaaggccgatctccaggaggccctgcgcctcggcgaaacggaggtgaccgagaagtgtaaccacatccgggaagtgaagtctttgctcgaagagctctctttccagaaaggcgagctgaacgtgcagatttccgagcgcaagacccaactaaccctcattaagcaggagatcgagaaggaggaggagaatctgcaggtggtcctgcgacaaatgtcaaaacacaagaccgaattgaagaacatccttgacatgctgcagctggagaaccacgagttacaaggactcaagctgcagcacgaccagagagtttcagaactggagaaaacccaggttgctgtccttgaggagaagctggagctggaaaacctccagcagatctcccaacagcagaaaggcgaaattgagtggcaaaaacagctgttggagcgagacaaacgtgagattgagagaatgactgccgaaagccgcgcacttcaaagctgcgtagagtgcctctccaaggagaaggaggacctgcaggaaaagtgcgatatttgggaaaaaaaactggcccagaccaagcgtgtcctagccgcagctgaagagaactcaaagatggagcagtctaatctggagaaactcgaactgaatgttcggaagttacagcaggaacttgaccagctgaaccgggataaattgtcactgcacaacgacatttctgcgatgcagcagcagctgcaggagaagcgagaggctgtaaattcgctccaagaggagctggcaaatgtccaggatcacctgaacctggctaagcaggatctgctacatacaacaaaacaccaagatgtgctgctgagcgagcagacgcgcctccagaaggatatttcggagtgggcaaacaggtttgaggactgtcagaaagaggaggagacaaagcagcagcaattgcaggtcctgcagaacgaaatcgaagagaataaattgaaattggtacagcaggagatgatgttccagcgtctacagaaagaaagagaatccgaggaatcgaagctggaaacaagcaaggtgaccctgaaagaacagcaacatcagctggagaaggaactcacagaccaaaaatccaaactggatcaggtactttccaaggtgttagccgcagaggaaagggtgcgtacgcttcaggaggaggaaagatggtgcgagagtttggaaaaaacccttagtcagactaagcgtcaacttagtgaacgggaacagcaattggtcgagaagtcaggtgagctgctggctctgcagaaggaagccgattcaatgagggcagatttttcactcttaagaaaccagttcctcacagaaaggaaaaaagccgagaagcaagtcgcctccctaaaggaagctctgaaaatccagcgctctcagctggaaaagaacttgcttgagcagaagcaggagaattcatgtatccagaaggagatggccacaatcgaattggtagcacaggacaaccatgagagggctaggcggcttatgaaggagctaaatcagatgcaatatgaatataccgaattgaaaaagcagatggctaaccagaaagatctggagcgcaggcagatggagatctctgacgctatgagaacacttaagtctgaggtcaaggatgagatccggactagcttgaagaacctgaaccaattccttcctgagctgcccgcagacctggaggccatcttagaaagaaatgaaaatcttgaaggcgagcttgagagcctcaaagaaaatctcccctttacgatgaacgaggggccattcgaggaaaaactgaacttttcccaggttcatatcatggatgagcattggcggggagaggccctgcgcgaaaaactacggcacagagaggatcgccttaaagcacagttaaggcattgcatgtcgaagcaggcagaagtcctgataaaagggaaacgacagacagaaggcacgctgcacagcctccgtagacaggtggacgcgctaggcgaactcgtgacgtctacctcagcagattctgccagcagcccatccttgtctcagctcgagagctctcttacggaggattcccagctgggacagaaccaggaaaaaaacgcatcagcaaggta

SEQ ID NO: 28970 - DNA, 2487 bp, synthetic construct
  source 1..2487: mol_type = other DNA; note = Synthetic coding sequence
atggaaaaacagaaacaggagatcgccggaaagcagaaggagataaaagacctgcagatcgccatcgattcattggacagcaaagacccaaaacactctcatatgaaggctcaaaagtcgggaaaggagcagcaactcgacataatgaataagcagtaccagcagttagagtcccgcctggatgaaattttgagtcgaatagctaaagagaccgaagaaatcaaagacttagaagagcagcttaccgaaggacaaatcgcagctaatgaagcacttaaaaaagacctcgaaggtgtcatttctggcctgcaggagtatctgggaaccataaagggacaggccacacaggcccaaaatgagtgcagaaaactccgggatgagaaggagacgttactccagagactgactgaggtggaacaggagagagaccaattagaaatcgtagccatggatgcagagaatatgcggaaggagcttgcagagctcgaaagtgctctccaagagcagcacgaggtgaacgcttcactccagcaaacccaaggagatttgtctgcatacgaagccgaactcgaggcaagactgaacctccgggacgccgaggcaaatcagttaaaagaggaacttgagaaggtgacacggttaacccagctggaacagtccgctctccaggcagagcttgagaaagagcgtcaggccctgaagaatgctcttggcaaagcccagttttcagaagaaaaagaacaggagaacagtgagctgcacgcaaaactgaagcatctgcaagatgacaataaccttctgaagcaacagctcaaggactttcagaaccacctcaaccacgtggtggatgggctagtaagacccgaggaggtcgccgctcgggtagatgagctgaggagaaagctgaagctggggacaggcgagatgaatatccactctccatcagatgtgctggggaagagcttggccgatctgcaaaagcagttctcagagatacttgcgcgttccaaatgggaaagggacgaggcgcaggtccgtgagcggaagctgcaggaagaaatggcgttgcagcaagagaagcttgccactggtcaggaggaatttagacaggcctgcgagcgcgctctggaggcgcgaatgaacttcgataagcggcagcacgaagcccgaattcaacagatggagaatgaaatacactatctgcaggagaatcttaagtcaatggaagagattcagggtctgactgatctgcagctccaagaggcagatgaagaaaaagaacgaatccttgctcagctgcgcgaactggagaagaagaaaaaactcgaagacgccaagtctcaggaacaggtcttcggtctcgacaaagaactgaaaaaattgaaaaaagccgtcgccacttcagataagctagccactgccgaacttacaattgcgaaggatcagttgaagagcttgcacggcactgttatgaagattaaccaagagagagcagaggaactgcaggaggctgagaggttctctcgaaaggctgcccaggccgcacgtgacctgacaagagcagaggccgagatagagctgttgcagaacctcctgcgccaaaagggggagcagtttcgactggaaatggagaagactggggtcggaaccggcgctaactcgcaggtgctggaaattgaaaagctgaatgagacaatggaaaggcaaagaactgagattgcgaggctgcagaacgtgttggacttgactggctctgacaataaagggggattcgagaacgtcctggaggagatcgcagaactgcgacgggaagtctcatatcaaaacgattacatatcttccatggcggatcccttcaagcgccgaggatactggtatttcatgcccccaccacccagctctaaggtgagctcacacagctcacaggcaactaaggattctggagttggtctgaagtatagcgctagcacaccggtcagaaagccaagacccggacaacaggacggcaaggaggggagtcaaccacctcctgccagcgggtactgggtttatagccccatacgaagtggactgcataagctgttcccctcgagggatgctgatagtggcggagattcacaagaggagagcgaactggacgatcaggaggaacctccgtttgtgccgccacctggatatatgatgtatacagttcttcccgacggaagtcctgttccccagggcatggcactttatgctccaccccctccgctccctaataatagcagacccctcactcccggtacagtggtgtacggaccacctcctgccggtgcgccaatggtttatggaccacctccacccaatttctctataccattcatcccgatgggcgtactccactgtaatgtgcccgagcaccacaacttagtgtctgggaaaacctacaactctctgtcgaccctcctgccttgggtgaccgacaaggtcatatatttgatgtcctag

SEQ ID NO: 28971 - DNA, 6977 bp, synthetic construct
  source 1..6977: mol_type = other DNA; note = Synthetic coding sequence
atgaagaaggggtcccagcagaaaatctttagcaaagcgaagattccttcaagctcccattcccctattccttcatctatgagtaacatgcggtctcgttcgttgtcaccactaatcggctccgagaccctaccattccactccgggggacagtggtgcgagcaggttgagattgcagacgaaaataacatgctccttgattaccaagatcacaaaggagcagattctcacgccggtgtgcgatatatcaccgaggcccttataaagaagcttacaaaacaggacaacttggcactgatcaaatccttgaacctctccttgagcaaagacgggggaaaaaagtttaaatatatagagaacctcgagaaatgcgtgaaactagaagtgctaaacctgtcatacaacctgattgggaagatcgaaaagctggataagctactcaagctacgcgaattaaatctgagttacaataaaatatcaaaaattgagggtattgagaatatgtgcaatttacagaagcttaatttggccggaaatgagatcgaacacatccccgtttggcttgggaaaaaactcaaatccctcagggtcctcaatctgaagggaaataagatttcatccctgcaagatatttctaagttgaagcccctgcaagacctgatctccctgattctggtcgaaaaccctgtagtgaccctaccccactacctccagttcacaatattccatctcagatcactggaaagcctcgaaggtcagccagtgaccacccaggaccgccaggaggctttcgagagattctccctcgaagaagtcgagagactggagcgggacctggaaaagaagatgatcgagaccgaggaattgaagtccaagcagacgcgctttttggaggagatcaaaaaccaagataaattgaataagtcactgaaagaggaggcgatgctccagaagcagtcctgcgaggagctcaagtccgacctgaatacaaagaacgaactgctcaaacagaagaccatagagctcacccgcgcatgccagaaacagtacgagctcgagcaagaactggccttttataagattgacgcaaaatttgagccgctgaactactaccccagcgaatacgccgagattgataaggccccagatgaatctccatacattggcaagagtaggtacaaaagaaatatgttcgccactgagagctacattatcgactccgcacaggctgtgcaaatcaagaaaatggaacccgacgaacaactgaggaatgatcatatgaacctaaggggccacactccactagacactcagttagaggacaaagagaagaagatctcggctgcgcagacaagattgagcgaactgcacgatgaaatcgaaaaagccgaacagcagattcttcgggcaaccgaggagttcaagcaactcgaggaggccatccagcttaagaaaatctcggaggcaggcaaagatctgctttacaagcagctctctggcagactgcagctcgtgaataagctccgccaagaggccctagacctcgaactccaaatggagaagcaaaagcaagaaatcgccggaaagcagaaggaaatcaaagatctccaaattgcaattgacagcctggattccaaggatccgaagcactcacatatgaaggcgcagaaaagcgggaaggagcaacaactcgatattatgaataagcagtatcagcagctggagtccagattagatgagatcttgtcccgcattgccaaagagactgaagaaattaaggaccttgaagaacagctaacagaaggacaaatcgcggcaaacgaggccctaaagaaagatctcgagggggtgatctcgggtctccaagaatacttggggactatcaaaggacaggcaacccaggcccagaacgagtgccggaaactcagagacgagaaggaaacgctcctgcagaggctgaccgaagtggaacaggagcgcgatcaactcgaaatcgtagccatggacgccgagaatatgaggaaggagcttgcagaactggaatccgctctgcaagaacaacacgaggtgaacgccagtctgcagcagacgcagggagatctgagcgcttacgaggccgagctggaggccagactgaacctgagagacgcagaggccaaccagctcaaggaagaattggaaaaagtcaccaggttaactcaactggagcagtcagcactgcaagcggaattagagaaggagcgacaagctctaaagaacgctctaggaaaggcccaatttagcgaggagaaggagcaggagaattctgagctgcacgctaagctgaagcacctccaagatgacaacaatctcctcaaacagcaactgaaggactttcagaaccatttgaatcacgtcgtcgatggcctcgtcagaccggaggaagttgcagcccgtgtggatgagctgaggcggaaactgaagcttggaaccggagagatgaacattcactctccctcagacgtgttgggcaagtcccttgccgatctacagaagcagtttagcgaaattttagctaggtccaagtgggaaagggatgaggcccaagtccgggagcgaaagctacaggaagagatggctctgcagcaggaaaaactcgccaccgggcaagaggaattccgtcaggcatgtgagcgtgcgttggaggctcgtatgaatttcgacaagaggcagcatgaggcaagaattcagcagatggagaacgaaatacactacctgcaagagaacttgaagagcatggaggagattcaggggctgactgacctacagctgcaggaggctgatgaagagaaggaacgaatcttagcgcaactgcgcgaactagaaaagaagaagaagctggaggatgccaaaagtcaggagcaagtgtttgggctggacaaagagctgaaaaaattgaagaaggcagtagccacctccgacaaactggccaccgccgaactcaccatcgccaaagaccagctgaagtcacttcacggcactgtaatgaagatcaatcaggagagagcagaagagctgcaagaggcagagcgttttagtaggaaggcggcacaggccgcaagggacctgaccagggcagaggccgagatcgagctgcttcagaacctgctgcgtcagaagggagagcagtttcggctggagatggagaagaccggggttgggacaggggcaaactcgcaggtgctggagatcgaaaagctgaacgagacgatggagaggcagcgtaccgagatcgccagattgcagaacgtgctggatctcacaggttccgacaataagggaggttttgagaatgtgcttgaagagatagcggaacttaggagagaagtctcataccaaaatgactacatctcatccatggctgatccctttaagagaaggggctactggtatttcatgcctccccctcctagctctaaggtgagctcacacagttcccaggccacaaaggattctggcgtgggtcttaaatacagtgcctccacccctgtaaggaagccgagacctggtcaacaagacggcaaagaaggttcacagccccctccggcttccgggtactgggtgtacagccctataaggagtgggctgcacaagctgttccccagtagagacgccgattccggaggcgactcccaggaggagtctgaattagacgaccaggaggaaccgcctttcgtacctccccctggttatatgatgtatactgtgctgcccgacggcagtcctgtcccccagggtatggccctatatgccccacctcccccactacccaataactcccggcctttgacacctggaactgtggtgtacggaccgccacccgcaggcgcacccatggtgtacgggccaccaccccctaacttcagcatcccctttatcccaatgggtgtgctgcactgcaatgtacccgaacatcataacctagaaaatgaggtctcccgactggaagatatcatgcaacatctcaagtctaaaaaacgagaagagcgatggatgagggcctccaaaagacagagtgaaaaggaaatggaggaactgcaccataatatcgacgatctcctgcaggagaagaaaagtctcgagtgtgaggtggaagagctccatagaaccgtgcagaaacgccagcaacaaaaggattttatcgacggaaatgtagaatctcttatgacagaactggagatcgaaaaatctcttaagcatcacgaggatatcgtggacgaaatcgagtgtatagaaaagacactgctgaagcggagatctgagttgcgagaagcggaccgtctgctcgccgaggctgagagcgagctgtcatgtaccaaggagaagacaaagaacgcggtggagaagttcaccgacgcaaaacgctctctgcttcaaactgagagcgatgccgaagagttagagagaagggctcaggagacagccgtcaacctcgtgaaggccgatcaacagcttaggagcttacaggccgacgctaaagatctcgagcagcacaaaattaagcaggaggaaattttgaaggaaataaacaagattgtggctgcgaaggattctgacttccagtgtctctctaaaaaaaaagaaaagctgactgaagagcttcagaagctccagaaggatatcgaaatggcagagcgcaatgaagaccatcatttgcaagtgctgaaagagtcggaggttctgctgcaggctaaacgcgctgaactggaaaagctgaagagtcaggtgacctcacagcagcaggagatggctgtgttggaccggcagcttggacacaaaaaagaggaactgcaccttttacaaggctcgatggtccaagctaaagccgacctgcaggaggccctgcgcctgggggaaacggaggtaacagaaaagtgcaatcacattagagaggtgaagtcccttttagaggagctctcattccagaaaggggagcttaatgtgcaaattagcgagcggaagactcagttgacattaatcaagcaagaaatcgagaaggaagaagaaaatttgcaggtagttcttaggcagatgagtaaacacaaaacagaattaaaaaacatcctagacatgttgcagcttgaaaaccacgaattacaagggctcaagcttcagcatgatcagcgcgtgagcgaactcgaaaagacccaggtggcggtcttagaggagaagctcgaactcgaaaacctgcaacagatttcccagcagcagaagggggagattgagtggcagaagcagttgttagagagagacaaacgcgaaattgagagaatgacagccgaaagccgcgcactgcagtcttgtgttgagtgtctgagcaaagagaaggaggatctgcaagagaagtgcgatatctgggaaaaaaagctggcacaaactaagagagtcctcgctgcggcagaggaaaattccaagatggagcagagcaatctagaaaaattggagctgaatgtgcgtaagctgcagcaggaactggaccaactgaatcgagataaactgtccttacataacgatatctcagccatgcaacaacagctccaagagaagagggaagcagttaatagcctgcaagaggagctcgccaacgttcaggaccacctcaatttagccaagcaggatctcctccatacaaccaagcaccaagatgttctgcttagcgaacagactagactgcagaaggacatcagtgaatgggctaataggttcgaggactgtcagaaggaagaggagactaagcagcagcagctgcaggtcctgcagaacgaaattgaagagaataagctaaagcttgtgcagcaggaaatgatgttccagcgactgcagaaggagagggaatccgaagaaagtaaactggaaaccagtaaagtgactttgaaagaacagcaacaccagttagagaaggagctgaccgatcaaaagtctaaactggaccaagtgttatctaaggtgctggccgcagaggagagagtgaggaccctccaggaggaagagaggtggtgcgagtctcttgaaaaaaccttaagccagaccaagcggcagctttccgagcgtgagcagcagttggtggaaaagtcaggtgaactgttagccctccagaaagaagccgactctatgagggcagatttttcccttctgagaaaccagttcctaactgaaagaaagaaggccgagaaacaggttgcaagcctcaaagaagctctgaaaatccagcggtcgcaactagagaagaacctcctcgaacagaaacaggaaaactcttgtatacaaaaggagatggctactattgaactggtagcacaggacaatcatgagagagctcgacggctgatgaaggagctgaatcagatgcagtatgaatacaccgagctaaagaaacagatggccaatcagaaggacctcgagagacgccaaatggagatttcggatgcaatgagaacactgaagtctgaagtcaaagacgaaatccgcacaagcctcaaaaacctgaaccagttcctccctgagctccccgcagacttggaggccattttggaaagaaatgaaaatctggagggtgagctggagtcgcttaaagaaaacctgcccttcactatgaacgaaggtcccttcgaggaaaaacttaacttttcccaggttcacatcatggacgagcactggcgcggtgaggctctgcgggagaagctgagacatagggaagaccggttgaaggctcagttaagacactgcatgagcaaacaggccgaagttcttattaaaggcaagaggcaaactgaaggaactttacactccttgcgtaggcaggttgacgcgctaggagaactggtcacttccacatccgcagattctgcttcttctccaagcctgtcacagcttgagtcatcactaacagaggattcacaactgggccagaatcaggagaaaaacgctagtgcgagata

SEQ ID NO: 28972 - DNA, 1359 bp, synthetic construct
  source 1..1359: mol_type = other DNA; note = Synthetic coding sequence
atgaagaagggttctcagcagaaaatcttttcaaaggcgaagataccttcctccagccactcccccatcccctcttctatgtctaacatgcgcagtcgatctttgtccccactgatcggctctgagactcttcccttccactcagggggacaatggtgcgagcaggttgaaattgccgatgagaacaacatgctgttagattatcaagatcacaagggagctgattcacacgctggcgtccgttatatcaccgaggcactgataaagaaactcacaaagcaagacaacctggcactcattaagagtctcaatctgtcattatccaaggatgggggaaagaaatttaagtatattgagaatctagagaaatgtgtgaagctcgaggtgctgaacctgtcatacaacttaatcggcaagatagaaaaactcgacaagctcctgaaactgagagagctgaacttgtcctataacaagattagcaagattgaagggatcgagaacatgtgtaatctccagaagttgaacttggccggaaacgaaattgagcatatacccgtatggcttggaaagaaattgaagtctctgagggttctgaatttgaagggcaataaaatcagcagtctccaggacatttcgaagttgaagccccttcaggacctgatttctctcatacttgtggagaaccctgtggtgactttacctcattacctgcagttcacaatttttcacctccggagccttgaatcactggagggacaacccgtgaccacacaggacaggcaagaagccttcgagcgcttctccctagaggaagtcgagcgtttggagcgggatttggagaagaaaatgattgagactgaggaactcaaatctaagcaaacaaggtttcttgaagagatcaagaaccaggataagctgaacaaatcactcaaggaggaggcaatgcttcaaaaacagagttgcgaagagttaaagagcgatttgaataccaagaatgaactgcttaagcagaaaactatcgaactgacacgagcctgtcaaaaacaatacgagctcgagcaggagctcgccttttacaaaatcgacgccaaatttgaaccattgaattactacccaagcgagtacgccgaaatcgacaaggccccagacgagtccccttacatcggtaagtcaaggtataagagaaacatgtttgccacagagagctacatcattgacagtgctcaagccgtccaaatcaaaaaaatggaacctgatgagcagctgaggaatgaccatatgaatctgagaggtcatacgccgctggacacgcagttggaggatcacaaactggactaccagaactgcatgatgaaatag

SEQ ID NO: 28973 - DNA, 1053 bp, synthetic construct
  source 1..1053: mol_type = other DNA; note = Synthetic coding sequence
atgtgctgcgattcagactttgttgccaggaacaagagccaagattcaggaatcgctgagatggaagagctaccagtgccccacaacattaagatctccaatattacctgcgattcctttaagatcagttgggaaatggatagtaagtccaaggataggataacacattacttcatcgatcttaataagaaagagaacaaaaactctaacaaatttaagcacaaggacgtccccaccaagctggtggctaaggccgtgcccctgccgatgacagtacgcggacattggttcctgtctccacgcacggaatatacagtcgctgtacagacagcaagcaagcaggtggacggggattatgttgtgtctgagtggtctgagatcatcgaattttgtacagcagattactccaaagtgcatttgactcagctgctggaaaaggcagaggtcattgctgggagaatgttgaaattttccgttttttatcgaaatcaacacaaggagtacttcgactatgtgcgagagcatcacgggaacgcaatgcagcccagtgtgaaagataacagcggcagccacggatctcccataagtggaaaactggagggcatattcttttcatgttcgacagagttcaataccgggaaaccacctcaggactcaccttacgggaggtatcgcttcgagattgctgccgaaaagctgtttaaccccaacactaatttgtacttcggcgatttctattgcatgtatacagcataccattacgtaatccttgttattgctccagtcggatctccaggcgacgaattttgcaagcagcggctgccccaactgaattccaaggataacaagttcttgacctgtaccgaggaggacggagtgctggtctaccatcacgcgcaggacgtcattctcgaggtgatctacacagatccggtggacctttctgtggggacagtggctgagattacaggccatcagcttatgtcattatccacagccaatgcaaaaaaagacccctcatgtaagacctgcaatatctcggtaggacgatag

SEQ ID NO: 28974 - DNA, 1131 bp, synthetic construct
  source 1..1131: mol_type = other DNA; note = Synthetic coding sequence
atggaggtgcctcggttggaccacgctttgaacagccctacatccccttgtgaagaggtgatcaaaaatctatcactggaggcaatccagctgtgtgacagagatggcaacaagtctcaggattctggaatcgcagaaatggaagagttacctgttccccacaacatcaagattagtaatataacgtgcgactcctttaagatctcttgggaaatggacagcaagtcaaaggaccgcattacccattatttcatcgatctgaataagaaggaaaacaaaaacagcaataagttcaagcacaaggatgttcctacaaagcttgtggccaaggctgtccccctgccaatgactgtcaggggccactggttcctgagtcctagaaccgaatacacagtcgccgttcagactgcttccaagcaagtggacggagattacgtggtctccgagtggtcagagattattgagttttgcaccgctgattactctaaggtacacctcacccaactgctcgagaaggccgaggtgattgccggaaggatgttgaaatttagcgtcttttaccggaaccagcacaaagagtactttgattatgtgagggagcaccatggcaatgcaatgcagccgtccgtgaaagacaactccgggagccatggaagccccatatctggcaagctcgaaggaatctttttcagctgttccaccgagttcaacacaggaaagcctcctcaggacagcccatacggacggtataggttcgagatcgcggctgagaaactgttcaacccaaacaccaacctgtactttggggatttctactgcatgtacaccgcctaccactacgtgattttagtaattgccccagtgggcagcccaggggacgagttctgtaagcagaggttgccccagcttaatagcaaagacaataagttcctgacctgcacagaagaagacggggtgctggtgtaccatcatgctcaagatgtgattcttgaagttatatatactgatcctgttgaccttagtgtggggaccgtggctgaaattaccgggcaccagctgatgtcactgtctacagcgaacgctaaaaaagatccaagctgtaagacttgcaatatttccgtgggtagatag

SEQ ID NO: 28975 - DNA, 1263 bp, synthetic construct
  source 1..1263: mol_type = other DNA; note = Synthetic coding sequence
atgctcaaggccgtaatcttgatcgggggaccccagaaaggtacccgctttaggccccttagctttgaagtcccaaaacccttattccctgtggctggggtaccgatgatccaacaccacatcgaggcctgtgcccaggtgcctggcatgcaagaaatcctgttgattgggttctatcaacctgatgagccgttaacgcagttcttggaggccgctcagcaggaatttaacctgcccgtcaggtatctgcaggagtttgcccctcttggcactggcggtggtctatatcacttccgtgatcagattttggcgggttctcctgaggctttctttgtcctcaatgccgacgtctgctctgatttcccgcttagcgctatgctggaggcacatcggcgtcaacggcatcctttcctgctgttgggaaccacagctaacagaacgcagtccttgaattatggatgcatcgtggaaaaccctcagacccatgaagttctgcattacgtggaaaagccaagtacttttatctcggacattattaattgcggcatttatctcttttctcccgaggccttgaaacccttgcgcgacgtattccagcgaaaccagcaggacggtcagcttgaagactccccgggactctggccaggagcagggacgatcaggttggagcaagatgtgttcagtgcactcgctgggcagggccagatctacgtgcatctgaccgatggaatctggagtcaaatcaaatctgctgggtctgccttgtacgcctctagactgtatttaagccgctaccaggatacccatccggagcggttggcaaaacacacccctggaggaccatggattagaggcaacgtgtacatccatcccacagcaaaggtggctccaagcgcggttctggggcctaatgtaagcatcggcaagggggtgaccgtcggtgagggggtcagactgagggagtctatcgtcctgcacggagctaccctccaggaacacacttgcgttctgcacagtattgtcggttggggaagtacagtggggaggtgggcccgtgtggagggcaccccgagcgacccaaatccgaatgacccacgcgctaggatggactccgagtcgttgttcaaggatgggaagctgttgcctgccattacgatcctggggtgtagggtcagaatcccagctgaggtcctgatcttaaacagcatcgtcctgccacataaggagctgagccgctcattcacaaatcagataattctgtag

SEQ ID NO: 28976 - DNA, 411 bp, synthetic construct
  source 1..411: mol_type = other DNA; note = Synthetic coding sequence
gatccactcagctggctctctgggccatggggccaagtgccagccggaatctgcccgccaagacatcgtggttggtatcacttcagggatcagatcctggcgggtagcccagaagctttctttgtgctcaacgccgacgtatgcagtgacttccccctctctgccatgctggaagcccacaggcggcagcgacacccttttctgctcctgggaacaactgcaaatagaactcaatcactcaattatggctgtatcgtggaaaatccccaaactcacgaggtgctgcattatgtagaaaagcctagcacctttatcagcgacattataaattgtggaatttacctgttcagcccagaggccctgaaacctctgagggatgtgtttcaacgcaaccagcaggatggtcagtag

SEQ ID NO: 28977 - DNA, 1365 bp, synthetic construct
  source 1..1365: mol_type = other DNA; note = Synthetic coding sequence
atggagcgtaaagacttcgagacgtggcttgacaacatctccgtgacatttctgtccttgaccgacctgcagaaaaacgagactttggaccacctaatttcactgtccggcgctgtccaactgcgtcacctgtcgaacaatttagaaactctgcttaagcgcgatttcttaaaattgctgcctctggagctgtcattttacctcttaaagtggttggacccccaaacactcctgacctgctgccttgtgtcaaaacagtggaacaaagtgatttctgcctgcaccgaggtctggcagacagcctgcaaaaacctgggttggcagatagacgactccgtccaggacgctctgcactggaaaaaggtgtatctaaaagccatcttgaggatgaagcagctggaggatcacgaggccttcgagacaagcagcctaattggtcattctgcccgagtctatgcattatattataaggacggcctcctctgcacaggctcagacgatctgtccgccaagctgtgggatgtcagtacaggccagtgtgtttatggcattcagacccatacttgcgccgcagtgaaattcgacgaacagaagctcgtgactggtagtttcgacaatacagtcgcatgctgggagtggagctccggcgcaaggacacagcacttccggggtcacactggggcagtgttcagtgttgactacaacgacgagctcgatattctggtgtctggaagcgccgacttcacagtcaaggtgtgggctcttagcgcaggaacctgtctgaataccctgacaggacatacagagtgggttactaaggtagtgctccagaagtgtaaagtcaagtctctgctccactccccgggtgactatatcttgttgagcgccgacaaatacgaaatcaagatctggcccattggccgagagatcaattgtaaatgcctcaagactcttagtgtaagtgaggaccgatccatctgcctccaaccacgccttcactttgacggcaagtatattgtttgcagctccgccctaggtctctaccaatgggattttgcgtcctatgatattctaagggtcatcaaaaccccagagattgccaacttggcactgctagggttcggcgatatcttcgccctcctctttgacaaccgctatttgtatattatggacctccggactgagtctttaatttctcgctggcctctgccagagtaccggaaatctaaaaggggcagttccttccttgcaggcgaggcctcatggctgaacggcctggatggacataacgacacgggcttagtcttcgccacctctatgcctgaccattccatacatctggtgctatggaaggagcacggatag

SEQ ID NO: 28978 - DNA, 372 bp, synthetic construct
  source 1..372: mol_type = other DNA; note = Synthetic coding sequence
atggaagccgctgaaactgaagctgaagccgctgcgctggaggtcctcgccgaggttgcgggaatactggagcccgttgggctccaggaagaggccgagctgcccgctaaaattctggtggaatttgttgtcgactcgcagaagaaagacaagcttctgtgctctcaacttcaggttgcagacttccttcaaaatattctggctcaggagagaccctggtgtgtgctgcagggctgttggtctactacttgctggcgctgtaagttcgccatgacgagctggcgtaccgccgcttggagaaaaatactcgagaaagcaagcgatttcccacacctgcctacaatcatcactggaaagaccgtcaatagctag

SEQ ID NO: 28979 - DNA, 834 bp, synthetic construct
  source 1..834: mol_type = other DNA; note = Synthetic coding sequence
atggaggcagccgaaactgaagccgaagctgctgcattagaagtcctggccgaggtcgccggaatcctggagcctgtgggcctgcaggaggaagcagagctccccgcaaagatcttggtggagttcgtggtagattcacagaagaaggataagctgctgtgttcccagctgcaggtggcggactttctccagaatatcctggcccaggaggataccgctaaaggattggaccctttggcttccgaagacacttcgcgacagaaggcaatagccgcaaaggagcaatggaaggaactgaaagcaacatatagagagcacgtagaggccatcaaaattggactgaccaaggcactgacccaaatggaggaagcccagcgcaaaagaactcaactgcgtgaagccttcgaacagctccaggccaagaagcagatggctatggagaagaggcgcgctgtccagaaccaatggcagctgcaacaggaaaagcatctgcagcacttggcggaggtctctgctgaggtgcgagagcgcaaaacaggtactcagcaggaactcgatagggtctttcagaagctaggaaacctcaaacaacaggctgaacaggaacgcgataagctgcaaaggtatcagacgtttcttcagctgctgtacaccctacagggcaaacttttattcccggaggcagaggccgaagcggagaacctacctgatgataagcctcagcagcctacacggccacaggagcaaagcactggagacacaatgggcagggaccctggagtcagttttaaggccgtgggactgcagccagccggagacgttaacctcccttag

SEQ ID NO: 28980 - DNA, 1713 bp, synthetic construct
  source 1..1713: mol_type = other DNA; note = Synthetic coding sequence
atgtcctccatcggcgagggcatcgatttctctcaggaaagacagaaaatatctggcctccgcactttggagcagtcagtgggcgaatggctggagtcaatcgggctgcagcagtatgaatccaaacttctgcttaacgggttcgatgacgtgcatttcctggggagcaatgttatggaggagcaggatctcagagatataggcatctcagacccccaacaccggaggaagctcctacaggccgcaagaagcctccctaaggtcaaggccttaggctatgacggtaattccccaccgtcagtccctagttggctagactcccttggccttcaagactacgtgcattcctttttgtcatccggatattcttccattgatacggtcaagaatctctgggagttggaactggttaatgtgctgaaggtgcaactcctggggcaccgcaaaagaatcatcgcctctctggcagacagaccctatgaggagccacctcagaaaccccctaggttctcacagttacgctgccaggacctgctgagccagacatcatctcccctcagtcagaacgatagctgcactgggagatctgctgaccttttattgccgcctggtgataccggacggaggcgccacgactccctgcacgacccggcagcgccatctcgtgcggagcgctttcgaatccaggaagagcatcgcgaggcaaaactcacgttgcggcctccatctctggccgctccctatgctcctgtacaatcttggcagcaccaacccgaaaagctgatttttgaatcttgtgggtacgaggctaattacctgggaagcatgttgatcaaggatctgcgcggaacagagtcaactcaagacgcatgtgctaaaatgaggaaatcaaccgagcatatgaagaagatcccaactatcatcctcagtatcacctacaaaggcgttaaatttattgacgcctctaacaaaaacgtgatcgctgaacatgaaattcggaatatcagctgcgcggctcaggacccagaagacctgtgcacttttgcatacataaccaaagatctgcagacctcacatcactattgccatgtgtttagcaccgtggacgtgaacctcacttacgaaatcatcctaaccctggggcaggccttcgaggtggcttaccagctcgcgcttcaggcacaaaaatcccgcgctaccggggcttcagctgccgaaatgattgagactaaatcatccaagcccgttccaaaaccgagggtgggcgtacggaagtctgccgtacccctgcctcctgactccaggtgctgttactgccatacctgcaccacccaccgcccatcctatctccccctcccttctgtctcacctggtgtcaagctagaaccaccagatatggatcaggacgctcaaagtcacgcctcggtttcatgggtggtagatcccaagcctgacagcaagagaagcttgtctacgaaccataccagattggagttggtgtgttgctcccaaccagagaatgagttggtgtccaccatcagcggtgacaaacctaaaagttttcttgaacccctcctgtttgtgatgcctaccacagcctataaccacaattgcccagaatggagatctcagaaagatggcggatgcagcacttccgagtgccctcaccatctgtgcttagaaaagcctggcgtgttatccctggagatgtag

SEQ ID NO: 28981 - DNA, 1785 bp, synthetic construct
  source 1..1785: mol_type = other DNA; note = Synthetic coding sequence
atggaaagcaatcacaaaagcggggacggtctttcaggaactcagaaagaggcagccctgagagctcttgtgcaaagaactgggtattctctggtacaagagaacgggcagagaaagtatgggggaccccctcctgggtgggatgccgcaccccctgagcgcggttgtgagattttcatcggaaagctgcctagagatctctttgaagatgagctaattccactctgcgagaaaatcggaaagatttacgagatgcggatgatgatggacttcaacggcaacaatcgtggttacgcgtttgtaacattctccaataaagtggaggcaaaaaatgccattaagcaactgaataactatgaaatacgcaacggccgactcctcggagtttgtgccagtgtagacaattgcagactgtttgtgggtgggattcctaaaaccaaaaaaagagaggagattttgtccgagatgaagaaggttacagagggagtcgtggacgtgatcgtgtacccgagtgcagcagataagaccaagaatcgtggctttgctttcgtggagtatgaatcacatcgagcagctgcgatggccagacgcaaactgttgccgggtcgtatccagctgtggggacacggcatcgcagtggattgggctgaacctgaagttgaggtcgacgaagacacaatgtcctccgtgaaaatcctgtacgtccggaacctcatgctgagtacttcagaagagatgatagagaaagagtttaacaacatcaaacctggcgctgtggaaagggtgaagaaaatacgggactatgcctttgtgcactttagcaacagggaggatgccgtggaagcaatgaaggctctgaacggaaaagtgctggacggcagtcctattgaggtaactttagctaagcccgtcgacaaagatagctatgtgcgttacacacgtggcaccggaggccgtgggactatgctgcaaggagaatatacgtacagccttggccaggtatatgatcctaccacaacttatcttggcgctcccgtgttctacgcccctcagacatatgccgctataccaagtctccacttccctgcaacaaaagggcatttatccaatagagcaatcatacgtgctccatccgttagggagatctacatgaacgtccctgttggagcggcaggtgtacgcggactgggcggtagaggatatctcgcttatacaggcctgggtcgaggttatcaagtgaaaggggacaaacgcgaggataaactctatgatattctgcccggtatggaactgacccccatgaatccggtcacattgaaaccccaaggaattaaactcgcgcctcagattctcgaggaaatctgtcagaagaacaactggggtcaacctgtgtaccagctccacagcgctatagggcaggatcagaggcagttgtttctgtataagattacaattcccgctctggcctcacagaaccccgctatccacccatttacaccacccaaactctccgccttcgtcgacgaagccaaaacctacgccgctgagtacaccttgcagaccctgggtattccaacggacggcggagacggaactatggccacggcagcggctgccgctactgcatttcccggatatgctgttcccaatgcaacggcgcctgtttccgctgcccaactcaaacaggctgttaccctagggcaggacctggcagcttatacgacatacgaggtgtatccgacctttgcagtgaccgcaaggggcgatggctacggaaccttctag

SEQ ID NO: 28982 - DNA, 1785 bp, synthetic construct
  source 1..1785: mol_type = other DNA; note = Synthetic coding sequence
atggaagcggtgtgtctgggaacatgtcccgagccagaggcaagtatgtctacagctataccaggcctcaagaaagggaacaatgctctgcaatcaattatcctccaaactcttcttgagaaggagaatggtcagcgcaaatatggcggaccccctccaggatgggatgcggctccaccagaacggggttgcgaaatctttattggtaaactcccgcgagatttgttcgaagatgagcttatccctctgtgtgagaagattggcaagatttacgaaatgcggatgatgatggattttaatggcaataaccggggatacgccttcgtaaccttttccaataaagtggaggctaaaaacgcgataaagcagctgaacaattatgagatccggaacggacgcctcttgggggtgtgcgccagcgttgacaattgccgactgtttgtgggagggatccccaagacaaagaaacgcgaggaaattcttagcgaaatgaaaaaggttaccgagggcgtggttgatgtgattgtctatccaagcgcggcagataagacgaaaaaccggggtttcgcctttgtggaatatgaatcccacagagcggctgcgatggccagacgcaaactgctgccaggtcggattcagctctggggtcatggaatcgccgtagactgggctgagccagaggtagaggtggatgaagataccatgagctccgtgaaaatattatacgttcgtaatttaatgttgagtactagcgaggagatgatcgagaaggaatttaacaatatcaaaccaggagccgtcgaacgcgtaaaaaaaatcagagattatgcctttgtccacttttccaacagagaagatgcggtggaggcaatgaaggccttaaacgggaaggtcctcgatggatcccccatcgaagtcactctggctaaaccggtggacaaagacagttatgtgagatatactaggggcaccgggggtcggggtactatgctccagggcgagtacacttactctctggggcaagtttacgaccctactaccacctatctgggtgcaccagtattttacgcccctcagacgtatgccgctattccttcccttcactttccggctactaaaggccatctgagcaatagagccatcatccgcgcaccctccgtgagaggagcagctggagtacgcggattaggaggcagaggatacttggcatataccggactcggacggggatatcaggttaaaggcgataagagggaagataagttgtacgatatcttgcccggaatggagcttactcccatgaaccctgtgacgctgaagcctcaagggattaagcttgccccacagatcctggaggaaatatgccaaaagaacaattggggccaacctgtgtatcagcttcacagcgctattggccaagaccagagacagctgtttctgtacaagattactataccagccctcgcttcccagaatcccgcaatccatccgtttaccccacctaaactcagtgcattcgtggatgaagcgaaaacctatgcagccgagtacacactgcagaccctcggaattccgaccgacggcggtgacgggacaatggcaactgcagccgcagctgcgaccgcatttccaggatacgcagtccccaacgctactgcgccagtgagtgcggctcagctgaagcaggcagttacgctcggacaagatctggccgcatataccacttacgaagtatatcctactttcgccgtgacagcaagaggtgatgggtacggtacattctag

SEQ ID NO: 28983 - DNA, 1761 bp, synthetic construct
  source 1..1761: mol_type = other DNA; note = Synthetic coding sequence
atggaaagcaatcataaatctggggatggtctgtccgggacccagaaagaggctgcattacgagctttggtgcagaggactggctacagcttggtgcaagaaaatggacaaagaaagtacggcggacccccacccggatgggatgcagccccaccagaaaggggctgtgaaatctttattggcaagctgccccgtgacttgttcgaggatgaactgattcctctttgcgaaaaaatcggaaaaatctacgaaatgaggatgatgatggactttaacggcaataaccggggttatgccttcgtaacatttagcaataaggtggaagccaagaacgccatcaagcagctgaacaattacgagattcgcaacggtcgcctcctcggtgtctgtgccagcgtcgacaactgccgcctttttgttggcggaatccccaaaaccaagaaacgtgaagaaatcctgtccgaaatgaagaaagtgacagaaggcgtggttgacgtgattgtgtaccctagtgccgcagacaagacaaaaaatagagggttcgcctttgtcgagtacgagtcacaccgggctgcagcaatggcaagaagaaaactacttcccggtagaattcagctgtggggtcacgggatcgctgtagattgggcagaacctgaagtggaggtcgatgaagataccatgtcatcagtgaagattctgtacgtaagaaatctaatgttgagcacctcagaggaaatgatagaaaaagagtttaataatataaagccaggagccgtggagcgggtgaagaaaatcagggattacgcctttgttcacttctcaaaccgagaagatgctgttgaagcaatgaaggctctcaatgggaaagtgcttgacggcagccccatcgaggtgacattagcaaagcctgttgacaaggactcatacgtgagatacacccggggtactggcggtaggggaaccatgcttcagggagaatacacttactccctgggccaggtgtacgaccccaccaccacgtacctcggagcaccagttttttatgcccctcagacatatgccgcaatccccagccttcacttccccgcaaccaaaggccatctgtccaatagagctattataagggccccatccgtgaggggtgctgccggagtcagagggctgggcggtagagggtacctcgcatataccggccttgggcgagggtaccaggttaagggcgacaagcgggaagacaagctttacgacatactccctggtatggaactgacccccatgaacccagtcacgctgaaaccccaaggcattaaactggccccacagatcctcgaggagatttgccagaagaacaactggggtcaaccagtgtatcagctgcacagtgcaatcgggcaggaccaaaggcagcttttcttatacaagatcactatacctgcgcttgctagccagaatccagccattcacccgttcacgccacctaagctgtcggcatttgtcgacgaggccaaaacatacgcagcggaatacactctccagacactgggaatacctacagacgggggagacggaaccatggcaacagcggcagcggcagcaaccgctttccccggatacgccgtcccaaacgctaccgcgcctgtctcggctgcccagctaaaacaagcagtcaccctcggtcaagacctggccgcatatacgacctacgaggtctaccctaccttcgctgtgacagctaggggcgatggctacggcactttttag

SEQ ID NO: 28984 - DNA, 1761 bp, synthetic construct
  source 1..1761: mol_type = other DNA; note = Synthetic coding sequence
atggaaagtaaccacaaaagtggtgatgggctgagtggcacgcagaaagaagctgcactgagagcccttgtgcagcgcacgggctattccttggtacaggaaaatggacagagaaaatacggagggcctccacctgggtgggatgccgctccacctgagagaggttgcgaaatcttcattggcaaactgcctcgtgacctcttcgaggacgagctgatcccattatgcgagaaaatcgggaagatatacgagatgaggatgatgatggacttcaacggcaataacaggggttatgcgtttgtcacattctccaacaaggttgaagcaaagaatgccattaagcagcttaataactacgagattcgtaacggtcgtctgctaggcgtgtgtgcctctgtcgataattgtcgtctgttcgtgggcggaatccccaaaactaaaaagcgtgaggagatactgtcggaaatgaagaaagtgactgaaggggtggtcgatgtaatagtctatcccagtgccgctgacaaaactaaaaacagaggcttcgcctttgtggagtacgaatcacatagggcagccgctatggctagacgcaagttgctccctgggagaattcagctgtggggccacggcatcgctgtggactgggctgagcccgaagttgaggtcgacgaggacacaatgtcctcagtgaagatcctgtatgtaagaaacctgatgctgagcacgagcgaagaaatgatcgagaaggagttcaataatatcaagcccggtgcggttgagcgggttaaaaagatccgggattatgcctttgtacacttctctaatcgtgaagatgctgtggaagctatgaaggcgctgaatggcaaggttctcgatggttcccctatagaagtaactttagcgaagccagtggacaaggatagctatgtgcgctacactcgaggcacggggggacgtggcacaatgctgcagggagagtacacatactcgctgggccaggtgtacgatccaaccacgacctacctgggggcacctgtgttctatgcaccccagacctacgctgcaatcccaagtctgcattttccagctacgaaaggacacctttccaatagggccatcatccgcgcacccagtgtgaggggcgctgctggtgtccgaggccttggcggtcgcggatatttggcctacaccggactggggcgtggctatcaggtaaagggggataaacgggaagacaaactgtatgatattttgcccggaatggaactgactccaatgaatccggtcactctcaaacctcaggggataaagctggccccacagatcctcgaggagatttgtcagaagaataattggggccagcccgtgtaccagcttcactccgctatcggacaggatcaaagacaactgttcttgtacaagatcactattcccgcactggcttcccagaatccagctatccaccctttcacccccccaaagctttccgctttcgtcgacgaagcaaaaacatatgctgctgaatatacactgcagaccctgggtattccaacagatggaggggatggaactatggccactgcagccgctgcagcaacagctttccccggttatgccgtccccaatgcaacggccccagtgtctgctgcacagttgaaacaggccgtcactcttggtcaggatctggctgcctacacgacttatgaagtctacccaactttcgccgttaccgccaggggggacggctacggcacattttag

SEQ ID NO: 28985 - DNA, 1542 bp, synthetic construct
  source 1..1542: mol_type = other DNA; note = Synthetic coding sequence
atgcagcggacttttgcgtggttactggatagggttcagcatctaggtgcgccagtgactctaagagctagctacttggagatctacaatgagcaggtgcgcgatctgctgtctctagggtctccacgacccctgccagttaggtggaacaagacgcggggtttctacgtcgagcagctgcgggtggttgagttcgggagcctcgaagccctgatggagctgctgcagaccggcttgagcagacgcagaaatagtgcccatactcttaaccaggcgagttcccggagccacgcgctcctgacattgtacatcagtagacagacagctcagcaaatgccgtctgtagatcccggagagcctccagtcgggggaaagttatgctttgtggacctggcaggatccgagaaagtggccgcaaccgggagccggggagagctaatgctcgaggcgaacagcataaatagaagtctcttggccctcgggcattgtatctcactcctcctggatccacaacgcaagcagagtcacatcccctttagagatagtaaacttacaaaactactggccgactctttgggaggtcgaggcgtcacactcatggtggcttgcgtgagcccctccgctcaatgcctacctgagactctgtccacactgcgatacgcgagtagggcacagcgagtgactacacgccctcaggccccaaagtctcctgttgccaaacagccccagcggcttgagaccgaaatgcttcagcttcaggaagaaaatcggaggctgcagtttcagcttgaccagatggattgcaaagcgtccgggctcagcggggctcgggtggcatgggcacagagaaacctgtacggaatgctacaggagttcatgctagagaacgaaaggctgagaaaggaaaagtcccagttacagaacagccgcgacctggcccagaacgagcagcgcattctggcgcaacaagtacacgccctggagcgacgactgctaagtgcttgttatcaccatcagcagggcccaggtctcacccccccttgcccttgcctgatggctcccgctccaccttgtcatgcactgccccctctgtactcctgcccatgttgccatatttgtcccctttgtcgtgtgcctctggctcactgggcttgcctgcccggtgaacatcatttgccccaggtgcttgatcctgaagccagtggaggccgaccaccctctgcacgaccacccccttgggctccaccttgttcacccggaagtgccaaatgtccccgagaaagatctcactccgattggactcagacccgggtgctggctgagatgctgaccgaggaagaggtagtccctagcgccccacccttgcccgtacgcccacctaagacctcaccaggtctgcggggaggagccggagtgcctaacctcgctcagaggctcgaggctctccgcgaccagataggctccagcctgaggcgcggacgctcccaacctccttgttccgaaggcgcaagaagtcctggacaagtactgcctccgcattag

SEQ ID NO: 28986 - DNA, 786 bp, synthetic construct
  source 1..786: mol_type = other DNA; note = Synthetic coding sequence
atggtgaagggggaaaaaggcccaaagggcaaaaagatcacgctgaaggtggcgcgtaattgtataaaaattacattcgacggcaaaaagcgcctggacctatcgaagatgggcataaccacctttcccaaatgcatcctgagactttctgatatggacgagctggatctctcccgtaatcttatcagaaagataccagattctatatccaaatttcaaaacttgaggtggctggacttacatagtaattacatcgacaagctgccagaatccattgggcagatgactagcttgctgtacctcaatgtctcgaacaaccggcttacttccaacggattgcccgtcgaactaaagcagctcaaaaacatcagagctgtgaatctgggcctcaatcacctggatagtgtccctacgacactcggagctcttaaggaactacatgaagtcgggttacatgacaacctgctgaataacattccagtttccattagcaagctgccaaaattgaagaaactaaatattaagagaaatccttttccgaagccaggcgagtctgaaattttcattgacagcatcagacggctcgagaatctgtacgtggtcgaagagaaggacttgtgcgctgcctgtctgaggaaatgtcagaatgcaagagacaacctgaaccggataaagaacatggcaactaccactccgcgaaaaacaatcttccctaaccttatctcacctaattcaatggcaaaggattcttgggaggattggaggataaggctcacgagcagttag

SEQ ID NO: 28987 - DNA, 1770 bp, synthetic construct
  source 1..1770: mol_type = other DNA; note = Synthetic coding sequence
atggcatcctcgcaaagggacatggaagactgggttcaagccatcagacgggtaatttgggcgcctctgggcggagggactgcacggcgatcccatgctcatcctctagagcccctgccacctggcatttttgggcagagacttgaggagactgtccaccacgaacggaaatatggaccccgtctggctccccttctcgtggagcaatgtgtggattttattagggagaggggtctcactgaggaaggcctcttccgaatgccaggtcaggcaaacttggtgagggatctccaagactccttcgattgtggcgagaaaccacttttcgattccaccacagacgtgcatactgtcgcctctctgctgaaattgtacttgcgggaattgcccgaacctgtcgtgccctttgctaggtacgaggacttcctgtcttgtgcacaactcctgaccaaagatgaaggcgaaggtacgctagagctggctaaacaagtgagcaacctgccccaggccaattataatctgttgcggtatatctgcaagtttctggacgaagtgcaggcctatagcaacgtgaataaaatgtctgtgcaaaacctggccaccgttttcggacccaatatcctgagaccccaagtggaagatcccgtgacaattatggaggggacgtccctcgtccaacatctgatgactgtgctgattcgaaagcactcccagttgtttacggccccagtccccgagggccctacctcaccacgtggcggtctccagtgcgcagtaggatggggaagcgaagaagttaccagggatagccaaggggagcctgggggacccggattgccggctcacagaacctcatcactggatggtgccgctgtagctgtgctgagccggaccgcccctaccggacctggctcgcgttgttcacccggaaagaaggtacaaacattgccaagctggaaaagtagtttccgtcaacctaggtccctgagcgggtcccctaagggtggcggatcaagtctcgaggtccctattatttcttccggcggaaattggctgatgaacgggttatccagcttgagaggccatcgacgtgccagctctggtgataggctgaaggatagtgggagtgtccagcgactaagcacttatgacaatgtccccgcaccgggactggtgcctggcattcccagcgtggcttcaatggcctggagtggcgcaagcagctctgagagttccgtggggggtagcctgtcatcatgcaccgcctgtagagcctcggactccagcgcgaggtcttctctacataccgactgggctctggaaccttccccactgccatccagttcagaagaccctaaatccctcgacctggatcatagcatggacgaggctggcgctggtgcaagcaatagcgagccctcagaacccgatagccccacgcgggaacatgcaaggaggagtgaggcactccagggacttgttaccgaattaagggcagagctgtgcagacaacgaacggagtatgaacgctcggtgaaaagaatcgaagagggttctgccgacctgcggaaaaggatgtccagacttgaggaggaactggaccaagagaagaaaaaatacattatgctggagattaaactgcggaatagcgaacgggcacgggaagacgccgaacggagaaatcagctgctgcaacgagaaatggaggagttcttttccacgctaggttccctgacagttggcgcaaagggagcgagagccccaaaatag

SEQ ID NO: 28988 - DNA, 1209 bp, synthetic construct
  source 1..1209: mol_type = other DNA; note = Synthetic coding sequence
atgtccgccgaaggagccgagcctggccctggaagtggcagtggcccaggcccaggccctctgtgccccgaacatggccaggctctttcttggttttgcggatcggagcggcgacctgtgtgtgccgcatgcgcaggcctaggcggtaggtgtagagggcatcgcattaggagagccgaggagcgcgcagaagagctgcgaaataagatagtggaccagtgcgaaagactgcaactccagtcggccgctataaccaagtacgtggcggacgtgctgccaggaaaaaatcagcgcgcagtgagtatggcttcggccgcacgcgagttggtgattcaaagactctctctggtccgcagcctgtgtgagtccgaagagcaacgcctgttagagcaggtgcacggggaggaagagagggcccaccaatccattctcactcagcgggtgcattgggcagaagcgctgcagaaactggatactattcggacgggattggtggggatgctaactcatctagatgatctccaactcatccagaaggagcaggaaatcttcgagcggactgaggaggccgaaggtattctcgacccccaggagtcggagatgctgaactttaacgaaaagtgtacgcgatcacccctgttaacccagctgtgggcaacggccgtgttaggatccttgtctggtaccgaggacattcgcatcgatgaaaggactgtgagccctttcctccagctttctgacgacaggaagacattgactttttcgaccaagaagtcaaaggcctgtgctgacggtccagaacgatttgaccattggccgaatgcactggcagcgacatcattccagaacggacttcatgcttggatggtgaatgtccagaacagctgtgcctacaaggtgggtgtggccagcggacacctgccccgtaaaggcagcggaagtgactgtaggctcgggcacaatgctttctcctgggtattcagcagatatgaccaggagttccgctttagccacaatggacagcacgagcctctcggcctactgagaggccctgctcagttaggagtggtactagacctgcaggtgcaggaactgctgttttatgaaccagccagcggcacagtgctttgtgctcaccatgtcagcttccccggacccctctttcctgttttcgcagtggccgaccaaactatcagcatcgtccgatag

SEQ ID NO: 28989 - DNA, 258 bp, synthetic construct
  source 1..258: mol_type = other DNA; note = Synthetic coding sequence
atgctaaggagaaaaccgactcgattggaactcaaactcgacgacatagaagagttcgaaaacattcgtaaggatttggagacaaggaagaaacagaaggaggacgttgaggtggtcggaggatctgatggcgaaggcgctatcgggctcagctcggatccgaagtcaagggagcagatgatcaacgatagaataggctacaaaccccaacccaagccgaacaacaggtctagccagttcgggagcctggaattctag

SEQ ID NO: 28990 - DNA, 744 bp, synthetic construct
  source 1..744: mol_type = other DNA; note = Synthetic coding sequence
atgctgtcagacggctgtggctcggaggaaaaaataagcgtgcccagctgctatggaggtatcggcgcacccgtgtctcgccaggtgcctgctagtcatgattctgaactgatggcattcatgacgagaaaactctgggatttagagcagcaggtgaaggctcaaacggacgagattctttccaaagatcagaaaattgccgcactggaggatctggtgcaaactctgcgaccacatcccgctgaagccaccctacagagacaggaggagctcgaaactatgtgcgttcagctgcagcggcaggttcgcgaaatggaacgctttctctcagattacgggcttcagtgggtgggcgaacctatggatcaagaagattccgagtctaagacagtttccgagcacggtgaaagagattggatgactgcaaaaaaattctggaagcctggggattccctagcccctcccgaagtcgactttgacaggttgttggcgagtctgcaggatcttagcgagttggtggttgagggggatacccaggtgacacccgtgccgggtggcgcacgcctgcgaacattggagcctattccgttaaagctttatcggaacggcataatgatgttcgacggtccattccagccattctatgatccttcgactcaacgctgtctgagagatattctggacggtttcttcccatcagagttgcagaggttatacccaaacggagtgcccttcaaagtgtag

SEQ ID NO: 28991 - DNA, 1464 bp, synthetic construct
  source 1..1464: mol_type = other DNA; note = Synthetic coding sequence
atgagctctccgctggcctccctgtctaaaaccaggaaggtacctttaccaagcgagccaatgaatcccggacggagaggaatccgtatttacggggacgttcccgcatctcacgacagcgaactgatggccttcatgaccaggaagctgtgggatctggagcagcaggtgaaagctcagacggatgaaatcctgtctaaggatcagaaaatcgcggctctggaggacttagtccaaacactgaggcctcatcctgcagaagccacattgcagaggcaggaagaactagaaaccatgtgcgtccaactgcagcgccaagtgcgagaaatggaacggttcctgagcgattatggattgcaatgggtcggcgagcccatggatcaggaggactctgagtcaaagacagtatccgagcacggtgaaagggactggatgacggctaagaaattctggaagcctggcgattcattagcccctcctgaggttgacttcgataggcttctcgcttcactgcaggacctgtccgaactggtggttgagggtgatacacaggtgacaccagtgccaggaggtgcccgactccggaccctcgagcctatccccctgaaactctatcgaaacggaattatgatgtttgacggcccattccaaccgttttacgacccaagtacccagcgctgcctgagagacatactcgacggcttcttcccaagtgaattgcagagactgtacccaaacggggtgccctttaaggtttcagatctgagaaatcaggtgtacctggaagacggactggacccatttcccggagagggacgggtagtgggaagacagttgatgcacaaggcccttgatcgcgtggaggagcacccaggctccaggatgaccgcagaaaagttcctgaatcgcctccctaagtttgtgattcgacagggcgaagtcatcgatatcagaggtcccattcgagacactctgcagaattgctgtccactacctgctaggatccaggagatagtggttgaaacccccaccctggccgcagagagggagcgctcccaggagagcccaaatacacctgcccctcctctgagcatgctgaggataaagagcgagaacggcgaacaggcattccttctgatgatgcaacctgacaacacaataggagatgtccgagcgttactggctcaggcccgtgtaatggacgcatctgctttcgagatcttctctactttccctcccacactgtatcaggatgatacattgactttacaggcagctgggctcgtacccaaggcagctctcctgttgcgagcacgtagggcccctaaaagcagtttgaaattttccccagggccttgtccaggtccaggccctggcccttcacccggacctggtcccggaccatctcccggaccagggccaggcccaagcccttgcccgggaccctcaccttcgccacagtag

SEQ ID NO: 28992 - DNA, 1020 bp, synthetic construct
  source 1..1020: mol_type = other DNA; note = Synthetic coding sequence
atgtggacagcacgaggcccatttcggagggatcgctggtcctccgaggatgaagaggcagccggaccgtcccaggccttatcccctctgctttccgacacccgaaagatcgtctccgagggggaacttgaccagttggcacagatccgcccactgattttcaactttcatgagcagactgccattaaggactgtttgaaaattctggaggagaagactgctgcatacgatattatgcaggaattcatggcacttgagctcaagaacctgccgggagagttcaactccggaaatcaaccaagcaaccgcgaaaagaaccggtatcgggacatcctgccttacgacagtacacgggtgccactggggaaatctaaggactatataaatgccagttacattcgcatcgtgaattgtggggaggagtatttttacatcgcaacccaggggcctctgttatcaacgatcgatgacttttggcaaatggtgctcgaaaacaacagcaatgtgatcgctatgatcacgcgcgagatcgaaggaggcatcattaaatgttatcactattggcctatctctctcaagaagcctctcgaactaaagcatttcagagtttttctggaaaactaccagatcctgcagtattttataattaggatgtttcaggtcgtcgagaaatctactggaacctctcactcagtaaagcaattacagtttacaaagtggcccgaccatggtacacctgcatccgctgactcctttattaaatatattaggtacgcccgtaagtcccacctgaccggccctatggtggtgcactgttccgccggaattggccgaacgggcgtctttctgtgtgttgatgtagtgttttgcgctattgtcaaaaactgtagtttcaacattatggacattgttgcacagatgagagaacagagatccggcatggtccagaccaaggaacagtatcatttttgctatgacattgttctcgaggtgctacgaaaactgctgaccctcgactag

SEQ ID NO: 28993 - DNA, 1563 bp, synthetic construct
  source 1..1563: mol_type = other DNA; note = Synthetic coding sequence
atgagcagccctctggcaagcctgtcaaagaccaggaaggttccactccctagtgaacccatgaatccagggcgtagaggcatccggatatacggagacgaagacgaagtggacatgctcagcgacgggtgtggctcggaggagaaaatttccgtgccatcttgttatgggggaatcggggcacctgtgtctcggcaagtcccggcatctcatgattcggagctgatggccttcatgaccagaaagctgtgggatcttgaacagcaagtgaaggcccagactgacgagattcttagcaaggaccaaaaaattgccgctctggaggacctggtgcagacgctgaggccccaccccgcagaggctactctgcagcgccaggaggagctcgaaaccatgtgtgttcagcttcagagacaagttcgcgaaatggaaaggttcctatccgactatggcttgcagtgggtaggtgaaccgatggaccaggaggacagtgagtccaagactgtcagcgaacatggggaaagagactggatgacggctaagaaattttggaaacccggagattctttggctcctcccgaagtagattttgacagacttctggcgagtctccaagacttatcggaactcgtcgtcgaaggagatacacaggttacaccagttccaggaggggcacggctgcggactctggaacccattcccctgaagctctatcggaacgggatcatgatgtttgatggacctttccagcctttttatgacccttcaacccaaaggtgtctgcgtgacattctcgacgggttcttcccctccgaactacaacgattatacccaaacggggtgcccttcaaagtgagtgacctgagaaaccaggtgtacctggaagacggcctcgaccccttccctggtgaggggagagtggtggggagacaactaatgcataaagctcttgacagagtggaggagcaccccggtagccgaatgactgcagagaagtttctgaatcggcttcccaagtttgtaatcagacagggggaagtgatcgatattagaggtcccatcagagatactctgcagaattgctgcccgctgcccgctagaatccaagaaattgtagtggagacacctactctagccgctgagagagagaggtcccaggagtccccaaatacaccagcacccccacttagcatgctgagaattaaaagcgaaaacggagaacaggcatttctcctgatgatgcagcctgacaacactataggcgatgtgcgggctctgctggctcaggccagagttatggacgcttctgcctttgagatcttcagcacgttccccccaaccctgtatcaggacgatactctgactctccaggctgccggactcgttcccaaagccgctctcctgttgagagcacggcgagccccaaaatcttcattgaaattttcccccggtccatgccccggtccaggtccagggccttcccccggtcctggccctggcccatcaccaggtccagggcctgggccttccccatgcccaggaccctctcccagcccccagtag

SEQ ID NO: 28994 - DNA, 1563 bp, synthetic construct
  source 1..1563: mol_type = other DNA; note = Synthetic coding sequence
atgagctcgcctctagcaagtctgagcaagacacggaaagtccccttaccgtcagaaccaatgaatccaggccgtcgagggatcaggatctatggcgatgaggatgaggtcgacatgttatcagatggatgcggttccgaagagaaaatttctgtgccttcgtgttatgggggaatcggggctccggtttcccggcaggtgcccgcaagtcacgatagtgagttaatggccttcatgacacggaagctctgggaccttgaacaacaagtgaaggcacagacagacgagatcttgtctaaagaccagaaaatagccgctctggaggacctggtgcagacattacgtccgcacccagcagaggctacactccagagacaagaggaactggaaacgatgtgtgttcaactccaaagacaagtgcgcgaaatggagagatttctctctgactatgggttgcaatgggtgggcgaacccatggatcaggaagattctgaatcaaagaccgtttctgaacacggcgagcgggactggatgacagccaagaaattttggaagcctggtgacagtttagcacccccagaagttgattttgacaggctcctggccagcctgcaggacttgtccgagctagtcgtggagggcgatacgcaggtcacccccgtgcctggcggagctcgactccgaacgctggaacctatcccactgaagttgtaccggaacggaattatgatgtttgatgggccattccagccattctacgatccatcaactcagcggtgcttgcgagatattctcgatggattctttccaagcgagcttcaaagactgtaccccaacggggtgcctttcaaggtgagcgacctgaggaatcaggtgtatttagaggatgggcttgaccccttccccggtgaagggagagtagtgggcagacagctgatgcataaagccctggatcgcgtggaggagcaccctggaagccggatgacagcagaaaagttcctgaatcggcttccgaagttcgtcatcagacagggggaggttatcgatatccgcggaccaataagagacaccctgcagaattgctgtccacttcccgctcggatccaggagatcgtggtcgaaacccccacattggcggctgaaagggaacgctctcaggaatctcctaacacccctgctccccctcttagcatgctgaggattaaaagtgagaatggagagcaagcttttctcctgatgatgcagcccgacaacacgatcggagacgttcgggcattactcgcccaggctcgtgttatggacgctagcgcctttgaaatcttctcgacattcccgccaaccctctaccaggacgatactttaaccctccaggcagccggactagttccaaaagcagcattgttattgagagctaggcgcgctccgaagtcaagtctgaagttcagtcccggaccctgcccaggccctggcccaggcccttctccaggccctggtcccggaccaagtcctggtcccggacccggacctagtccatgcccgggaccttctccctcccctcagtag

SEQ ID NO: 28995 - DNA, 834 bp, synthetic construct
  source 1..834: mol_type = other DNA; note = Synthetic coding sequence
atgtttgatgggccattccaaccattctatgatcccagcactcagcgttgcttacgggatatcctggacggctttttcccttcggagttgcagcgactgtaccccaatggagtgccattcaaggtgtccgatctcagaaaccaagtgtatctggaagatggccttgatccgtttcccggtgaaggcagggtagtgggtcggcagctgatgcacaaggctctcgatagagtggaggagcacccaggctctaggatgactgccgaaaagtttcttaataggctgccgaagtttgtcattcgccaaggagaggtaatcgacatacgcggacctatccgtgatacgctgcagaactgttgtcccctccctgcaaggattcaggaaatagtagtggaaacgccaaccctggctgccgagagagaaagaagccaggagtctccgaataccccggcaccacctttgtcaatgctgaggattaaatcggaaaatggagaacaggccttcttgctgatgatgcaacccgataatactatcggcgacgtgcgagccttgttagcccaagctcgcgtgatggacgcatccgccttcgagatcttctcgacatttccacccaccctgtatcaagacgataccctcacgctgcaggctgcagggttagtcccgaaagccgctcttctcctgagagcacggagggctccaaaatcctcactgaagttttcacccggaccatgcccgggaccgggaccagggccatcccccggtccgggtccgggtccgtcacctgggccaggccctggaccgtctccttgccccggtccctccccatctccccagtag

SEQ ID NO: 28996 - DNA, 1314 bp, synthetic construct
  source 1..1314: mol_type = other DNA; note = Synthetic coding sequence
atggctggtggaccccctaaagccctgcctagtacaggacctcactccctccgtgacatgccgcatcctctcgccggaagttcttcagaggaagccgttggcggtgacagtactccctcacccgaccttctgatggccaggagttttggcgacaaagacttgatcctcccaaacggtgggacccccgctgggaccagttcaccagcctcaagctcctccctactcaaccgtctgcagctcgacgacgatatcgacggagagactcgtgatttgttcgtgatcgtggacgatcccaagaagcacgtgtgtactatggagacttacatcacctatcggattactaccaagtccactcgcgtagagttcgatctgcctgaatactctgtgcgacgtagatatcaggactttgattggctgcgttcaaaactggaagaaagccaacccacccatctgatacctcccctcccagagaagtttgtggtcaagggcgtagtggaccgcttcagtgaggagttcgtggaaacccgcaggaaagccctggacaaattcttgaagagaattacggatcacccagtactgtcatttaacgaacacttcaacatttttctgactgccaaggacctaaacgcttacaagaaacaggggattgcactcctcaccaggatgggcgaatctgtaaaacacgtgacgggaggctacaaactgcggacacgtcctctggagttcgctgccatcggcgattatctggatacgttcgccctgaaactgggcacaattgaccgaattgcacagcggataatcaaggaagagatcgagtatcttgtggagctgcgagaatatgggccagtgtactccacctggtctgccctcgagggggagcttgccgaacccttggagggcgtctccgcctgcattggaaattgctccactgcactcgaggagctgactgatgacatgacagaggattttttgcctgtgctcagagagtacattctgtactcagattcaatgaagtcagtcttgaagaagcgtgatcaggtgcaggctgagtacgaagcgaagttagaagctgttgctttacggaaggaggaccgcccaaaagtgcctgccgatgtggagaagtgtcaggacaggatggaatgcttcaatgccgacttgaaggctgacatggaaagatggcagaacaataaacgacaggactttagacagttgctgatggggatggccgataaaaatattcaatattacgagaagtgccttatggcctgggaaagcataatcccactcctccaagaaaagcaagaagctaagtag

SEQ ID NO: 28997 - DNA, 1263 bp, synthetic construct
  source 1..1263: mol_type = other DNA; note = Synthetic coding sequence
atgtcctctccacgagactttagggccgaacccgttaacgactacgagggcaatgattctgaagccgaggatctaaactttcgcgaaactctcccttctagctcacaggaaaacacaccacggagcaaggtttttgaaaacaaggtgaattctgaaaaggtaaaactgtccctccgcaattttccccacaacgattatgaagacgttttcgaggaacccagcgagtccggcagtgacccgagcatgtggacagctagaggcccatttcggagggatcgatggtctagcgaggacgaggaagcagccggtcctagtcaagccctgagtcccctgttgagcgacactagaaaaattgtgtctgagggtgaactcgaccaattggcgcagattaggcccctgattttcaacttccacgagcaaactgccatcaaagactgtcttaaaatcctggaagaaaagacagcggcatacgacattatgcaggaatttatggccctagagctcaagaatctcccgggagaatttaatagtgggaatcagccatccaacagagagaagaaccggtaccgcgacatcctgccgtacgactcaacacgggtacctttgggaaaaagcaaagattatatcaacgcatcctatattcggattgtgaactgtggggaggaatacttctatatcgctacacagggacctctgcttagtaccattgacgatttttggcagatggtcctggaaaacaattctaacgtaattgcaatgatcaccagagagatcgagggcggaattattaaatgctatcactactggcccatatccctaaaaaaaccgctggaattaaaacatttcagagtgttcctcgaaaactatcagatcctacagtactttataatcaggatgttccaggtagtagagaagtctaccggcacttcccactctgtgaagcagctgcagtttacgaaatggcccgaccacggcacccccgcaagtgcggattcttttatcaagtatatcagatatgcccgtaaaagtcacctgactgggcctatggtcgtgcattgcagcgccggtataggcaggacaggtgttttcttgtgtgtcgatgttgtattctgtgcaatagtcaagaactgtagtttcaacatcatggatatcgtggcccaaatgagggagcaacgttccggcatggtgcagactaaagagcaatatcacttctgttacgatatcgtgcttgaagtgctccgtaagctgttgaccctggactag

SEQ ID NO: 28998 - DNA, 837 bp, synthetic construct
  source 1..837: mol_type = other DNA; note = Synthetic coding sequence
atgtccagcccaagagacttccgggcagagcctgtgaatgattacgagggaaacgatagcgaggcagaggacctcaacttccgagaaaccctaccgagttctagtcaggaaaataccccaaggtctaaagttttcgaaaataaggtcaactccgaaaaggtaaagctgtccctgcggaactttccccacaacgattacgaagatgtatttgaagagccctctgaaagcggaagtgacccttcaatgtggactgccagaggccctttcagaagggatcggtggagctccgaagatgaagaggctgctggaccaagccaggcgcttagtccactgctatccgataccagaaaaatagtctcagagggcgaactggaccaactggcacagatcagacctctgatcttcaatttccatgaacagacagctatcaaggactgtctcaagatcctcgaggaaaagactgccgcttacgacatcatgcaagaattcatgactgggactagtcatagcgtaaagcagctgcagttcacgaagtggccagaccatggaacccctgcctccgccgattcattcattaagtacattcgatatgccagaaaaagccacctcactggaccgatggtcgtgcattgctcagctggcattggccgaactggcgtcttcttgtgcgttgatgtggtgttttgcgcaatcgtgaagaactgttcatttaatattatggatatcgtcgcacagatgcgcgagcagagaagcggaatggtgcagactaaggagcagtaccacttctgctacgatatcgtccttgaagtcctccgaaagctgcttacactggattag

SEQ ID NO: 28999 - DNA, 681 bp, synthetic construct
  source 1..681: mol_type = other DNA; note = Synthetic coding sequence
atgtcatcacccagggactttagggctgagcctgtgaacgattacgaaggaaacgacagcgaggctgaggatctgaattttcgcgaaacgctacccagcagctctcaggagaacacccctaggagtaaagtgttcgagaacaaggttaatagtgaaaaggtgaaattgagcctccgtaactttcctcacaatgattatgaagacgtattcgaagaaccaagtgagagtggctctgacccatctatgtggaccgctcggggaccctttcggagggacagatggagctccgaggatgaggaggccgctgggccttctcaggccttgtctccactactgagcgatacacgaaaaattgtcagcgagggggaattggaccagctggctcagataagaccactgatcttcaatttccacgaacagacagcaattaaggattgtctgaagattttggaagagaagaccgctgcctatgatattatgcaggaattcatggcattagagctgaagaacctgcccggtgagttcaacagcgggaatcagcctagtaatagggaaaagaaccgctatagggacatcctgccctttcaacatcatggatacagcggacctaatgagaggactacgttctggcacggaagcaacgagggcgctgtgagtctactcttgcggtattgtgcctag

SEQ ID NO: 29000 - DNA, 681 bp, synthetic construct
  source 1..681: mol_type = other DNA; note = Synthetic coding sequence
atgcaccagacctgcgttcgtcttgaaagagaagcctctgccagaccatcacccggaccagtgttaccacccaggcctctcccctcccacaccgaactacaaattagggaaggacccaagagaacaattagggcagctgcggaaggggctccctgtgtcggacgcgtgcggtgtgccccaggcaacagagggggaagggagggagccagtggcgtgcggggtggcgtggcacaggtgccaccgaggttaccagcgcctcctatcggacctgagcgagacgacctagctggcggagccggaaggaaaccgctaccttcgacagctgctgcatccagtccaggcagtgcagctgctgccactgcagcactatgccctccggcaaggttaagcaccccaagcatgtccggcttgagggtgtatagtactagtgtgactggatccagggaaattaagtctcagcagtccgaagtaacccgcatcctggatggaaaaaggatccagtatcagctcgtggacatatctcaagacaatgccctgcgcgatgaaatgagagcactcgccggtaacccaaaggccacgccaccccagatcgtgaacggcgaccagtattgtggcgattatgagctgttcgtggaggctgtggagcagaatacgctgcaggaatttcttaagctggcctag

SEQ ID NO: 29001 - DNA, 1518 bp, synthetic construct
  source 1..1518: mol_type = other DNA; note = Synthetic coding sequence
atggatccagggaacgaaaattctgccacggaggcggcagctattatcgacctggacccagacttcgagccccaatcacggcctcgatcgtgcacttggccccttcccaggcccgagatcgccaatcaaccctctgaaccgccagaggtggaacccgatttgggagagaaggtgcacacagaaggaagaagcgagcccattttgctgccgtccagactccctgagcccgctgggggaccccaacctggaatactgggtgccgtgacggggcctcgtaaaggagggtcacgccgaaatgcgtggggtaatcagagttacgcagagcttatctctcaagctattgagtccgctccggagaagaggttgaccctggcccagatttacgagtggatggtccggacagttccttacttcaaggataagggtgatagcaattcttctgctggttggaaaaatagcataaggcacaatctgtcccttcacagtaaattcatcaaggtacacaacgaggccacaggcaagtcaagctggtggatgctgaacccagaagggggtaagtctgggaaggcaccacgtagaagagccgcaagcatggacagctccagtaaacttctcaggggtagaagcaaagccccaaagaaaaagccctcagtgctccctgcacctccggagggtgctacgccaaccagcccagtgggtcacttcgccaagtggtctggctcaccgtgttcccgcaacagagaggaagcagatatgtggactacattccgtcctcgctcctcctccaatgctagctctgtgagcacacgactctcgccactgcggcctgaaagtgaagtgctcgccgaagaaatccccgctagcgttagctcctatgcgggaggcgtcccccctacacttaacgagggactagaattattagacggattaaacctcacatctagccatagcttactgtctaggtccggtctttccggattctctctgcagcacccaggagtgaccggcccactgcacacctacagctcaagcctcttttctcctgctgaggggccactgtctgctggtgagggctgtttttcctcatcgcaggctctggaagctttactgacatctgatactcctccaccaccagccgatgttctgatgacgcaggttgaccccatcctgagccaggctcccaccctcctgttgctgggaggactgccctcctccagtaagctggctaccggagtggggctgtgccccaagccgcttgaagctccaggacccagcagtctggtgccgactttgtccatgatcgcaccacctccagtcatggccagcgcccctatcccaaaggctctgggcacccctgtgttaacccctcccaccgaagccgcatcccaggatcggatgccccaagacttagatctcgatatgtacatggaaaatttagagtgcgacatggacaatatcatttcagacctaatggatgaaggggaaggtttagactttaacttcgaacctgatccttag

SEQ ID NO: 29002 - DNA, 1062 bp, synthetic construct
  source 1..1062: mol_type = other DNA; note = Synthetic coding sequence
atggactataaatctagcctaatccaggacggaaacccgatggaaaacctggaaaagcaattgatctgtcctatctgtctggagatgttcactaagccagtggtgattctgccatgtcagcacaacttgtgcagaaagtgtgccaacgacatattccaggccgctaatccatattggacaagcagaggatcctcggtctctatgagtgggggaagattccgctgtcccacgtgtaggcacgaggtcataatggaccgccatggagtgtacggactgcagaggaatctgctggtggagaatatcatcgacatctacaagcaggaatgtagctcgaggcctctccagaagggatctcatccaatgtgtaaggagcatgaggatgagaagatcaacatctattgcctcacgtgcgaggttcccacctgttctatgtgtaaggtttttggaatccacaaggcatgtgaagtggcccctcttcaaagtgtattccagggccaaaaaaccgagctgaataattgcatctcgatgcttgttgccggaaacgaccgagtacagaccattatcacccagcttgaggattcacggagagtcaccaaggagaatagccatcaggtcaaggaagagctttctcaaaagtttgacacactttacgccatcttagacgagaaaaagagcgagttgctgcagcgtatcacccaggaacaggaaaagaaactgagttttattgaagccttaattcagcagtatcaggagcaattagacaaaagtacgaaattagtagagacggcgattcagtcactggatgagcccggaggcgcaacatttttgctcacagccaaacagttgataaagagcatagtcgaggccagtaaaggctgtcagctaggaaagaccgaacagggctttgagaacatggacttctttacccttgacctcgaacacatcgccgacgccctccgagctattgatttcggaaccgatgaggaggaggaggagttcatcgaagaagaggaccaggaggaggaggaaagcacagagggaaaggaagagggacaccagtag

SEQ ID NO: 29003 - DNA, 1179 bp, synthetic construct
  source 1..1179: mol_type = other DNA; note = Synthetic coding sequence
atgggagtgaatcagtctgtgggcttccccccagtgaccggccctcatctggttggctgtggtgatgtcatggaaggtcagaacttacaggggtctttcttcagacttttttacccctgtcagaaggctgaggaaactatggagcagcccctgtggatccctcgctacgaatactgtacgggtctggccgaatatctgcaattcaacaagaggtgcggagggcttctctttaacttagcagtagggtcctgtcgacttcccgtatcatggaacggtccattcaaaacaaaagactcaggttatcccttgataatctttagccacggtctgggggcatttcgcacgctgtacagcgctttttgcatggagcttgcatcaagagggttcgttgtggcggtcccagagcacagggaccggagcgcagccactacatacttttgcaaacaggcgcctgaggagaaccagccaaccaatgagtcgctccaggaggagtggatccccttcaggagagtcgaagagggtgagaaggaattccacgtcagaaacccccaagttcatcagcgcgtctcagagtgtttgcgcgtgcttaagatattgcaggaggttacagcgggtcagacggtgttcaatattctgcccggaggcctggatcttatgaccctgaaggggaatattgatatgagtcgtgtcgctgtcatggggcactcattcggtggggctacagccatacttgctttggccaaggagacccagttccgatgcgctgtggctcttgacgcctggatgtttcctttggagcgcgatttctatcccaaggcacgtggccctgtattctttatcaataccgagaagttccagactatggagagcgttaacctgatgaagaaaatctgtgcccaacacgagcagtcacggattattactgtcctgggatccgtgcataggtcacaaactgatttcgcatttgtgaccggtaacctcatcggaaaatttttttctactgagacccgcggatccttggatccctacgagggacaggaggttatggtcagggccatgttagccttcttacagaaacacctggacctgaaagaggactacaatcagtggaacaacttaattgaggggatcggaccgagccttactcctggcgcaccccaccacctttcaagcctctag

SEQ ID NO: 29004 - DNA, 1179 bp, synthetic construct
  source 1..1179: mol_type = other DNA; note = Synthetic coding sequence
atgggcgtcaatcagtccgtcgggtttccccctgtgaccgggcctcacctcgtggggtgcggagatgtcatggagggacagaatttacagggcagtttttttaggctgttctacccatgccagaaggctgaggagaccatggagcaacccttgtggattcccagatacgagtattgcaccggtcttgccgaatatctccagttcaacaaaagatgtgggggactgctgttcaatcttgccgtgggttcgtgcagactgcctgtgagttggaacggacccttcaaaacaaaggactccggctacccattaatcatcttcagtcatgggttgggagcatttcgcacactgtattcagccttctgtatggagctggcatccagaggtttcgtcgtggccgtcccagagcatcgcgatcgttcagccgcaaccacgtatttctgcaagcaagctccagaggagaatcagcccacaaacgagtctctgcaagaggaatggatcccatttagacgggtggaggagggtgagaaggagtttcacgtgagaaatcctcaggtgcatcagcgggtgtctgaatgcctaagggtcttgaagatcctccaggaggtaactgccggacagactgtatttaatatcctgccgggtggcttggatctaatgactctgaaagggaatattgacatgtccagagtagccgtgatgggccacagcttcgggggagccaccgcgattctggccctcgcaaaggagacccagtttcgatgcgctgtggcactggatgcctggatgtttccactagagcgagacttttaccccaaagcgagaggcccagtttttttcatcaatacagagaaatttcagacaatggagagcgtcaatctgatgaaaaagatttgcgcacagcacgagcagtccagaatcataactgttctgggctcagtgcatcgcagtcagacagatttcgcttttgttaccgggaacctcatcggaaagttttttagtaccgagactcgcggtagtctggacccatatgaaggccaggaagtgatggtaagagctatgctagccttcctgcaaaagcacttggatctgaaggaagattataatcagtggaacaatctcatcgaaggcatcggtccttccctcacccccggagcgccacatcatctcagctccttgtag

SEQ ID NO: 29005 - DNA, 213 bp, synthetic construct
  source 1..213: mol_type = other DNA; note = Synthetic coding sequence
atggtcagaacgaaaacctggacactgaagaagcacttcgtgggctatccaaccaacagtgactttgagctgaagacagcggagctgccaccattgaagaatggagaagtacttctggaagcattgttcttgactgtcgacccatacatgcgggtcgccgctaaaaggctgaaggagggcgacacgatgatgggccagcaggtggctaaatag

SEQ ID NO: 29006 - DNA, 213 bp, synthetic construct
  source 1..213: mol_type = other DNA; note = Synthetic coding sequence
atggtccggactaaaacttggaccctgaaaaaacatttcgttggatatcctaccaattcagactttgaactgaagactgcagagctgcctcccctcaaaaacggagaggttcttttagaggccttattccttaccgtggatccgtatatgagagtggcggctaaacgacttaaagaaggggacactatgatggggcagcaggtggctaaatag

SEQ ID NO: 29007 - DNA, 534 bp, synthetic construct
  source 1..534: mol_type = other DNA; note = Synthetic coding sequence
atgcctggccttacagcgtacttcgggctcttggaaatctgcggcgtgaaaggcggagaaactgttatggtaaatgccgctgcaggagccgtgggcagcgtagtagggcaaatcgccaaactgaagggatgcaaggttgttggagcggtgggatccgatgagaaggtggcctatctccaaaagctgggtttcgacgttgtttttaactacaaaacggtcgagtcccttgaggaaacactaaaaaaagcgagccccgatggctatgactgctacttcgacaacgtcggtggtgaatttagcaatacagtgatcgggcagatgaaaaagttcggccgaatagcaatatgtggagccatctctacttacaaccgcaccggccctcttccacctgggccacccccagaaattgtcatttatcaggagcttcgaatggaagctttcgtagtgtaccggtggcagggggacgctagacagaaagcattgaaggacctgttaaaatgggtgctggagctgccatatttcgtaattgattag

SEQ ID NO: 29008 - DNA, 1263 bp, synthetic construct
  source 1..1263: mol_type = other DNA; note = Synthetic coding sequence
atgtcatctcccagggacttccgtgccgagccagtgaatgattacgaaggtaatgactccgaagctgaagatctaaatttccgagagactcttccttcgtcatcccaagaaaataccccccgatccaaagtgttcgaaaacaaagtaaacagtgaaaaggtaaaattgagcctgaggaacttcccacacaatgattacgaggatgtgttcgaggagcctagtgaaagcggcagtgaccctagtatgtggacggcgcgtggacccttcaggcgcgacagatggagctcggaggatgaggaggccgcaggcccaagtcaggctttgagccctttgctgtccgacactcgtaagatcgtgtcggagggagaactggaccaactggcccagatcaggcccctgatattcaactttcacgagcagacggcgatcaaggattgcctgaaaatcctggaggagaaaacagctgcttatgacattatgcaggagtttatggcactggagctgaagaatcttccaggcgaatttaattccggaaaccaacccagtaatagggagaaaaatcggtacagagacatcctcccatatgatagcacgcgggtacccctgggcaagtccaaggactatatcaatgctagctatatcagaatcgtaaattgtggcgaggaatatttctatattgccacccagggcccactgctgagcactattgatgacttttggcaaatggtgttggagaataattccaacgtcattgctatgattacccgagagatcgaggggggtattatcaagtgttaccattattggccaatttctctcaagaaacctctggagctgaagcattttcgtgtgttcctcgagaattaccagatcttgcagtattttatcattcgcatgtttcaggttgtcgagaagtccactggcacgtcccacagcgtaaaacagctgcagttcacgaagtggcccgaccatgggacacccgcatctgcggattccttcataaagtacatacggtatgctagaaaaagccacttgacaggtccaatggttgtacactgttcagccggtataggacgcactggtgtctttctgtgtgtcgatgtcgtgttctgcgccattgtcaagaattgttcgttcaacattatggatattgtggcgcagatgcgagaacagagaagcggtatggttcagactaaagagcaatatcatttttgttatgacatcgtgctggaggtgctccgtaagttgctgaccttggattag

SEQ ID NO: 29009 - DNA, 837 bp, synthetic construct
  source 1..837: mol_type = other DNA; note = Synthetic coding sequence
atgtcttcaccaagggatttccgggctgaacccgttaatgattacgaaggaaacgattcggaggccgaagatttaaacttccgagagaccctgccctcgtcttctcaggagaacactcctcgttccaaagtgttcgagaataaggttaacagtgaaaaagtcaagttgtccctgcggaatttccctcacaacgattatgaagatgtattcgaggaaccctcggagtccgggagtgatccatcgatgtggaccgcacggggtccctttcgcagggacagatggtcatccgaagacgaagaggccgctgggccaagccaggctctgtcgccactgctctccgacacccgcaagattgtttccgaaggagaactggatcagctggcccagattcgcccactcatctttaatttccacgaacagacagctatcaaggattgcttgaagatcctcgaagaaaaaaccgccgcatacgacataatgcaggaattcatgactggtacctcgcatagcgtgaagcaactacagtttaccaagtggcccgatcacgggacccctgctagcgcagattccttcattaaatacataagatatgctcgaaaaagccatcttacgggcccaatggtggtgcattgcagcgctgggataggtagaaccggtgtatttctatgcgtggacgtcgttttctgtgccatcgtgaagaactgttcttttaacattatggatattgtagcccagatgcgagagcagcgcagcgggatggtccagactaaggagcaatatcacttctgctatgacatcgtgttggaggtgctgagaaaactcttaacactcgactag

SEQ ID NO: 29010 - DNA, 681 bp, synthetic construct
  source 1..681: mol_type = other DNA; note = Synthetic coding sequence
atgagcagtccccgtgacttccgtgcagaacccgtgaatgactatgaaggaaacgacagtgaagccgaggatctcaactttagagaaaccctccccagttcctcccaggaaaacacaccaagatctaaagtgtttgaaaataaggtaaacagtgaaaaggtaaagctgtctctccgcaatttccctcacaatgactatgaggacgtctttgaggagccatcggagtctgggtcagaccctagtatgtggaccgccagaggcccttttcgacgcgatcgctggtcctcagaagacgaggaagctgcagggccttcccaggctttgtcccctctcctgtctgacactagaaaaattgtgtcagaaggagagctggaccagctggcccaaatccggccacttatctttaatttccatgagcaaacagctattaaggactgcttgaaaatactagaagagaaaaccgccgcttatgatattatgcaggaatttatggccctggagctcaaaaatttgcctggcgagtttaattccggaaaccaacccagcaatcgagaaaagaataggtatcgtgacatccttccatttcagcaccacggatactctggaccaaatgaaaggactaccttttggcacggttccaatgaaggcgctgtgtctcttcttctgaggtactgcgcctag

SEQ ID NO: 29011 - DNA, 789 bp, synthetic construct
  source 1..789: mol_type = other DNA; note = Synthetic coding sequence
atgtcacgatatctgcgtccacctaataccagtttgttcgtgcgtaatgtcgcagacgatacgaggtcagaggatctgcggagggagttcggtcggtatggaccaatagtggacgtatacgtaccgctggacttctacacaagacgtccacggggattcgcttacgtccaattcgaagacgtgcgggatgctgaggacgcactccataatctggataggaagtggatttgcgggaggcagatagaaatccaattcgcacaaggcgaccggaaaactcctaatcagatgaaggcaaaagagggacgaaacgtgtactcctcgagtcgctacgacgactatgatagatacaggagaagtcggtcacgcagttacgagcggaggcgaagcagatctcgctccttcgattataactatcggagatcttattcacctcgcaactcacggccaaccggccgacctcgcaggagcagatctcacagcgacaatgacagattcaaacaccgcaatcgctcattttcaagaagtaaaagtaactctaggtccagatcaaaatcgcaaccaaagaaagaaatgaaagccaagtctcgaagtcgctcagcctcccacaccaaaactcggggtacaagcaagacagacagcaaaacgcattataagtcagggagcagatatgaaaaggaaagccgaaagaaagaaccaccgcgaagtaagtcgcagtcacgaagtcagagcagatcccgttctaaatcccggagtcgatcttggacctccccgaagtcctctgggcactag

SEQ ID NO: 29012 - DNA, 522 bp, synthetic construct
  source 1..522: mol_type = other DNA; note = Synthetic coding sequence
atgagccgctatctgcgtcccccaaatacgagtctgtttgtccggaatgtagcggacgacaccagaagcgaggatcttaggcgcgaattcggcaggtacgggcctatcgtggacgtctatgtgcccctggacttctacaccaggcgacccagaggcttcgcttacgtgcagtttgaggacgttcgggacgccgaagacgcactccacaatctggaccgaaaatggatctgcggccgacagatcgagatacagtttgcccagggagaccgcaagacacccaatcagatgaaagctaaggagggtagaaacgtctacagttcaagcagatatgacgattatgacagatacagacgaagccggtcaaggtcctatgagcggaggagatcacgctctaggtcctttgactataactacagaagaagttactcccccaggaattctcgtcccacaggaaggcccaggcgaagcaggagtcactctgacaatgattcccaagtgtccaaaaagaagaacgaaagatag

SEQ ID NO: 29013 - DNA, 669 bp, synthetic construct
  source 1..669: mol_type = other DNA; note = Synthetic coding sequence
atgagcgcttttggccatgacgaggcttggatggaagcaggagggttcggtttagaggcggcagagaggaccgaatatcagtcactctgtaagagtaagctcctcttcctaggtgagcaatccgtggggaagacatcgatcatatcccggttcatgtacaactcctttggatgcgcctgccaagcaactgttggcatcgactttctctccaaaactatgtacctcgaggatcagattgtacagctacagctgtgggacaccgctggccaggaaagattccactctctgattccatcttacatacgagattccaccattgccgtcgtggtgtacgatatcaccaatatcaattccttcaaggaaaccgacaaatgggtggaacatgtgcgggcagagcgaggagatgacgtcgtcatcatgttactgggtaataaaattgatttggataataagcggcaagttactgctgaacagggtgaggaaaaatccaggaacttgaacgtgatgtttattgaaacgagtgctaaaacgggttataatgtgaaaaaactgtttcgtagggtggcctccgccttgctttcaacacgaacgtctcctcctccaaaggaaggaacagttgagattgagttagagtcctttgaagaatccgggaatcgctcctactgttag

SEQ ID NO: 29014 - DNA, 348 bp, synthetic construct
  source 1..348: mol_type = other DNA; note = Synthetic coding sequence
atggttcagatcattaaggacacaaatgagttcaaaactttcctgaccgccgcaggtcacaagttggcagttgtgcaattctcctctaagaggtgtggaccttgcaaaagaatgtttcctgtttttcacgcaatgtccgtgaaatatcagaacgtgtttttcgccaacgtcgacgtgaacaatagtccggagctggctgagacgtgccacattaaaaccatccccactttccagatgttcaagaaatcacaaaaagtaactctgttctctagaatcaagcgcatcatctgctgctatcggtctggttttatgtctaatctctgcctcgccgacgacggaaatgaatag

SEQ ID NO: 29015 - DNA, 384 bp, synthetic construct
  source 1..384: mol_type = other DNA; note = Synthetic coding sequence
atggtgcaaatcatcaaggacacgaatgagttcaaaaccttcctgaccgcggctggacataaactcgcagtggtgcagttctcgtcaaagagatgcgggccttgcaaacggatgtttcccgtcttccatgcgatgagtgttaagtaccagaatgtattcttcgccaacgttgacgtgaataacagccccgaattggctgaaacatgtcatattaagaccattccgacctttcagatgttcaagaaatcccagaaagtcactcttttcagtcgcatcaaacggatcatctgctgttatcgctctggattcatgtctaatcttatctttgaattttgcggggctgatgctaagaagctggaggccaagacacaggagctgatgtag

SEQ ID NO: 29016 - DNA, 1767 bp, synthetic construct
  source 1..1767: mol_type = other DNA; note = Synthetic coding sequence
atgcacaggtctgccccttcgcagacaaccaagcgaagtcgcagtcctttctcgaccaccagacgttcttgggatgactcggaatcatctggaacaaacctgaatattgacaacgaagactattctaggtacccaccccgagaatatcgtgctagcggatccaggcgcggaatggcatacgggcatattgatagttatggggcagacgacagcgaggaggagggagcaggtcctgtggaacgacccccagtgcgaggcaagactgggaaattcaaggacgacaaactgtacgaccctgaaaagggcgcacggtccctggctggaccacctcctcacttttcttcattttcgcgagacgttagagaagaacgagacaagctggatccagttccagcagcaaggtgctccgcaagcagggctgacttcttaccccaaagttcagtggcctcgcagtctagcagcgaaggcaagctggccactaagggcgacagctcagaacgggaacgtcgcgaacagaatttacctgctcgccctagccgggctcctgtgagtatctgtggaggaggcgagaataccagtaaatctgccgaggaacccgtagtccggccaaaaattaggaatctggcctctccaaattgtgtaaaacccaaaatcttcttcgacaccgatgatgatgacgatatgccgcactctacgtctcgctggcgggatacagcaaacgacaacgaaggacactctgacgggctggccagacgaggaagaggggaaagtagttctggctatcctgagcccaagtacccagaggacaagagagaggcgaggtccgatcaggtaaaacctgagaaagtgccaaggagacgtcgcacaatggccgaccccgatttttggacccactcagatgattattacaagtactgcgacgaagactctgacagcgacaaggagtggatagccgctctgaggcggaaatacaggtctagggaacagaccctgtcttccagcggagaatcatgggagacacttcccggtaaagaagaacgagaacctcctcaggctaaagtaagcgcctccactggcacttctcccggacctggcgcatcagcctctgctggtgcaggagccggagcaagcgctggttctaatggtagtaactacctcgaggaggtgcgggagcccagccttcaagaagagcaagcaagcctggaggaaggtgaaattccatggctgcaatatcacgagaatgacagctctagcgagggtgacaatgattctggacacgaactgatgcagcccggagtgtttatgttggacggcaacaacaacttagaagatgactcctctgtctcagaggatctggaggtggattggagtctcttcgacggcttcgccgatggacttggcgtggctgaggctatctcgtatgtggatccacagtttctaacatatatggcattggaagagcggctcgcccaggctatggagacggctctagctcacctcgagagcttagcagtggacgtggaagtggcaaacccgccagctagtaaggaaagtatagacgcactgccagagatactggttaccgaagaccatggtgccgtggggcaggaaatgtgctgtccaatctgttgctccgagtacgtgaaaggtgaagttgcaacagagttaccatgccaccactactttcataagccttgtgtgtctatctggctgcagaagagcggcacgtgtcctgtatgtagatgcatgttcccgccacctctttag

SEQ ID NO: 29017 - DNA, 612 bp, synthetic construct
  source 1..612: mol_type = other DNA; note = Synthetic coding sequence
atgcctgagcagttcagtgtcgccgagttcctcgccgtaactgctgaggacctgtccagtcctgctggcgctgccgcatttgcagccaaaatgcccagatacagaggcgctgccctggccagagaagagatccttgaaggggaccaagccattctgcaaagaatcaagaaggccgtgcgcgcaatccattcatccggcctgggacacgtggagaacgaagagcagtacagagaggcggtggagtccctggggaacagccatctgtcacagaactcccacgagctgagtacgggatttctgaatcttgccgtgttcactcgcgaggtcgcggcactatttaaaaacctaatacaaaatttgaataacattgtaagtttcccattagatagcttaatgaagggacaactcagagacggacgacaagacagcaaaaagcagttagagaaagcctggaaggattatgaagctaagatggccaagctggagaaggaaagagacagggctcgggtcacggggggaatccccgcatggaatcttgggattcccgctaaaccacatccaaccctgaaacgtgcatccgaaagcccacaggcccctcccgaccctgcctag

SEQ ID NO: 29018 - DNA, 1932 bp, synthetic construct
  source 1..1932: mol_type = other DNA; note = Synthetic coding sequence
atgggacaagaatccagcaagcccgtctggccaaaccctaccggtggatatcagagtaatactggacgaagatatggccgtaggcatgcctacgtatcctttcgccctccaacatcacagagggaaaggatcgcctctcagcgcaagacaaacagcgaggtgccgatgcaccgatcagctccttctcaaacaacaaagcgcagtaggtcacccttttctactacacgccgatcctgggacgattctgagtcgtcaggtactaatctcaatatagacaacgaagattacagcaggtaccccccacgggaatatcgggcatctggatcgaggaggggaatggcctacgggcatattgactcatatggcgctgatgactccgaggaggagggggctggccctgtcgaacgccctcctgtcagaggtaagaccgggaagttcaaagacgataaactctacgatcccgaaaagggcgctcggagtttggcaggtccgccacctcatttcagctccttcagccgcgatgttcgagaagaacgagacaagcttgaccccgtcccagccgctagatgttctgcgagccgggcagacttcctcccacagagcagcgtggcaagtcaaagcagctctgaaggtaagctggctaccaaaggcgacagctcggaacgggagcggcgagagcagaatcttcccgctcggccttccagggctcccgtgtctatctgtgggggtggagagaatacttccaagagcgcggaagaacctgttgttagacccaaaatacgtaatctcgcatcacccaactgtgtaaaaccaaaaatcttctttgataccgatgacgacgatgatatgccccactcgacgagccgatggagagatactgcgaatgataatgaaggtcactccgacggattagcgaggcgcggaaggggagagagcagtagcggataccctgagccaaagtatcccgaggacaaacgcgaagccaggagtgatcaggtgaagcccgagaaggtgccaaggcgaagacgtaccatggctgacccggacttctggacccacagcgacgattactataagtattgtgatgaggactctgactccgataaggaatggatcgcggctctgcgaaggaagtaccgtagcagggagcagacccttagctcatccggtgaaagttgggaaactctgccaggtaaggaagagcgagaaccccctcaggctaaggtctcggcttctaccggaacatctccaggcccaggcgcatcagcaagcgccggagctggggctggcgcttctgcaggatctaacgggagtaactacttggaagaagtgagggagccatccctacaagaggagcaggcatccctggaagagggcgaaatcccctggctgcagtatcatgagaacgattcttcgtccgaaggagacaacgatagtggccatgagttaatgcagcctggtgtctttatgttagacgggaacaataaccttgaagatgactctagtgtaagtgaagacctggaggtggactggtctctgttcgatggtttcgcggacggactcggtgtggcagaagcaattagttacgttgatccacagttcttgacctacatggcattggaagaacgcctagcgcaagccatggaaacggctctggcccacctggagtcactagctgtggatgtggaggtggcaaacccaccggcttctaaggagtctattgacgctttgccggaaatcctggtgaccgaggatcatggtgccgtcggtcaggaaatgtgctgccccatctgttgctccgaatacgtcaagggtgaggtggccaccgagctcccttgtcaccactacttccacaagccgtgcgtgagcatttggcttcaaaagtcaggaacttgtcccgtatgtcgttgtatgtttccaccccctctctag

SEQ ID NO: 29019 - DNA, 1368 bp, synthetic construct
  source 1..1368: mol_type = other DNA; note = Synthetic coding sequence
atgggacaggagtcctctaaacccgtgtggcctaatccaaccggtggctatcaatccaacactggacgtaggtacggcagaagacatgcctacgtgtcttttcggcctcctacatcacagcgtgaacgcatcgcaagccagaggaaaacaaacagcgaggtgcccatgcaccgatccgccccttcccaaacaactaaaagatcaagatctcccttttccactacacgtaggagctgggatgattctgagagttctggtacaaatctcaatatcgacaacgaagattacagcagcacaagccgctggcgtgacacagctaacgacaatgaaggtcactccgacggcctagcccgtcgtgggcgaggcgaatccagttctggctatcctgagcccaagtatccagaggacaaacgggaagcaagatccgatcaggtgaaacccgagaaagtgccacgacgtcggcgaaccatggctgaccccgatttttggacacactcagacgactactacaaatattgtgatgaagactctgactcggacaaggaatggattgctgcccttcgcaggaaatatagaagccgggagcagacgctgagcagctctggagaaagctgggagaccctgcctggcaaggaggagagggagcctccacaggccaaagtgtccgcatctacagggacttctcctggacctggggcatcagccagtgcgggagccggtgccggtgcttcagccggatccaacggctccaattacctggaagaggtgcgggaaccaagcttgcaggaggaacaggcatctctggaagagggtgaaattccctggcttcagtaccatgaaaatgacagcagtagtgagggagacaatgacagcgggcatgaactaatgcagccgggtgtcttcatgctggatggtaacaataatttagaagacgactcaagcgtgagtgaagacctggaagttgactggtctctgttcgatggcttcgccgatggcctaggggtagccgaggcaatttcgtacgtcgatccacagttcttgacttacatggctctggaagaacggctggcccaggccatggagacagccctagcccaccttgagtccctggccgtggatgtggaggtggccaatcctcccgcatctaaggaaagtattgacgctctcccagaaatcctggtgactgaagaccatggggcagtgggtcaagagatgtgctgccctatctgctgcagtgaatacgttaagggggaggtcgcgacagagctgccttgtcatcactacttccacaagccttgtgtgagcatctggcttcaaaagtccggcacctgccccgtgtgcaggtgcatgttcccccctccattatag

SEQ ID NO: 29020 - DNA, 390 bp, synthetic construct
  source 1..390: mol_type = other DNA; note = Synthetic coding sequence
atggcagagctgattcagaaaaagctgcagggcgaagttgaaaaataccaacagctacagaaagatctgagcaagtctatgtcggggaggcaaaaacttgaagcccagcttacagaaaataacattgtgaaggaagagcttgcgctactagatggatccaatgtcgtgttcaagttgctgggccctgtgctggttaaacaggagctgggcgaggctcgagctactgtgggaaaacggctggattacatcacggcggagatcaagcggtatgaatcccagctcagggacctcgaaaggcagtccgagcagcagagagagaccctggcacagctgcagcaggaatttcagagggctcaggccgctaaggccggtgctccaggcaaggcatag

SEQ ID NO: 29021 - DNA, 390 bp, synthetic construct
  source 1..390: mol_type = other DNA; note = Synthetic coding sequence
atggccgagctcatccaaaagaaattgcagggcgaagtggagaagtaccagcagctgcagaaagacttaagcaaatcgatgtccgggcgacagaagctggaggctcagctgaccgagaataacatagttaaggaggagctcgccttgttggatgggtcaaatgttgtgttcaagctactgggccctgttcttgtgaagcaggaactgggcgaggctcgcgctactgttggaaagcgcctggactacatcaccgcggaaataaagaggtacgagtcccagcttagggatctcgagagacagtcagaacaacagcgggagacgcttgcccagctgcagcaagagtttcagcgcgcacaggcagcaaaggctggggcacccggaaaagcctag

SEQ ID NO: 29022 - DNA, 390 bp, synthetic construct
  source 1..390: mol_type = other DNA; note = Synthetic coding sequence
atggccgaactcatccaaaagaaactgcagggggaagttgagaagtatcagcagctgcagaaagaccttagtaagagtatgagcggtcggcagaaactggaggctcaacttaccgagaacaacatagtaaaggaggagcttgcattgctggacggatccaacgttgttttcaaactacttggacctgtgctcgtcaagcaagagctaggggaagcccgagccactgtagggaagcgcctggattatattactgcagagataaaacgatatgagagccaactcagagatttggaaagacagagcgaacagcaacgcgagaccttggcacagctacagcaggagtttcagagagctcaggctgccaaggcaggcgcacctggtaaggcctag

SEQ ID NO: 29023 - DNA, 1512 bp, synthetic construct
  source 1..1512: mol_type = other DNA; note = Synthetic coding sequence
atgaaatgtgagcattgcacccgcaaagagtgttcaaaaaagacaaagactgacgatcaggagaacgtgtcagccgacgcacccagtcctgcgcaagagaatggggagaagggagaattccataagctcgcagatgccaaaatcttcctgtccgactgtcttgcttgtgactcatgcatgaccgcagaggagggggtgcagctgtcacaacagaatgcaaaggacttttttagagtgctaaacctgaataaaaaatgtgatacaagcaagcataaagttctagtggtgagcgtatgcccgcagagccttccttatttcgctgcgaaattcaatctttcagtgactgacgcttccaggcgcctgtgtggattcctcaaaagcttgggtgtccactacgttttcgacactacgatcgccgctgatttcagcattctggagtcacaaaaggaattcgttcggcgatacaggcagcattctgaggaggaaagaacacttcccatgctcacatccgcgtgtcctggctgggtgagatacgccgagagagtgctcggcagacctattacggctcacttgtgtacagcgaaatctccacagcaagtgatggggagccttgtgaaggactactttgctcgacaacaaaatctgagtccagagaaaattttccacgtgatcgtggccccatgctatgacaagaaactggaggccttgcaagaaagcctccctccggctctccatgggagtcggggtgctgactgcgtactcacatcggggaaagtcttaatctcgtggtggtgcaccccagtgattaccgctacccaggaagctgctgcacgggagtccctggaaccaggaaggcagcgcctacaacgggacaagattgcccctcttgatagctctctgggtggcggtggcgagatagcacagatcatggagcagggagacctatctgtacgggacgcagccgtggacaccttgttcggtgatctcaaggaagacaaggtgacgcgccacgacggggcaagcagtgatgggcatctggctcatatattccgtcacgcagccaaagagttgtttaatgaggacgtggaggaagtgacatacagggctctgaggaataaggatttccaagaggtgactctggagaagaacggcgaggtggtgctgaggttcgccgcagcctacggtttccgaaacattcaaaacatgatactgaagctgaagaaaggcaaatttccctttcacttcgtcgaggttcttgcgtgcgccggaggatgtctgaatggaaggggccaggcccagacgccagatgggcacgctgataaagccctcctgagacagatggaaggcatttacgcagacattccggtgagacggccagagtctagcgctcacgttcaagagctgtaccaagaatggctcgaaggcatcaactcacctaaggcgcgtgaagtacttcacaccacttaccaatcccaagaacggggaactcattcactggatatcaaatggtag

SEQ ID NO: 29024 - DNA, 348 bp, synthetic construct
  source 1..348: mol_type = other DNA; note = Synthetic coding sequence
atggcaacagaacccgaagcagccgaaccagttgtgcctagcctagttgacaggtattttacccggtggtataaacctgatgtcaaggggaaattctgtgaagaccactgcatcctccaacactctaacagaatatgcgttataaccctggccgaatcacatccagttcttcagtctggaaagacaatcaagagtatcagctatcagatttcgaccaattgtagcaggcttcaaaataaggtgtccggcaaattcaaaaggcgaatcatatacctggagaaggtggaggacgtgatcaagagaaagatgatgccactcagcctggggctgcacctgccccattcctag

SEQ ID NO: 29025 - DNA, 1566 bp, synthetic construct
  source 1..1566: mol_type = other DNA; note = Synthetic coding sequence
atgaatgtatcactatcacagaagaccgtgaagatccatagactgttccccatgctggccttctccgagccctatgagttcgtgagcctggagtggttgcagaagtggctagacgaatcgaccccaactaagcccattgataatcacgcgtgtctttgttcgcatgacaagctccaccctgacaagatcagcataatgaaacgcatcagcgagtacgctgcagatattttttattccagatatggagggggtcccagactaaccgtaaaggctttatgtaaagagtgcgtggtagaacggtgtcggatcctccggctaaagaatcaactgaacgaggattacaaaaccgttaataacctgcttaaggccgcagtaaagggcgatgggttttgggtaggcaaatcatctctgagatcctggcgccaattggctctggagcagctggatgagcaggacggtgatgctgagcagtcgaacggaaagatgaatggcagcactctcaacaaggatgaaagcaaagaggaacgcaaagaagaggaggaactgaatttcaacgaggatattctttgcccacacggcgagctgtgtatttcagaaaacgagcgcaggctggtatctaaggaggcctggtccaaactgcagcagtattttcccaaggctcccgagttcccttcctacaaggagtgctgttctcaatgcaagattctggaacgcgaaggcgaggaaaacgaggcgttacacaaaatgatcgctaacgaacagaagacctcactccccaatctgttccaagacaagaaccgcccatgcctcagcaactggcccgaagatacagacgtcctgtacatcgtgtctcagttctttgtggaggaatggcggaaattcgtacggaagccaactcgatgcagccccgttagctcagttgggaattccgccctattgtgtccccacggcggactgatgtttactttcgcctctatgactaaagaagatagcaaactgatcgctcttatttggccttcagaatggcagatgattcagaagttgtttgtggtggaccacgtaattaagatcactagaatcgaggtgggcgatgtcaatcccagcgagacccagtacatcagcgagcctaagctttgccctgagtgccgggaggggctcctgtgtcagcagcaacgcgatctcagagaatacacacaagctactatctacgtccataaagtggtggacaataagaaagttatgaaggactctgctccagagctgaacgtctcatcttccgagaccgaggaggataaagaggaggccaagcctgatggagagaaagaccctgattttaatcagataatgcacgcattctcagtggcacctttcgaccagaatctcagcattgacggtaaaatcctgtcagatgactgtgccactcttgggacactgggtgtgattccagagtctgtcatactcctgaaggccgacgaacctatcgctgattacgcagctatggatgatgtgatgcaagtgtgcatgcctgaggagggcttcaagggcacaggcctgttgggacactag

SEQ ID NO: 29026 - DNA, 984 bp, synthetic construct
  source 1..984: mol_type = other DNA; note = Synthetic coding sequence
atgacggctgtgggggctgagcgactcacctctgtacgagcgtggctgtcttgttgcggagcatgtgtttgcgtctttctgttcctatgtctgtgcgtgtttcctctgcgcgtacatgtgcatgtgtgggggggagagtgccgggtggatattgccgtgttcgtgagtaagcacatgatcgtcgctctaatgcatgtgaccggcgctgccggtcttctgcggctctgcgtaagggcctgcgtttgtatgagggtgtgcgcgaccgctcacatgtaccgagttgacaagtcgttcacctcacgtaggtcggtgtggaggagcgacgggcagaaccaacacttcccccaggcccttgacctgtccagagtgaacctcgtgccatcttacacaccatcgctctaccccaagaatactgatctgttcgagatgatcgagaaaatgcaaggatcacgaatggacgaacagcgatgcagttttccccctcccctgaaaacagaggaggactatatcccgtatccctctgttcacgaagtgctgggcagggaaggcccattcccattaattctcttaccccaatttgggggttactggattgaaggaactaaccacgagattacatccatccccgagaccgagccactgcaatctcctacaaccaaagtcaaactagagtgcaacccaacagcgaggatctaccgcaagcacttcttgggtaaggagcattttaattattattcattagatgctgctctaggccatttggtgttctccctaaaatatgacgtcattggagaccaggaacatctcagactcttgttgagaactaaatgtaggacctatcatgacgtcattccaatttcatgcctgacagagtttcccaatgtggtacagatggccaaacttgtctgcgaggatgtgaatgtagacagattctatccagttctttacccgaaagtatggctcgacctgggtaccgcacactag

SEQ ID NO: 29027 - DNA, 2079 bp, synthetic construct
  source 1..2079: mol_type = other DNA; note = Synthetic coding sequence
atgattgagaaaatgcagggatccaggatggatgaacagaggtgttctttcccaccacccctgaaaactgaggaagactacatcccgtatccttccgtgcacgaggtgttgggccgagagggccctttcccacttatcttgctcccgcaattcggaggctactggattgaaggcactaatcacgaaatcactagcattcccgaaactgaacccttgcaatcacctaccaccaaggtgaaactcgagtgcaatccgaccgcacggatctaccggaaacatttcctcgggaaagagcactttaattattattccctcgatgctgccctgggccacctcgtgttcagtctgaagtatgacgtgattggcgaccaggaacatctccggttgctcctacggacaaaatgtaggacatatcatgatgtcattccgatttcctgtctgaccgagttccccaacgtcgtgcagatggctaaactcgtgtgcgaggatgtgaatgttgaccggttctacccggtgctctatcctaaagctagccggttgatcgtgacatttgatgagcacgttataagcaacaactttaagttcggagtgatataccagaagcttggccagacatccgaagaagagcttttttcaactaacgaagaatctcccgcatttgtagaatttctggagtttctgggacagaaggttaaactgcaggattttaaaggttttagggggggacttgatgtgacccacggccagactgggacggagtccgtctactgtaattttcggaataaggagatcatgtttcatgtatcaactaaactgccctatacagagggggatgcccaacagctgcagcgcaaacgtcatatcgggaacgatatcgtggccgtcgtgttccaggatgagaataccccattcgtgccagacatgatcgcatccaatttcctccacgcttatgtggtggtccaggctgagggcggaggaccagacgggcctttatacaaggtgtctgtgactgcccgtgacgacgttccattttttggccctcccctgcccgatccagcagtcttccggaagggtcccgaatttcaggaatttctgctgaccaaacttattaacgctgagtacgcctgttataaagctgaaaaattcgccaagctggaggaaaggacccgcgctgctctactggagacactatatgaggaattacatatccattcacagtccatgatgggcctgggcggagacgaggacaaaatggagaacggttcaggaggaggtggattcttcgagtcctttaagcgcgtcatcagatctcgcagtcagtcaatggacgcaatgggactttcaaacaagaagcccaacacagtgagcacaagccatagtggctctttcgcccctaacaatccagacctggctaaggctgccggaatctcacttcttatacccggaaagtccgcctctcggtttggccgtcgaggctctgccataggtattggaacagtcgaagaagtggttgtgaggggggctgctgggagcgggggatgcctacacgcactgttttccgctaggtcgcaggatgggggtcatatcggcgacgtggctcctcttccacccggtcaggcccctggcagggctggctggtctgggggatcttcagatgggacacagcatctcttatggggtctcagcctgattgtgccaggcaaatcaccgaccaggaagaaatcaggtcctttcggctccaggcggtcatctgctatcggcatcgagaacatccaggaagtccaagaaaagagagagagcccgccagctgggcaaaagacccctgacagcggccacgtgagccaggagcccaagtctgagaatagctccacgcagtcctcccccgagatgccaaccacaaagaacagagccgagaccgcagcgcagcgggctgaagctttgaagcttcccctgttagtccagtgtcagcaactgcgccagcggggtgggggagatggtgggtgcggtcgcagaggccaccggccaggagagcgcgtcatactgagaaacacaccccaggccggactcctgcacttatag

SEQ ID NO: 29028 - DNA, 2085 bp, synthetic construct
  source 1..2085: mol_type = other DNA; note = Synthetic coding sequence
atggcccagctgaggccggctgtcccccctggccgaccacgccgagggtctctgccagccggagcaagttggcagaatacagacctctttgaaatgattgaaaagatgcaggggagtaggatggatgaacagaggtgctcctttccaccgcctctgaaaaccgaggaggactatatcccctatccatctgttcacgaagtgcttggcagagagggaccttttcctttgattctcctgccgcagttcgggggatattggattgagggtaccaaccacgagataaccagtatccccgagactgagcccctgcagtccccaactaccaaggtgaaactcgagtgcaatccgaccgcccgaatttaccgcaaacatttcctgggcaaggagcactttaactactactctctggatgccgctttaggtcacctcgtcttctcccttaaatacgatgtcatcggtgatcaagagcacttaaggctgctccttagaaccaaatgtcggacatatcatgacgtgattcctattagttgcctcactgagtttccaaacgtcgttcagatggcgaaactagtttgcgaagatgtcaatgtggacagattctacccagtgctgtaccctaaagcatctagactcattgttactttcgatgagcatgttatctccaacaatttcaaatttggagtgatttaccagaaactcggacaaacgagtgaggaagagctgttttcgaccaacgaggagagcccggcttttgtcgaattcctggagtttctgggacagaaagtgaagctgcaggattttaagggatttcgtggaggattagatgtcacccatggccagaccggcaccgaaagcgtgtattgtaacttcagaaacaaggagatcatgtttcacgtgtctactaagcttccttacaccgaaggcgatgctcagcagcttcagcgcaaaagacacatcgggaacgatatcgtagctgtggtgttccaggacgagaacacacctttcgtgccagatatgattgcatccaacttcttgcacgcgtatgtggtagtccaggccgaagggggagggcctgacggcccactgtataaggtttctgtgacagcccgagatgacgtgccattcttcgggcctcctttaccagacccagctgtgttccggaaaggcccagaatttcaggaatttttgctcaccaaactgatcaatgccgagtatgcttgttacaaagccgagaaatttgctaagctggaagaacgcacgcgcgctgccctccttgagaccctgtacgaagaattacacattcacagccaatctatgatgggactaggaggggatgaggacaagatggagaacggcagcggtggagggggtttcttcgaatctttcaagagagtgataaggtcacgcagtcagagcatggacgccatggggctttccaacaagaaacctaacaccgtctctacctctcactctggatcatttgctcccaataatcccgatctcgctaaggcagcagggattagtttaatcgtgccgggaaaatcacccacacgcaagaagagtggtcctttcgggagtagacggtcctccgcaatcggtatagaaaatatccaggaagtacaagaaaaaagggagtctcccccagcagggcagaaaactcctgactccgggcacgtgtcccaggagcccaagtccgaaaatagcagtactcagagctcacccgagatgcccacgacaaagaacagagccgaaacagccgctcagcgggcagaggcactgaaggacttctcacggtcctcctcatcagcttcgtcctttgccagtgtcgtcgaggagacggagggtgtagacggcgaggacacaggcttagaatcagtgtcgagtagcggcactcctcataagcgcgactctttcatatattccacctggttggaggacagcgtttccacaaccagcggcggtagtagccctggtccctcacgaagcccacaccccgatgcgggaaaattgggtgatccagcttgtccagagataaaaattcagcttgaggccagcgaacagcacatgccccaactggggtgctag

SEQ ID NO: 29029 - DNA, 2082 bp, synthetic construct
  source 1..2082: mol_type = other DNA; note = Synthetic coding sequence
atggcccagctgcgtcccgctgtgccgcctggccgtcccaggcgcggatcattacccgcaggtgcctcttggcaaaacaccgacctcttcgagatgattgaaaagatgcagggatccagaatggatgagcagcgatgctccttccccccaccgctgaagactgaggaagactatattccatacccctccgtacatgaagtgttgggaagggagggccctttcccactgatattgctgcctcaatttggtgggtattggattgaggggactaatcacgagatcacttccatccccgagactgaaccgctgcagagtcctaccaccaaggtgaaactcgagtgtaatcctaccgcaaggatctatcgtaagcattttctgggtaaggaacattttaactattactctctcgatgccgcactgggccacctggttttttcattgaaatatgatgttatcggggaccaggagcacctgcgccttcttctgcgtacaaagtgccggacctaccatgatgtgatccctatctcctgcctgaccgagttcccgaatgtggtacagatggccaaactcgtgtgcgaggatgtgaacgtagaccggttctatccagtgctttatcctaaggcatcccggctcatcgttacttttgatgaacacgtgatttccaacaactttaagttcggtgtcatctatcagaaactgggacagacttccgaggaggaattattcagcaccaacgaagaaagcccagcattcgtcgaatttctcgaatttctgggtcagaaggtcaaactgcaagacttcaaaggttttaggggtggactagacgtgacacatgggcagacaggcactgagtccgtatattgtaacttccgtaataaagagattatgttccatgtttccaccaaattgccatatacggaaggtgatgcccaacttcagcgaaagagacatattggaaatgatattgtggctgttgtctttcaggatgaaaataccccctttgttcccgatatgattgcctccaactttctgcacgcatatgtggtagtgcaggctgagggaggaggacctgatggcccattgtataaagttagtgtaactgcccgagatgacgtgccttttttcgggcctcccctccccgaccctgctgtctttcgcaaaggacccgagttccaggaattcctcctcaccaaactgatcaatgctgaatacgcttgctacaaggccgagaagtttgccaagctggaagaaaggacccgcgctgcgctgttggaaaccctatatgaggagctgcacattcattctcagagcatgatgggactcggcggagacgaagataaaatggagaatggctcgggcggaggcggttttttcgagtcctttaagcgggtcatccgttcacgcagccaaagcatggacgccatgggcctttcgaacaagaaacccaacaccgtatcgacgtcacacagcggctcattcgctcccaataaccccgacctcgcaaaggctgccggtatttcgctcatcgtcccgggtaaatccccgactcggaaaaagagtgggccatttggatctagaagaagcagcgctattggaattgagaatatccaagaggtccaagagaagagggagtcacccccagccggtcagaaaacgcccgattcaggtcacgtgtcccaggaaccaaagagcgagaattcttcgacacagagctctcccgaaatgcctacgacgaagaacagggccgagactgccgctcagagagctgaagctcttaaggattttagccgctcatcatcctctgcctctagctttgcctctgttgtggaagagacagagggtgtggatggagaagacacaggactcgaatcggtgtcatccagcggcactcctcacaaacgggatagcttcatctactcgacatggctggaagactccgtgtcaaccacgagtgggggaagctctcccggacctagtagatctccccatcccgatgctggcaagctgggagaccctgcctgtcccgagattaagatacagctggaagccagcgagcagcacatgcctcagctgggttgttag

SEQ ID NO: 29030 - DNA, 1992 bp, synthetic construct
  source 1..1992: mol_type = other DNA; note = Synthetic coding sequence
atgatcgagaaaatgcagggctcgcgcatggatgagcaaagatgttcattccctccaccactgaagaccgaagaggactacatcccttaccctagcgtgcacgaggtcttgggaagggaagggcctttcccccttatactcctcccccaatttggagggtattggatcgaagggacaaaccacgaaattacttctatcccggaaaccgaacccctgcagtctcctacaaccaaggtgaagttggagtgcaatccaaccgcccgaatctacagaaagcactttctcgggaaggagcacttcaactattattcgctggacgcggctctgggacatttggtctttagcctgaaatatgacgtgatcggggaccaggagcatttgcgtctactgctgcggaccaaatgtcggacctaccacgatgtgattcccatatcgtgtcttacagagttccccaacgtggtgcagatggctaaacttgtctgtgaagacgtcaacgtggacagattttatcctgtgctatacccgaaggccagtagactcatagtcacttttgacgagcacgtcatcagtaataatttcaaatttggggtgatatatcaaaagcttggccagaccagcgaagaggaattattctccacaaatgaggaaagccccgctttcgttgagttcctagaattcttgggccagaaggtgaaacttcaggattttaaggggtttcgcggaggactcgatgtgacccacggtcagacaggaactgaaagcgtttattgcaattttcggaacaaggagatcatgtttcacgtgagcaccaaacttccttacacagagggcgacgcccaacaattgcagcgcaaacggcatattgggaacgatatcgtagctgttgtctttcaggatgagaacacaccatttgtgcccgatatgatcgcttcaaacttcctgcatgcctatgtggttgtgcaggcagaaggcggaggaccagatggacccctctacaaggtcagcgtcaccgccagagacgacgtgccttttttcgggccacccttgcctgacccagctgtgttccggaaaggacctgagttccaggaatttctgctaacaaagttaattaatgcggaatacgcttgctataaggcagagaaatttgctaaactcgaggaaaggacccgagccgctctgctggaaaccctatatgaggagcttcatatccacagccagtccatgatggggttgggcggagatgaagataaaatggaaaatggaagtggtggcggaggattttttgaatccttcaagcgagtaatcaggagtagatcccagagcatggacgccatggggctgagtaataagaagccaaatacagtctcaacctctcactccgggtcctttgcaccaaataatcccgatttggctaaggctgctggaatttcgctcatcgtgccgggtaaaagccccacaaggaaaaaatccggccctttcggttcccgccgtagttctgcaattgggatcgaaaatatacaggaggttcaggaaaagagggagagcccccctgcaggccagaagacaccagactcaggccacgtaagccaggagcccaagagcgagaactcgagtacacagtcctcccccgagatgccgacgaccaaaaaccgcgctgaaaccgccgcacagagggccgaagccctcaaagatttcagcaggtcatccagctcagcttcctccttcgcctctgttgtggaggagacggaaggagtggatggggaggacacaggactggaatctgtctcttcatctggtactccccacaaacgcgactccttcatctactctacgtggttggaggactccgttagtactacttccggtggatccagtcccggaccttcgcgtagtccgcaccccgatgctgggaaactgggcgaccctgcctgtcccgagattaaaatacagctggaagccagcgagcagcacatgccgcagctcggatgctag

SEQ ID NO: 29031 - DNA, 744 bp, synthetic construct
  source 1..744: mol_type = other DNA; note = Synthetic coding sequence
atgctcgtgctgcggtccgccttgacaagggctctagcaagtcggactctcgcgcctcagatgtgttcaagctttgctaccgggccacggcagtacgacggtattttctacgaatttagatcctattatctcaagccatccaagatgaatgagtttttggagaattttgagaaaaatgcccacctccgaaccgcacacagcgaactggtaggttactggtccgtggagttcggcggaagaatgaacacggtctttcacatatggaaatacgacaacttcgcccatagaaccgaagtaaggaaggcattggcaaaagataaagaatggcaggagcagttccttattccgaacctggccttgatagataagcaagagtcagaaattacatacttggtaccttggtgtaagctcgagaaaccccctaaagagggggtttatgagctggccacttttcaaatgaagccgggaggccctgccctttggggggatgccttcaagcgcgcagttcatgctcatgtgaatctcgggtatacgaaactcgtaggagtctttcacaccgaatatggagctcttaatcgggtccatgttctctggtggaatgagagtgccgactcgagggcggcagggagacacaagtcacacgaggatccacgcgtagtcgcagccgtgcgagagagcgtgaattacctggtctcccagcagaatatgcttctgataccaacttcctttagcccccttaagtag

SEQ ID NO: 29032 - DNA, 3594 bp, synthetic construct
  source 1..3594: mol_type = other DNA; note = Synthetic coding sequence
atgcacataaaaagcattatactggagggttttaaaagctatgctcagcgaacagaggtcaatggcttcgaccctttgtttaacgccatcactgggctgaacggcagtggaaagagtaatatactcgactctatctgttttctcttgggtatcagcaatctgtcccaggtgagggcatccaatctacaggatctggtctataaaaacggccaggccggaatcactaaagcaagcgtatcaatcaccttcgacaactcagataaaaaacagtcgcctcttgggtttgaggtgcatgatgagatcacagtgacccgtcaggtggtgattggcggtcggaacaagtacttaatcaacggcgtaaacgcaaacaatacacgggtacaggacctgttctgtagcgttggactcaacgtgaataaccctcacttcctgattatgcagggacggattactaaggtactcaatatgaaaccccctgaaattctttcaatgatcgaggaggctgccggaactaggatgtacgagtacaaaaaaattgcggcacagaaaactatagaaaagaaagaggccaagttaaaggagattaaaaccattctggaggaagagattacaccgaccatacaaaaattaaaagaggagcggagctcatatctcgaatatcaaaaagttatgcgggagattgaacatctgtcaagactctatatagcatatcagtttctcctggctgaagataccaaggtgcgatcagccgaagagttgaaagagatgcaagataaggttatcaagctgcaagaagagctgtcagagaacgataagaaaattaaagcactaaaccacgagatcgaggagctggagaaacgcaaagacaaggagaccggcggtatactgagatctctcgaagatgccctggctgaggcccaacgcgttaacaccaagagccagagcgctttcgacctgaagaagaaaaacttggcttgtgaagagtccaagaggaaggagttagaaaagaacatggtagaagacagcaagacactggcggctaaagagaaagaggtgaaaaagataacagacgggctccatgcactccaggaagcaagtaataaagatgccgaggcactggccgctgcacagcaacactttaacgctgtctcggccggacttagttcaaacgaggatggggcagaggctacactagcaggacagatgatggcctgcaagaatgacatctctaaagctcagaccgaggctaagcaggcccagatgaagctcaagcatgcccagcaggaactcaaaaacaagcaagcggaggtgaagaaaatggactctgggtatcgcaaggaccaggaagcacttgaggctgtcaagcggcttaaggaaaaactggaggccgagatgaaaaaactgaactatgaggaaaacaaggaagagtccctcttggagaagcgcagacagctcagccgcgacatagggaggttgaaagaaacctacgaggccctactcgccagatttcctaacctgagattcgcctataaggacccagaaaaaaattggaataggaactgtgtgaaaggccttgtcgcgagtctgatctcagtgaaagatacctcagccacaactgctctcgagcttgtggccggagaacggctttataacgtggtcgtcgacacagaggtcactggaaaaaagcttctagagcggggagagctgaagcgcagatatacgatcataccactaaacaaaatttctgccaggtgcattgccccagaaacacttcgcgtcgctcagaacctcgttggacccgataatgtccatgtggcactgagcttggtcgagtacaagcccgagctccagaaggccatggaattcgtttttggcaccacgttcgtgtgcgacaatatggacaatgcaaagaaggtggccttcgacaaaagaatcatgacccgtactgtgacgctgggcggagacgtatttgatccccatggaacgctgagcgggggagccaggtcacaggctgcaagtatcttgacgaaatttcaggagttaaaagacgtgcaagatgaactgcggatcaaagaaaacgaactgagggctcttgaagaggaactcgcaggattgaagaacaccgccgaaaaataccgacagttgaaacagcagtgggaaatgaaaacggaggaggccgacttactgcagaccaagctgcagcagtcatcctatcataaacagcaggaggagctcgatgcattgaagaaaacaattgaggagtctgaggagaccctgaagaacaccaaggagatccagagaaaggccgaagagaagtatgaagtactagaaaataaaatgaagaatgcagaggccgagcgggaacgcgagctgaaagacgcccagaaaaagctggactgtgctaaaaccaaggccgatgcgagctctaagaagatgaaggagaaacagcaggaagtggaagccattacacttgagctcgaagaactgaagagggaacatacgagctacaagcagcagctggaggccgtcaatgaggcaataaagagctatgaatctcagattgaggtcatggcagcagaagtggccaagaataaggagtctgtaaataaagctcaggaagaagtgacaaaacagaaagaagtcataacagcccaggatacagtcatcaaggccaagtatgcagaagtggccaagcataaagaacagaataacgattcacagttgaaaattaaggagctcgaccataacatcagcaagcataagcgtgaggcagaggacggcgctgccaaggtgtcaaaaatgctgaaggactacgactggattaacgctgaacgccacttatttggccagcctaactcagcttatgacttcaagacgaataatcccaaagaggcagggcagaggttacagaaacttcaagagatgaaagagaaacttggtcggaatgtcaatatgcgagccatgaacgtgcttactgaagctgaggagagatacaacgatctgatgaaaaaaaagcgaattgtggagaacgacaagtctaaaattctcaccacaatcgaggacctggatcagaagaagaaccaagctctgaatattgcgtggcagaaagtgaataaggactttggcagcatttttagcactctgcttccaggagcaaacgccatgctggcacccccagaggggcaaacggtgcttgatgggctggaatttaaagtggcccttggaaacacctggaaggagaatttaaccgagctcagcggcggacaacgctccttggtcgcgctgagtctgattctctctatgctcctctttaaacctgcccctatatatatcctggacgaggttgacgctgccttggatctatctcacacccagaatattggccagatgctgagaactcatttcacccatagccagtttatcgtggtaagtttgaaggagggcatgttcaataacgccaacgtgctttttaagacgaagtttgtggatggtgtctccactgtcgcaagattcacgcagtgccagaacgggaaaatctcgaaggaggccaaatccaaggccaaacctcctaaaggagcgcacgtcgaggtgtag

SEQ ID NO: 29033 - DNA, 3594 bp, synthetic construct
  source 1..3594: mol_type = other DNA; note = Synthetic coding sequence
atgcatataaagtccattatactggagggttttaagagctacgctcagcgtactgaagttaacggctttgaccccttgtttaacgctatcacaggacttaatgggagcggtaaatctaatatactggattctatttgtttcttgttggggatctcaaatctgagccaggttagagcatctaatctgcaggacctggtttataagaatggccaagccggaatcactaaggcttcagtttcgattacattcgataactctgataagaaacagagccccctgggattcgaagtacacgacgagatcaccgttacaagacaagtcgtaataggcggtcggaataagtacctcattaacggggtgaatgcaaacaacaccagggttcaggatctgttctgttctgtgggcctcaacgtgaacaatccacactttctcataatgcaggggcgaatcaccaaggtgcttaatatgaaacctccagagatcctgtcaatgatcgaggaggcagcgggaacccggatgtatgaatataagaaaatcgcagcccagaaaactatcgagaagaaggaagctaagctgaaagagatcaagacaattctcgaggaggagatcactccaactatccagaagctcaaagaggagaggtcatcttacttggaatatcagaaggttatgcgcgagatcgaacaccttagcaggttgtacatcgcttatcaatttttgctggccgaggataccaaggttcgatcagctgaggaactgaaggagatgcaggacaaagtcattaagcttcaggaggagcttagtgagaacgacaaaaaaattaaggccctgaaccatgagattgaggaactggagaaacgtaaggacaaagagacaggcggtatcttgagatcgcttgaagatgctctggcagaagcccagcgggtgaacacaaagtcacaatccgctttcgatttgaaaaagaaaaatctcgcctgcgaagaatccaaaaggaaagagttagagaaaaacatggtcgaggattccaaaacgctcgccgctaaagagaaagaagtgaaaaagatcaccgatggcctccatgctctgcaggaggcgagcaacaaagatgccgaggccctggctgcagcccagcagcattttaacgctgtgtcggctggcttgagctcaaacgaagacggagcagaggccacactggccggacagatgatggcatgtaaaaatgatattagtaaggctcagacagaggctaaacaggcacaaatgaagttaaaacacgcgcagcaggagctgaaaaacaaacaggctgaggtcaaaaaaatggactcaggatacagaaaagatcaagaggcactggaagccgtcaagcgcctgaaagagaagcttgaagcagagatgaaaaaactcaattatgaagagaacaaggaagaatctctgctggaaaaaagaagacagttgtcgagagatatcgggcgtctcaaggaaacctacgaagccctcctggcccgatttcctaacctacgctttgcatataaagatcccgaaaagaattggaatcggaactgtgtcaaagggttagtggcctctctcatttccgtgaaggatacatcggccacaactgccctcgagctggttgccggagagcgtctgtataacgttgttgtcgacaccgaggttaccggcaaaaagttgcttgagcgaggtgaactgaaaagaagatacaccattataccattgaataagatttctgctaggtgtattgcacccgagaccctgcgggtcgcccagaatttggttggcccagataacgtacacgtggcgcttagcctagttgaatacaagcctgagctgcaaaaggcgatggagttcgtgttcggcactaccttcgtgtgtgataacatggacaacgcgaagaaggtcgcttttgataaaaggataatgaccagaacagtgacactgggcggtgacgtgtttgacccacacgggaccctgagtggaggagcaaggtcacaagctgcgagtattttaactaagtttcaggagttgaaggatgtccaggacgaactgagaattaaagaaaacgagctgagggccttggaggaggagctcgctggattaaaaaataccgccgaaaagtaccgccagctgaagcagcaatgggagatgaagacggaggaagcagatctgttgcagacaaagctgcagcagtcttcataccataagcagcaggaggagctcgacgctctgaagaaaacaattgaagaaagtgaggagacactgaagaatacaaaggagattcaaaggaaggctgaagagaagtacgaagtactggagaacaagatgaaaaatgccgaggccgaaagggaaagagagttaaaagatgcccagaagaaactcgactgcgcaaagaccaaagccgacgcatccagcaagaaaatgaaggagaaacagcaggaagttgaggcaattaccctcgagctggaagaattgaaaagagaacacacatcatacaagcagcagcttgaagccgtgaacgaagcaataaagtcgtacgaaagtcagatcgaggtcatggccgcagaagtcgcgaagaacaaggaaagcgtaaacaaagcccaggaggaggtgaccaaacagaaagaggtgatcacagcacaggatacagtcatcaaagctaaatacgcagaggtggccaagcacaaagaacagaacaacgatagtcagcttaaaatcaaggagttagaccataacattagtaagcacaagcgagaggctgaggatggcgcagcgaaggtgtccaagatgctcaaggattatgactggatcaatgcagagcgtcacctttttggccaaccaaatagcgcttatgacttcaagaccaacaaccctaaggaggcgggtcagaggctccagaaacttcaggaaatgaaggaaaaactcggcaggaacgtaaatatgagagctatgaatgtcctaacagaagctgaggagcgttacaatgatctgatgaagaagaagcgtattgtggaaaatgacaagtcaaagatcttaactacaattgaggatctcgaccagaaaaagaatcaggctctgaatatcgcctggcagaaggtgaataaggactttggctccatctttagcacactcctgcccggtgcaaatgccatgctcgccccacctgaggggcagaccgttctggacggcctggaattcaaggtagccttaggaaacacatggaaagagaatctgactgagttatccggcggacagcggagcctggttgccctctctctcattctgtccatgctcctgtttaaaccagcccctatttatatcctggacgaagtagatgcggcattagatttgtctcacacacagaacattgggcagatgctaaggactcacttcacccactcccagttcattgtcgtgagcctgaaggagggaatgtttaacaacgctaacgtcctatttaagactaagtttgttgacggcgtctctacagtagctagatttacacagtgtcagaacggcaaaatctctaaagaggcaaagagtaaggctaagcctcccaaaggagcccacgtcgaggtatag

SEQ ID NO: 29034 - DNA, 1047 bp, synthetic construct
  source 1..1047: mol_type = other DNA; note = Synthetic coding sequence
atgtcgttaccccgattccaacgcgtgaacttcggaccgtatgacaattacattcccgtgagcgagctgtccaaaaaatcatggaaccagcaacactttgcactcctctttcccaaaccacaaagacctggcacaaaacgccgatccaagcccagccaaatccgcgataacaccgtgtcaatcattgacgaggaacagctgagaggggatcgcaggcagccattgtggatgtatcgtagcctgatgcgcatctcagagcgtccttctgtgtacttggccgcaaggcgccagcctctaaagccaacaaggactgtagaggtggattccaaggcggctgagatagggaaaaaaggagaagataaaaccacacagaaggatacgacagactcagagtctgaactgaagcagggaaaaaaggattcaaagaagggcaaggacatcgagaaagggaaagaagagaaactggatgcgaaaaaggattctaagaagggcaagaaagacgccgagaaaggaaaggactctgccactgagtcagaggacgagaaaggcggagccaaaaaagacaataaaaaggataagaaagatagcaataagggaaaagactctgccaccgaaagcgaaggagagaaaggcggaacagaaaaggactcaaagaaggggaagaaggactccaaaaaaggcaaagatagtgccatcgaattacaagccgtaaaagctgacgagaaaaaagatgaggacggcaagaaggacgctaataagggcgatgaaagcaaggacgcaaaaaaagatgccaaggagataaaaaagggcaagaaagacaaaaaaaagccgtcgagtacggattcagacagtaaagatgatgtcaagaaagaatcaaagaaagacgccacgaaagatgcgaaaaaagttgccaagaaagacactgagaaggaatcggccgacagcaagaaggatgccaaaaaaaatgccaagaaggatgccaagaaagatgcaaagaaaaatgcaaaaaaggacgaaaaaaaggacgccaagaaaaagggcaagtag

SEQ ID NO: 29035 - DNA, 1515 bp, synthetic construct
  source 1..1515: mol_type = other DNA; note = Synthetic coding sequence
atgaacagccagccccagactaggtctcccttcttccagcgaccacagattcaaccccctcgagcgaccattcccaatagtagcccttccatcagacctggcgctcagactccaacagctgtttaccaggccaatcagcatataatgatggtgaaccacctcccgatgccctacccagtgcctcagggcccacagtattgcatcccgcagtaccggcatagtggacctccctatgtcggtccaccccagcaatacccagtacaaccccctggacccggtcccttttaccccggaccaggcccaggtgactttcctaatgcttatggaaccccattctacccttcccagcccgtttaccagtcagctcccatcattgtaccaactcagcagcagccaccccctgctaaacgtgagaaaaaaacgattagaatccgggacccaaatcagggcggaaaagatatcactgaggaaatcatgagcggagggggatcccggaacccaactccccctatcggtcgccctacctccacacccacccctcctcagcagctgcctagccaggtgccagaacactcccccgtggtgtatggcactgtggaaagtgcccatctcgctgcatcaacccctgtgaccgccgcatccgatcagaaacaggaagaaaaacccaagcctgaccctgtgctgaagtccccttcccctgtgctgcggctggttctaagtggtgaaaagaaggagcaagaagggcaaacgagcgagactaccgcgattgtgtctatcgccgagttaccactgccaccctcacctacaaccgtgtcaagcgtggctcgaagcaccatagcggctccaacctcaagtgccttgagtagccagccaatcttcactactgcaattgatgaccggtgtgaactgtcttctccaagagaagatactatcccaatcccctctttgaccagttgtaccgaaacttctgatccgctgcccactaacgaaaacgatgacgatatttgcaagaagccatgcagtgtggcgccaaacgacattccacttgtttcaagcaccaacctgatcaatgaaatcaacggtgtgagcgaaaagctgtctgctaccgaatcgattgtggagattgtcaagcaagaagtcctgcctctgacacttgagctggagatccttgagaatcctcctgaagagatgaaactcgagtgtatcccagctcctatcactccctctactgtaccgtcctttcctcccacccctccgaccccccctgctagtccaccacatactccggtgattgtgccggcagcagcaaccacggtttcctcacctagtgccgctatcaccgtgcagcgagtcctagaagaagatgagtcaattcggacttgtttgagtgaagacgctaaagagatccagaataaaattgaagtggaggctgatgggcagaccgaggagatactggacagccagaatttgaacagcaggcgcagcccggttcccgagacctctaacgagtgttag

SEQ ID NO: 29036 - DNA, 744 bp, synthetic construct
  source 1..744: mol_type = other DNA; note = Synthetic coding sequence
atgctgaagttccttgtctggttcctacaatggtgtgtgtgtgtgttggtgcagccagccaaagaacttcttcactgcttaaagatgcagatgagaatcagcaagtacactaagtgtctgcaggcacagatcgctatcacggtgcccaagacttggaagaagccaaaagacagaacccggacgaccgaggagatgctggaggccgagctggaactgaaggcggaagaagaattatcaattgataaggtcttggaatccgagcaggacaaaatgtctcagggattccacccagagagggatccaagcgatcttaaaaaagtgaaagccgtggaagaaaacggggaagaggccgagcccgtgcggaatggggcagagtccgtgtctgagggcgagggcatcgacgccaattccggtagcaccgactcatctggcgatggagtaacattccccttcaagcccgaaagttggaagccgaccgataccgaaggcaaaaaacaatacgaccgcgaatttctccttgacttccagtttatgcccgcatgcatacagaagccagaggggctgcctcctatttcggacgtagtattggacaaaattaaccagcctaaactgcccatgaggactctcgacccaaggatcttgccacggggtccagacttcactcccgcattcgcagactttggaagacagacacctgggggacggggtgtgccggtttctgcgagctccctgcagcttacctag

SEQ ID NO: 29037 - DNA, 3918 bp, synthetic construct
  source 1..3918: mol_type = other DNA; note = Synthetic coding sequence
atgaatagtcagcctcaaacgagatcccccttctttcagcgcccacagattcagccgcctcgtgcaactatacccaactcatcccccagtatccgcccaggtgcccagacacccacagccgtgtaccaggcgaaccagcatataatgatggtgaatcacctgccaatgccttaccctgtcccacagggcccacaatactgcatcccccagtacaggcactccggcccaccttacgtgggaccacctcagcagtatcccgtccagccccctggcccagggcctttttatccagggccagggccaggtgacttccccaacgcctatggcacccctttctatccttcacaacccgtataccagagcgcccctatcatcgtgccaacgcagcagcagcctcctcctgcgaaaagagagaaaaaaacaatacgtatcagggaccctaatcagggtggtaaagacataacggaggagattatgagtggcggaggcagccgaaaccccaccccccctattggacggccaacatcaacccctactcctccccagcaattgcccagccaggttcccgagcatagtcctgtggtgtacgggacagttgaatcagcgcacttagctgcctccactcctgttactgctgcttctgaccagaagcaggcacaaatagccatcactgtacctaagacctggaagaaaccaaaggaccgcacacgaacaacagaagagatgttagaggccgaattggagctcaaggccgaagaagaactcagtattgacaaggttctagaaagtgagcaggacaaaatgtcccagggattccaccccgaacgggaccctagcgatttgaaaaaggtaaaggctgtcgaggagaatggtgaggaggcagagcctgttcgaaacggcgctgaatctgtctcagagggggaaggtatcgacgccaattcgggtagcacagactcttctggagatggagtgactttcccattcaagccagaatcttggaaacctactgacacagagggcaaaaagcagtatgatcgggaatttctcttagacttccagttcatgcccgcttgtattcagaagcctgaggggcttccacccatctcagacgtggtcttggacaagatcaatcagcccaaactgccgatgcgcacgctggacccaagaatcctccctcgaggaccggatttcacccccgcatttgctgattttggacgccaaactccgggaggccgtggagtccctctcttaaacgtaggtagccgaagatcacagcctgggcagcgacgggagcctaggaagataattactgtatctgttaaggaagatgtgcatttgaaaaaagctgagaatgcctggaagccaagccaaaagcgggatagccaggcagatgatcccgagaacattaaaacccaggagcttttccggaaggtgcgtagtattctgaacaagctgaccccccagatgttcaatcagttgatgaaacaagtctctggtttgaccgttgataccgaggagcgtttgaaaggggtgatcgatctcgtgttcgagaaggcaatcgacgagccttcatttagcgttgcttacgccaacatgtgcagatgtctggtgaccttaaaagtcccaatggccgacaagcccggaaataccgtcaactttcgcaaactcctattaaaccgatgccaaaaggaattcgaaaaagataaggctgatgatgatgtgttcgaaaagaagcagaaagaattagaagccgctagtgcaccagaagagcggactaggctccacgacgaactggaagaggcaaaagacaaggcaagaaggcgaagtatcggtaacatcaaatttattggggagctgttcaaactgaagatgctgactgaggccattatgcatgactgtgtggtaaagctgttgaagaatcacgacgaggagtcgctcgagtgcctctgtagattgctgaccaccatcggcaaagacttagatttcgaaaaagctaaaccccgaatggatcagtactttaatcagatggaaaaaattgtgaaggaacgcaaaacgtccagtcgcattcgatttatgctccaggatgtgatcgatctgcgactgtgcaactgggtgtcccggagggcagatcagggacctaagacaattgaacagatacacaaagaggccaaaatcgaggaacaggaagaacagcgaaaggtacagcagctgatgactaaggaaaagcgtagaccgggagtacaacgcgttgatgaagggggatggaacacagtacaaggcgcaaagaattcgcgcgttctggacccctcgaagttccttaagatcaccaaacccactatcgacgaaaagatacaactcgtgcccaaagctcagctgggctcctggggtaagggttcaagtggaggcgcaaaggcctcagaaactgacgctctgcggagctccgctagtagtctgaatagattctccgccctgcaaccacccgcaccctccggctcaacaccgtcaacacccgttgaattcgactcgcgtcggacgctaacatcaaggggatccatgggaagagagaaaaacgacaaaccactgccctccgccaccgcccgacctaatacatttatgaggggcggttctagcaaggacctgctggataatcagagccaggaggaacagcggagagaaatgctggaaacggtcaaacagctgacggggggagtggatgtggaacggaattccaccgaggcggagaggaacaagaccagggagtctgcgaaacctgagatcagcgcgatgtcagctcatgacaaagccgctctgagtgaggaagagctggagagaaaatctaaatctatcatcgatgaatttctccatattaacgacttcaaggaggctatgcagtgtgtggaagagctgaacgcacagggactgctccacgtgttcgtgagagtgggcgtggagtctaccctggagagatcacagatcaccagagaccatatggggcagcttctttaccagttagttcagagcgaaaagctgagcaagcaggactttttcaaaggcttcagtgagacgctggaactcgccgatgacatggcgatcgatataccccacatctggctgtacctagccgaactggttaccccgatgctgaaggagggagggatcagtatgcgagaactgaccatcgagttctcaaagcctctcttgcccgtcggtcgcgctggagtgttactgagcgagatcctacatctcctgtgcaagcaaatgagtcacaaaaaagtgggggcactttggagggaagccgacttatcatggaaggatttccttccggagggagaggacgtgcacaacttcctgctagaacaaaaactggacttcattgaatccgatagcccgtgttctagtgaggccctgtctaaaaaggagctctcggccgaggaactgtacaaaaggttggagaaattgattattgaagacaaagccaacgatgagcagattttcgattgggtggaggctaatctcgatgagatccagatgagctctcccactttccttcgcgctctgatgactgcggtgtgtaaagcagcaattatcgctgattctagtacgtttagagtcgataccgctgtgatcaagcagagagtccctatcctcctgaagtatctcgactcagacactgagaaggagttacaagcattgtatgccttgcaggcctctattgtgaaactggaccagcccgctaacctcctgcggatgttctttgactgtctttacgacgaagaggtgatttctgaggatgctttctacaaatgggaaagctctaaggatccggcagaacagaacggcaagggggtcgctctcaagtcggtcacagcattttttacttggttgagagaggcggaggaggagtccgaggacaactag

SEQ ID NO: 29038 - DNA, 4776 bp, synthetic construct
  source 1..4776: mol_type = other DNA; note = Synthetic coding sequence
atgaattcccagccgcagaccagatcacccggaggattccggcctattcaattcttccaaaggccccagatccaaccccctcgggctactattccaaattcctcaccaagtatccgacctggagcccaaactcctactgccgtatatcaggcgaaccaacatatcatgatggtgaaccacctcccaatgccataccccgttccacagggaccacagtattgcatcccacagtaccgacattcgggaccaccttatgtaggcccacctcagcaataccccgtgcagccccctggccctggccctttttaccccggacctggacccggagatttccccaatgcctacgggactcccttctaccccagtcagccagtataccaatctgcgccaattattgttcctacgcagcagcagccaccgccagctaagagagagaaaaagacgatcagaatccgcgatcctaaccaaggtgggaaggacatcacagaggaaattatgtccggcggaggctctaggaatccaacgccaccaatcggaagacccactagcacccccacacctccgcagctcccctctcaggttccagaacacagcccggtggtgtacggcacggtagagtcagcccacctggccgcatccactccggtgacagcagctagtgaccagaagcaggaagagaaaccaaagcctgatccagtccttaaatcccccagccccgtgctgaggctagtcttgtcaggggaaaaaaaggagcaagaaggacagacttcagaaaccaccgctatcgtctccatcgctgaacttcctttgcccccaagccccaccacagtgtcttcggtagctcgctccactattgcagctcccacaagttcggctctgtcatcccagccgatttttaccacagcaatagatgaccgctgtgaattgtctagtcccagagaggatactatacccatcccatctctaacatcttgcaccgaaacttctgatcctttacccacaaatgaaaacgacgatgatatttgtaagaagccatgttccgtcgcacccaacgatattcccctagtgtcatccaccaatctcatcaacgagattaatggcgtgtccgaaaaactgagcgctacggagtcaatcgtcgaaattgttaaacaagaagttctccctctaactctagaactggaaatcctcgaaaatcctcctgaagagatgaagttggagtgcatccctgcacccatcaccccatctacagtgcctagtttcccgccaacaccaccaacccccccagctagcccccctcataccccagtcattgtgccagccgctgctaccaccgtgtcctcgccaagtgcagctattacagtacagcgtgtgctcgaagaggacgagtccatccgcacttgtctgagcgaggacgccaaagaaattcaaaacaaaatagaagtcgaggccgacggccagaccgaagaaatcctggatagtcagaacctgaatagtcggcgtagtccggtgcctgctcagatagcaataaccgtccccaagacctggaagaaacccaaagaccggacacgtactaccgaagagatgctcgaggccgagcttgaattaaaagctgaggaagaattgtccatcgacaaggttctcgaaagtgagcaggataaaatgagccagggcttccacccggagagagacccatcagacctgaaaaaggtgaaagcagtcgaggaaaacggggaagaggctgagcccgtgaggaacggggcagagtcagtctctgagggagagggaatcgatgccaatagcggatccaccgacagcagcggagatggagtgacttttccatttaagccagagtcctggaaacctaccgacacagagggcaagaagcagtacgacagggaattcctcctggactttcaatttatgccggcttgcatccagaaacctgaaggactcccaccgatttccgacgtggtactcgataaaattaaccagcctaaactgcctatgcgtacactcgaccctcggatcctgccacgtggacccgattttactccggcttttgcagattttggacgccaaaccccagggggaaggggtgtgcccctacttaacgttggctctagaaggtcacagcccggacaaaggagggagccccgtaaaatcatcactgtctcagttaaggaggacgtgcacctgaaaaaggctgaaaacgcttggaaaccaagccaaaagcgcgactcacaggccgatgacccagaaaacatcaagacgcaagagctgttccgtaaggtaaggagcattctcaacaagctgacacctcagatgtttaatcagctcatgaaacaggtgagcggtttgactgtcgatacagaggagagactgaaaggcgtgattgaccttgttttcgaaaaggctattgacgaaccaagctttagcgttgcatatgcaaacatgtgtcgatgcctcgtgactctcaaggtaccgatggcagacaaacctggcaacacagtgaacttccggaagttactgttgaacagatgccagaaagagtttgaaaaagacaaagctgatgatgatgtgttcgagaaaaagcagaaggaactcgaggctgcttcagctcctgaagaacggacacggctccacgatgaactggaagaagctaaggataaggcacgcaggcgatcaatcgggaacataaagtttataggagagttatttaaactaaaaatgctgaccgaggcaattatgcacgattgtgttgtcaagctcttgaagaaccacgacgaggagtcactggaatgcttgtgcagattgctaacaaccattggaaaggacctggattttgaaaaagctaaaccacgaatggatcagtactttaaccagatggagaaaatagtgaaagagaggaagacaagcagccgtatccgctttatgctccaagacgttatcgatctgcggctttgtaactgggtgagtaggcgcgcagaccaggggccaaaaaccattgaacagattcataaggaggccaaaatcgaagaacaggaagaacaacggaaggtgcagcagctgatgactaaagagaaacgaagaccaggcgtccagcgcgttgacgagggtggatggaatactgtgcaaggagcaaagaatagccgtgtgctggatcctagtaagtttctaaagatcactaagccaacaattgatgagaagatccagctggtcccaaaggctcaactggggtcatggggcaagggaagtagtgggggagccaaagccagcgaaacagacgcattgcgatcgagcgctagctctctgaacagatttagtgctttacagccccctgcaccctcagggtccacaccatcaaccccagtcgaatttgactctcgaagaaccctcacctcccgaggcagcatggggcgagaaaaaaacgataagccactgccttctgcgactgcaagaccaaacacatttatgaggggcggatcatcaaaggacctgctggacaaccagagccaggaagaacaacgacgggagatgttggagactgtcaaacaactcaccgggggagttgacgtcgagcgcaacagtacagaggcagagcggaacaaaacaagggagagtgctaaacctgaaatatccgcgatgagcgctcacgacaaggcagctctgagcgaagaggagttggagcggaagagcaaatcgatcatcgatgaatttctccacatcaacgatttcaaggaagccatgcagtgcgttgaggagcttaacgcacagggtctgctgcatgtgttcgttagagttggtgtggaatctacactggagaggtctcaaataacaagggaccacatgggccagctgttataccagctggtgcagtcggaaaagctgagcaagcaggattttttcaaagggttttcggaaaccctcgaactggcagatgacatggccatagatattccccatatttggctgtacctggccgagctagtcactccaatgttaaaggaaggtggtatatccatgcgagagttgaccattgaatttagcaagcccctccttcctgtcggacgagctggagttctgctctccgagatcttgcacctattgtgcaaacagatgtctcataaaaaggtgggggctctctggagggaggccgatttaagttggaaggacttccttccagagggcgaggacgtgcacaacttccttctggagcagaaactggattttattgagtcagatagcccctgtagttccgaagcgctgtccaaaaaagagctgagtgccgaggaactgtacaaacggcttgaaaagctgataatcgaggataaagccaatgacgaacagatatttgactgggtggaagcaaacttggatgaaatccaaatgtcttcccctacttttttgcgtgccctgatgacagctgtttgcaaggcagccatcatcgctgattcctctacgttcagagtggacacggccgtcatcaagcagcgagtgcccattttactcaagtatctggactccgatactgagaaagagttacaggcactgtatgcccttcaagcatcaattgtgaaactcgatcagcctgccaaccttctcagaatgtttttcgattgtctttatgatgaggaagtgatctctgaagatgccttttataaatgggaatcttccaaggatcctgccgagcagaacgggaagggagtagctctcaaatcagtcaccgctttctttacctggctgagggaggccgaggaagagagtgaggataactag

SEQ ID NO: 29039 - DNA, 1002 bp, synthetic construct
  source 1..1002: mol_type = other DNA; note = Synthetic coding sequence
atgagcggtgacgaaatgatatttgaccctacgatgagtaagaagaaaaagaagaagaagaaacccttcatgctggatgaggagggagatacgcagacagaagaaacccagccttcagaaaccaaggaggtggaacccgaacccaccgaagacaaggacctcgaagctgatgaagaagacacgcgcaagaaggacgccagtgacgacctcgatgacttgaattttttcaaccaaaaaaagaagaaaaaaaagacaaagaaaatctttgacatcgatgaggccgaagaaggcgtgaaggacctgaaaatagaaagcgacgttcaggagcccaccgagcccgaggacgatctggacatcatgttaggtaacaagaagaaaaagaaaaagaatgtcaagttccctgatgaggatgaaatcctggaaaaagacgaggctctggaggatgaggataacaagaaggatgatggaatcagtttttctaaccagactgggcctgcctgggctggcagtgagagagattatacctacgaggagctcctcaacagggtgtttaatattatgagggaaaagaatccagacatggtggccggagagaagaggaagtttgtgatgaaaccaccccaggtggtgagagtcgggaccaagaaaacttccttcgtcaatttcactgacatctgcaagttgcttcatcgtcagccaaagcatttgctggcctttctgctggccgagctggggacttccggctccatcgacgggaataatcagctggtgatcaaagggcgatttcagcagaaacagatcgagaacgttctccggagatatattaaagagtatgtgacgtgccacacctgcagaagtcccgataccatcctccaaaaggacacacgtttgtacttccttcagtgcgagacgtgccattctaggtgctcggtggccagcattaaaaccgggttccaggccgtaacagggaaacgagctcaactccgcgcaaaagctaattag

SEQ ID NO: 29040 - DNA, 2619 bp, synthetic construct
  source 1..2619: mol_type = other DNA; note = Synthetic coding sequence
atgggtgagggcggtctgccgcctgcctttcaactgcttcttcgagcatgcgaccaaggggacacggaaaccgccaggcggctcctggagcccggagctgctgagccagccgagaggggcgcagaacccgaggcgggagccgaacccgcaggggcagaagtggcgggacccggagctgccgcagctggcgctgtgggcgctcctgtcccagtggactgctctgatgaagccggaaacacagccctccagtttgcagccgctggcggtcatgagccattagtcagattcctgcttcgacggggagcctctgtcaacagcagaaaccactatgggtggtccgctttgatgcaggccgctcgatttggccacgtgtctgtggcccacctcttgctcgaccatggcgctgacgtaaatgcccaaaaccgactaggggctagcgttctaacggtggcgagccgaggaggacacttgggggttgtcaagctactgctggaggcaggcgcattcgtggaccaccaccaccctagtggcgaacagctcggtttaggagggagccgggacgaacccctggatatcaccgccctgatggccgcaattcagcatggccacgaggccgtggtgaggttgcttatggagtggggagctgacccaaatcacgctgctcggacagttgggtggagtccgctgatgctcgccgctctgactggaaggctcggcgtggcacagcaactggtagagaagggcgctaacccggatcatctgtcagtactggagaaaactgcctttgaagttgccctcgactgtaaacatagagacctggtggactacctggaccctctcactaccgttagacccaagaccgacgaagagaaaagaaggccggacatctttcatgcactcaaaatggggaatttccagctggttaaagagatcgccgacgaggaccccagccatgtcaaccttgtcaatggcgatggcgcaacacccctgatgctcgccgcagtgactggtcagctggctctcgtccagcttttggttgaaagacacgctgatgtggacaaacaagatagtgtgcacggctggacggcgctgatgcaggctacgtaccacggcaacaaagaaatagtgaagtacctcctcaaccaaggagccgacgtgaccctgagagctaaaaatggatacacggccttcgatttagtgatgctgcttaatgaccctgatacggagttggtgagattgctagcttcagtgtgcatgcaggttaataaggacaagggtaggccctctcaccagcctccccttccccatagcaaagtgcggcaaccatggagcatccctgtgctccccgacgacaaggggggactgaagtcttggtggaataggatgagcaaccgttttcgaaaactcaaactcatgcagactcttccgcgaggcctgtctagcaaccagcctcttcccttctccgacgagcccgaacctgctcttgatagcaccatgcgtgccgcaccgcaggataagacctctaggtcagcgctgccagacgctgcacccgtaaccaaagataacgggcctggcagcactagaggggaaaaagaggataccttgttaacaaccatgcttcgcaatggcgctcccttaacacgcttgccctccgataagcttaaggccgttatcccaccctttttgccaccaagtagctttgaattatggtctagtgacaggagtcggacacgccacaatggtaaggctgaccccatgaaaactgctctcccccagcgcgcaagccgcggacacccagtgggcggagggggaaccgacacaacgccagtgcggccagtcaagttcccctccctgcccaggagtccagccagtagcgcaaattccggtaactttaatcactctccccactcctctggcggatcttctggagtgggagtgtctaggcatggaggagagttactgaataggagcggtggttcgattgacaacgtgttatcccaaatcgcagctcagcgtaagaaagcagcaggattgctcgaacaaaagccctctcataggtcgagcccggtgggcccagctcccggatccagccccagtgagctcccagcatctccggctggcggttcagccccagtgggaaaacaaaagctcgaaacatcaaagagacccccttctggcacctccacaacgtctaaaagcacttctcctaccctcactccttctccctcgccaaaaggccacactgcagagtcatccgtttctagttcttctagtcatcgccagagcaaatccagtgggggtagctctagtggaaccatcacggatgaagatgagctgacgggaatcctgaagaaactttccctggagaagtatcagcctatcttcgaagagcaggaagtggacatggaggccttcttgaccctgacagatggggacctgaaagaactgggtatcaagaccgatgggtcccgccagcaaatcctggccgctattagcgagctgaacgccggaaagggccgagaacggcagatcttacaggaaaccatacacaactttcacagtagttttgagtctagcgctagcaacaccagagctccaggaaacagtccttgcgcttag

SEQ ID NO: 29041 - DNA, 483 bp, synthetic construct
  source 1..483: mol_type = other DNA; note = Synthetic coding sequence
atggaagctgagagaccacaggaagaagaggacggcgaacaggggccacctcaggatgaagaaggatggcctcctcctaacagtacaacacgtccctggcgttcggctcctccaagtcctcccccacccggtacacgacacactgccctgggacctaggagcgcttcactcctgtctttgcagacagagctgctcctggacctcgtggcagaagcgcagtcacggcgactggaagaacagagggccaccttttacactcctcaaaatccgtccagtctggcacccgctcctcttagacctctagaagatagggagcagctgtacagcacaatcctttcccaccagtgtcaaagaatggaggcccagcgatcagaacctcccctgccgccagggggacaggagctgttagagctcctgctgagagtgcagggcggaggtaggatggaggagcagcgctctcgacctccgacccacacttgctag

SEQ ID NO: 29042 - DNA, 483 bp, synthetic construct
  source 1..483: mol_type = other DNA; note = Synthetic coding sequence
atggaggccgagcggcctcaagaggaggaagatggcgagcaggggccaccccaggacgaggaaggctggcctcccccaaacagcacaacacgcccatggcggagtgcaccaccatccccccctccccctggaacccgacatacagccctgggaccccgatccgcgagcttgctgagtctacagactgaactcctgcttgatctcgtggcagaggctcagtcacggagattggaagagcagagagcaacattttacacacctcagaacccatcttctttggccccagcccctttgaggcctctcgaggacagggaacaactgtatagcaccattctgtcacaccagtgccagcgcatggaggcccagagatccgaacctccactcccccctggaggccaggaattgttagaattgcttttgagagtccagggcggaggaaggatggaagagcaacgatcaaggcctcccacacatacatgctag

SEQ ID NO: 29043 - DNA, 2790 bp, synthetic construct
  source 1..2790: mol_type = other DNA; note = Synthetic coding sequence
atgcaggggttgcccgaccccccttcacagcggggaatcatccctcgggcattcgagcacgtcttcgagtccgtgcaatgcgccgagaacacaaaattcctcgtgagggcctcctacctggaaatttacaacgaagatgtgagggatcttctgggcgctgacacgaaacagaaacttgagctgaaagaacaccccgagaaaggcgtgtatgtcaagggcctttcaatgcacaccgttcatagtgtggcccaatgcgagcacattatggaaactgggtggaaaaatcgatcagtgggctatacactgatgaataaagactccagccggtcccactcaatctttacaatctcgattgaaatgagcgctgtggatgagagggggaaagaccacctgcgggcaggcaaactgaacctggtagatctcgcaggaagcgagaggcagagcaagactggggctaccggtgagagactcaaagaggcaaccaagataaacttgtcgctgtcagccctaggcaacgtcatctctgcattagtggacgggagatgtaagcacgtgccgtatagagatagcaaactcactcggttactacaggattcacttggcggtaacactaagacacttatggtagcttgccttagccccgctgacaacaattacgatgagaccctttcaactctccgctacgcaaatagagctaaaaacatcagaaataaacctcgaataaacgaggatcctaaggacgccctcttacgggaatatcaggaggaaattaaaaaactaaaggccattctaacacagcaaatgagccccagctctcttagtgcgcttttgagcaggcaagttccacctgaccccgtccaggtggaggaaaagctcttgccccaacccgtgatacagcacgacgttgaagccgagaaacagctgatccgagaggaatacgaggaaaggttggctaggctgaaggccgactacaaagctgagcaggagagccgagctagactcgaggaggatataacggccatgaggaattcttacgatgtgcggctttcaactttggaagagaatcttaggaaagaaacagaagctgtgcttcaggtgggggtgctatacaaggcagaagtcatgtctcgcgctgagttcgcctccagtgccgaatatccacccgcttttcagtatgagacagtggttaaaccaaaagttttctcaaccacggacactctgccttctgatgacgtctctaaaactcaggtttcctctagattcgccgagttgcctaaggttgaaccatctaagtcagagatctcacttgggagctccgaaagttcatctttagaggagacatcagtgtccgaagcttttccaggaccagaagagccatctaacgtcgaagtgtcaatgcccaccgaggaatctcggtcgaggtactttctggacgagtgcctcggccaggaagccgctggacaccttctaggtgagcagaactatttaccccaggaggagccacaggaggtgccgcttcagggtttgttgggacttcaggatccattcgccgaagttgaggcaaaactggcacgcctaagctctactgtcgcacggacagacgctccgcaggccgacgtaccgaaagttcctgtccaggtgcccgctccaactgacctgctggaacccagtgacgctcgccctgaagccgaggcggctgatgatttcccaccacgtcccgaagtggacctcgcctcagaagtggccctggaggtggtgcgcaccgctgagcccggagtctggctagaagcccaggcgccagttgccttggtcgcccagccagagccattgcctgcaactgcaggggtcaaaagagagtcggtcggaatggaggtggccgtcctgacagatgacccactgccggtggttgatcaacagcaggtgttggcccgattgcagcttctggagcagcaggtggttggtggcgagcaggccaaaaataaggatctgaaagagaaacacaaacgaagaaagagatacgctgatgaaagacgcaaacaactagtggccgctcttcaaaattcggatgaggattcgggtgactgggtgcttctgaacgtgtacgactcgattcaggaggaggtccgcgctaagtctaagttactcgagaagatgcagagaaaacttcgcgctgcagaggtcgaaatcaaggatcttcaatccgagttccagctggagaagattgattacctcgcaactatcaggcgccaggagcgagattccatgttgctgcagcagctccttgaacaggtgcagccactgatccgccgtgactgcaattattctaatcttgagaaaatcctgagagaaagctgttgggatgaggacaatggattttggaagataccacacccagttattacaaaaacctccctccctgtcgctgtctctaccggcccacagaacaagcctgccagaaagacgtctgcggctgataacggtgagcctaatatggaagatgatcgctacaggctgatgttgtcgcggtccaactctgaaaacatcgcatcaaactatttccgctctaagcgggcatcgcaaattttgtctacagatgctagaaagtccctcactcatcacaatagccctcctggactgagttgtccactatctaataatagcgccataccacccacgcaggccccagagatgcctcaacctaggccgttccggcttgaatccctggacatcccgttcaccaaggccaaacgtaaaaaaagcaaatctaatttcggatcagaacctctctag

SEQ ID NO: 29044 - DNA, 426 bp, synthetic construct
  source 1..426: mol_type = other DNA; note = Synthetic coding sequence
atgaacaagcacgtgctcaagatccagaaggaattagaggaagcaaaggagaagctggcacgtcaacacaagcgaaggtccgacgatgatgaccgatcctccgataggaaagacggagtcctggaagagcaaatagaaaggctgcaagaaaaagttgaaagcgcccagtctgagcaaaagaatttgtttctggtgattttccaacggtttatcatgatcttgactgagcacctcgtgcggtgtgagacagacggcactagcgtgttaactccctggtataagaattgcatcgaacgcctgcagcagatttttcttcaggtctgcggcgagcttcgtctgggtaacaacacaattctaagccataaagacttctctttaaaaaaaatcctggttaaatttgtgcgacgactctattctacatgctag

SEQ ID NO: 29045 - DNA, 2373 bp, synthetic construct
  source 1..2373: mol_type = other DNA; note = Synthetic coding sequence
atgagtcggagacgacattccgacgagaacgatggcggtcagccacataagcgtcggaagaccagcgacgctaatgagacagaagaccatctggagtcattaatttgcaaagtgggggaaaaaagtgcatgtagcctggagtctaatcttgagggcctggctggcgtgctcgaggctgatctgcccaactacaaatccaaaatattgcggctgttgtgtactgtggcacgattgttgccagaaaagttaacaatttacacaaccctcgttggattgttaaacgccaggaactacaattttgggggtgagtttgtggaagccatgatcaggcaattaaaagagtcactcaaggccaataactataatgaagctgtgtatctggtaaggttcttgagcgatctcgtgaactgccatgtcatcgctgcaccatctatggtcgccatgttcgagaatttcgtctcagtgacccaagaagaagacgtgccacaggtgcggcgagattggtacgtttatgcttttctctcaagcttgccttgggtgggcaaggaactgtacgaaaagaaagacgcagaaatggataggattttcgcgaatactgagtcttacctaaaaagaaggcagaagactcacgtgccaatgctccaagtgtggaccgctgacaaaccccatcctcaggaagaatatctggattgcctgtgggcacagatccagaagctgaagaaggacagatggcaagagcggcatatcctacggccatacttagccttcgactctatcctctgtgaggcgctgcaacataaccttccccctttcactccaccaccgcacactgaggatagcgtgtaccccatgcctcgcgtgatcttcagaatgttcgactacacagacgaccccgagggcccagttatgcctggctctcactctgtagagaggtttgtgatagaagagaatctgcactgcatcatcaagagccactggaaggagcgtaagacctgtgctgcacaactcgtcagttaccccggaaagaacaagatccccctcaactatcacatcgtggaggtcatcttcgccgaactgttccaattacccgcaccaccccacatcgacgtgatgtacacgacacttctgatagagctctgtaagctgcagccgggttccctccctcaggtactggctcaggctactgagatgctttatatgcgactggatacaatgaatacaacctgtgttgatcgttttatcaactggttttctcaccatctgtctaatttccagtttagatggtcttgggaggattggtcagattgcttgtcccaggacccagaatctccaaagccgaaattcgtgcgcgaagtgctagagaagtgtatgcgcctgtcatatcaccagcgaatcctcgacatcgtgcctccaaccttctcagccctatgtcctgcaaacccaacctgtatttacaagtatggagacgagagcagtaattctctgcccggacatagcgttgcactctgtctggccgtggcatttaaatcaaaagctaccaatgatgaaatcttttccatcctaaaggatgtaccgaatcctaatcaggacgacgatgacgatgaagggttttcttttaatccccttaaaatagaggttttcgtgcaaactcttctgcacctggccgcaaaatctttttcacattccttttccgcactggcaaaattccatgaggtgtttaagacacttgccgagtctgacgaagggaaactgcacgtgctgagagtgatgtttgaggtctggcggaatcacccgcagatgatagcggtgcttgtggacaaaatgattaggacccagatcgtggattgcgctgccgtcgccaactggatattctcgtcagaactttctcgggactttacacgactgtttgtatgggagattttgcacagcactataaggaagatgaataagcacgtcctcaagatccagaaagaactggaggaagctaaagagaagctggcccgacagcataaacgccgatctgacgacgatgaccggtcctcagatcgcaaagatggtgtgctggaggaacagatagagaggctgcaggagaaagtggaaagcgcccagagcgaacagaaaaacctttttctggtgatttttcagcgctttatcatgatcctgacggagcatctggtgcgatgcgaaacagatggaaccagcgttctcactccctggtacaagaactgcatcgaacgcttgcagcagatatttcttcagcaccatcagattatccagcagtatatggtcacacttgaaaatctgttgtttaccgccgaactggatccgcacatcctcgcagtttttcaacagttttgcgctctgcaggcttag

SEQ ID NO: 29046 - DNA, 699 bp, synthetic construct
  source 1..699: mol_type = other DNA; note = Synthetic coding sequence
atgtctcaagttctgagtattctaggcatgcatactttgatgtctaaccagcagtattaccaggctctgtcatccagcagcatcatgaataaagagggactaaattcggtgatcaagccaacccagtataagcccgtccccgacgaggagccgaatagcaccgacgttgaggaaacactggagcggatcaaaaacaacgacccaaaactggaggaggtaaacctaaacaacatccgcaacattcccatccctacattaaaggcttatgctgaggccttgaaggagaatagttacgttaagaaattttctatagtggggactagatctaatgatcccgtcgcctacgcgttggccgagatgctgaaggaaaacaaagtgcttaagactttgaacgtggaatctaatttcattagcggagccggaatcctgagactcgtggaagcgctgccgtacaacacaagtctcgtggagatgaagatcgacaaccaaagtcagccactgggtaacaaagtagagatggagatcgtgtccatgcttgagaagaacgctaccctgctaaagtttggctaccactttacacaacaaggaccaaggctgcgtgctagcaatgctatgatgaataataacgacttggtacggaaaagacggctcgctgacctgactggtcccatcattcctaaatgccggtcaggggtgtag

SEQ ID NO: 29047 - DNA, 2403 bp, synthetic construct
  source 1..2403: mol_type = other DNA; note = Synthetic coding sequence
atgtccagcctaggagctagtttcgtccagatcaaatttgacgatcttcagttttttgaaaactgtgggggtggctcattcggtagcgtatacagggcaaaatggattagtcaggacaaagaagtggcagtgaagaaactgctcaagatagagaaagaggccgaaatcctgtccgttctgtcccaccggaatatcatccaattctacggtgtgatcttagaacctccaaattacggtatcgttaccgagtatgcctcactcggcagtctttacgactacattaacagcaatcgctcagaggaaatggacatggaccatataatgacatgggctaccgatgttgcaaaagggatgcactatctccatatggaggcaccagttaaggtaatacaccgcgatctcaagtcgagaaatgtcgtcatagccgcagacggagtcctgaagatttgcgatttcggtgcgagccgcttccacaatcataccacacatatgtcactcgtgggtacgtttccctggatggcacctgaggtaatccaatctctgccagtgagtgaaacttgcgacacgtattcctatggagtcgtactctgggagatgctaacgcgcgaggtacccttcaagggactagagggtctccaggtggcatggctagttgttgagaagaatgaaagactcacaattccaagctcctgtcccagaagttttgccgaactcctccaccagtgttgggaggctgacgctaagaagcgccctagcttcaagcaaataatcagtattctggagtctatgtcgaacgatacttctctgcccgataaatgtaattccttcctgcacaataaggctgagtggcgatgcgagatagaggctaccctggaacggctgaaaaaactcgagcgagatttgagctttaaggaacaggaactgaaggagagagaacgcagactgaaaatgtgggagcagaagctgactgaacaaagtaacactccattgctgccttcgttcgaaatcggtgcctggaccgaggatgatgtctactgttgggtccagcaacttgttcgaaaaggtgactcaagcgccgagatgtctgtgtacgcctccctattcaaagaaaacaatataacaggaaagaggctactgttgctggaagaagaggaccttaaagacatgggaatagtgtctaaaggacatatcatccattttaaatcagccatcgaaaagctgacacacgactacatcaatctttttcacttcccccctctcataaaagactccggcggagaacctgaagagaacgaggaaaaaatcgtaaatttggagctcgtttttgggtttcacctgaaacccggaacaggacctcaggattgtaagtggaaaatgtacatggaaatggacggggacgagatcgctatcacatatattaaggatgtgacttttaacaccaatcttcccgatgccgagattcttaagatgaccaagccaccgtttgtgatggagaagtggatcgtgggcatagcaaaaagccaaactgtagagtgcaccgtcacctacgagtccgacgtgcgaacccctaagtcaacaaagcatgtgcatagcatacagtggagcagaactaagccccaggatgaggtgaaggcagtgcaactggccatccagacactgttcactaatagcgatgggaatcccggaagccgttcagacagctccgccgactgccaatggctcgacaccctgcgcatgaggcagattgccagcaatacttctttacagcgctcacagagtaaccccatcctcggttctccttttttttctcactttgatggccaagactcatacgctgctgcagtccgccgaccccaggtacccatcaaataccagcagatcaccccagtgaatcaaagtcggagttcctcaccaacccagtatgggttaacaaagaacttcagttctctccacttaaatagccgcgacagtggtttttcgtccgggaatactgacacgtccagcgaacggggtcgctattccgaccggagcagaaacaaatatggcagaggcagcattagtctcaatagcagtccgaggggcagatacagtggaaaaagtcagcatagcacaccctcgcgcggacggtatccgggtaagttttatcgggtttcacagtctgctttaaatccccatcagagccccgacttcaagcgatcacctagggatctgcatcagcccaacacaatacccggaatgccgctccatccggaaactgattctcgcgctagcgaagaagatagcaaagtttcggaaggtggctggaccaaggtggaataccgcaagaagccccatcgtcccagccctgccaaaacaaacaaggagcgcgcacggggagatcacagaggctggaggaatttctag

SEQ ID NO: 29048 - DNA, 1071 bp, synthetic construct
  source 1..1071: mol_type = other DNA; note = Synthetic coding sequence
atgcgcaggttcttgagacctggccacgacccggttagggaaaggttgaagcgcgacctattccagtttaacaaaacagttgagcatggctttcctcaccaaccatcagccctcggatattctccctctctgcggattttggcgatagggaccaggtcgggagccattaaattatacggcgctcctggcgtggagtttatgggtctgcatcaggagaacaacgccgtgactcagatccatctcctccctggacaatgccagttagtaactcttttggacgataactctctccacctgtggtcgttgaaggttaaaggtggcgcttccgagctgcaagaggatgaatcctttacgctacgcggacctcccggtgctgccccttcagcaactcagattactgtagtcctcccacatagcagctgcgagttattatacctggggacagaaagtggaaacgtcttcgtggtgcaactgccagcgttcagggccttggaagatagaaccatcagcagtgacgctgtcctgcagcgcctccccgaggaggccagacatcgtagggtatttgaaatggtagaagccctccaggaacatcccagagacccgaatcagatattaatcgggtattctagaggcctcgtcgtaatctgggacctgcaggggtctagagttttataccactttctatcatcccaacaattagaaaatatctggtggcagagagacggacggctgttagtgtcctgtcattccgacggctcttactgccaatggcccgttagctcagaggcccagcaaccggagccgcttcgtagcttggtcccatacgggccttttccttgcaaagcaataactaggatcctgtggctgacgactcgccagggccttccattcactatatttcagggtggcatgcccagagccagttatggggacagacactgtatttcagtgattcacgatggacagcaaaccgcctttgatttcaccagcagagtgattggtttcaccgtcctgacagaggccgacccagcagctagcagaagggcctctggggttggggctcagggctag

SEQ ID NO: 29049 - DNA, 2526 bp, synthetic construct
  source 1..2526: mol_type = other DNA; note = Synthetic coding sequence
atgggtgcccgtgccgcagggacgagttctggcggtggtcctcgaccatgtctcgcccgaggcctctctgcgtccccttttcctgcaaaacagcaacacccccaggcgggagcttcgcccgctgaacttcagcagagggcttactacagggcccgacaggatgctgcttcccaacctgggctgggcttcctgatctcccccagcagttgcagttcatggggcccaggttcgttcacgcggtcttgtggctaccctacactgtgtagctcctggataagtaaacgcgaacctggagagctgagcggagtctggactagcgcttggaggacacacgccgcttttaccggttcgcaggatttatgtttgtataaggggttgggatccatttatgaggacaaaactgcactgtcccttttgggactgggtgaagaaaccaacgaagaggacgaggaagaatcggacaatcaaagtgtgcactcctcatctgagcctctgagaaatctgcatctcgacatcggagccctcggaggcgacttcgaatatgaggagtctttgaggaccagtcagcccgaggagaaaaaggacgtgtccctggactccgacgcagccggaccacctactccttgcaaacccagttccccaggggcagactcttcactcagctccgcagtggggaaggggaggcagggttccggcgcaagaccgggactacccgaaaaagaggaaaatgaaaagagtgagccaaagatttgccggaatctggtgacgcctaaggcagaccccaccggtagtgagcccgcaaaagcgtcggagaaggaggcccctgaggatacagtcgatgccggagaggaaggctcacgtcgggaagaagccgctaaagagcccaagaagaaggcgtcagcccttgaagagggctcctccgatgcctcccaggagcttgagatctctgaacacatgaaggaaccccagttgtctgacagtatagcatcagaccccaagagcttccatggactggatttcgggtttaggtccaggatctctgaacatctgctggatgttgacgtgttgagccccgtgttaggcggtgcctgccgccaggcacaacagcccctcggaatcgaagacaaggatgattcacagtcttcacaagatgagcttcagtcgaagcagtcaaaagggctcgaagagcggtaccaccgcctgtcacctccactgcctcacgaagagcgggcacagagtccccctcgttctctcgccacagaggaagaaccccctcaaggcccagaggggcaaccagagtggaaagaggctgaagagctgggggaggacagcgcggcaagcctgtcactgcaactctctctgcagcggcgttcaacagagcctgtggctcctcctgaacagctatctgaggcggcacttaaagccatggaggaggccgtcgcccaggtgttggagcaggatcagcgccatttacttgaaagcaagcaggagaagatgcagcagctccgcgaaaaattatgtcaagaggaggaagaagagatcctgagattgcaccagcagaaagaacagagcctgtctagtctgagagagcgattacagaaagcaattgaggaggaagaagccagaatgcgcgaagaggaatctcaacggctctcatggctacgggcacaagtccagagtagcacccaggcagatgaggaccaaatacgtgcagaacaggaagcgtccttgcagaagttgcgcgaggagctggaatcccaacagaaagcagaacgggcttccctcgaacaaaaaaaccgtcagatgctcgaacagttgaaggaggagatagaagctagtgaaaagtccgagcaggctgccctgaatgctgcgaaggagaaagcacttcagcagctacgagaacagcttgaaggagaaagaaaggaggccgtggcgacccttgagaaggagcattctgctgagttggagcgcctgtgctcctctcttgaggcaaagcatcgggaggtggtgtcatccctgcagaaaaagatacaggaggcccagcagaaagaggaggcccagctgcagaaatgcctggggcaggtggaacaccgtgtgcatcagaaaagctaccacgtggcgggatacgagcatgagttgagcagtctgttacgggagaagcggcaggaagttgaaggggaacacgaaaggcggctcgacaaaatgaaagaagaacaccagcaggttatggcgaaagctagagagcagtacgaagctgaggagcggaagcaaagggcggagctcctcggtcacctgacaggagagctggaacgcctgcagcgagctcatgagagagagttagagaccgtgaggcaggaacagcataaaaggctggaagatttgagaagaaggcacagagaacaggaacggaagctgcaagacctggaattagacttggagactagggcgaaggatgttaaagccaggctggcattgctcgaggtgcaagtcagggacttacaggaatcactgacgtcagagtcctag

SEQ ID NO: 29050 - DNA, 1053 bp, synthetic construct
  source 1..1053: mol_type = other DNA; note = Synthetic coding sequence
atgatccgaggttttgaggccccaatggctgagaatcctccccctcccccaccaccagttatcttttgtcatgacagtcccaagcgcgtgctcgtgtctgtaatccgcactaccccaattaaaccaacctgtggcggtgggggtgagcctgagcctccaccacccctgataccaacgtctcctggcttcagcgattttatggtttacccttggcgctggggtgagaacgcccataacgtgacgctgtccccgggagcagcgggagctgccgctagtgctgcactgcctgcggcagccgctgccgagcattccggactccgcggtagaggcgctcccccaccggcagcgtcggcctctgctgccgcatcgggtggcgaggacgaggaggaagccagcagccccgactcaggacacttgaaagacgggatcagaaggggaagacctagagctgacacggtccgagacttgatcaacgagggggagcacagctcttctcgcatccgctgtaacatttgtaacagagtttttcctagagagaagtcattacaggcccacaagagaacgcatacaggagaaaggccatacctatgtgactatcccgactgcgggaaagccttcgtgcagtcaggccaactgaagactcatcaacgattgcataccggggagaagccttttgtgtgctctgagaacggatgcctttctagattcacccatgctaataggcattgccccaagcacccctatgcccgtctcaaacgcgaggagcctactgacacactgtccaagcaccaggcagctgataacaaggccgctgcggaatggttagccaggtattgggaaatgcgcgaacagcgtacgcctaccctcaaagggaaattagttcagaaggcggaccaagaacaacaggatcctttagaatacttacagtccgatgaagaggatgacgagaagcgcggtgcccagaggcggctgcaggagcaacgcgagcgactacatggcgcactggccctgatagaactggctaatttaacgggagccccactgcgacagtag

SEQ ID NO: 29051 - DNA, 1137 bp, synthetic construct
  source 1..1137: mol_type = other DNA; note = Synthetic coding sequence
atgaacatgatatggaggaactcaatcagctgtctgagactgggcaaagttccccacaggtaccagtccggatatcaccctgtcgcaccactgggctcaaggatcctgacagatcccgcaaaggtgttcgaacacaatatgtgggatcacatgcaatggtctaaagaggaagaggctgcggcaagaaagaaggtaaaagaaaattccgccgtgcgtgtactcctggaagagcaggtgaaatatgaacgggaagcaagtaaatattgggacaccttctataagatccataagaacaagttctttaaggataggaattggttgttgagggagtttcccgaaatactgccagtagaccagaagcccgaagagaaggccagggaatcctcctgggaccacgtgaaaaccagtgccacaaaccggtttagtcggatgcactgtcccaccgtgcctgatgaaaagaaccactacgaaaagtcttctgggtctagtgaaggtcagagtaagaccgagtcagattttagcaacctggacagcgagaagcataagaaggggcctatggagactggtctctttcccggatccaacgctactttccgtattctggaggttgggtgcggggctggaaactctgtgttccctatccttaacacgctggaaaattcaccagaaagcttcctctactgctgcgatttcgcctctggcgcagtggaactggtaaaatctcactcatcatatcgggctacacagtgtttcgcttttgtgcacgacgtttgtgacgacggattgccctacccattccctgacggcatcctggacgtcatcctgcttgtgtttgtcttatcttccatccatcccgatcggatgcagggagtggtgaacagattgagcaaattgctgaagcccggtgggatgttactgttcagagactatgggcgttatgataaaacacaactgcgattcaagaaggggcactgcctaagtgagaacttttacgtgcggggagatgggaccagggcgtattttttcaccaaaggagaggtccatagcatgttttgtaaagctagcctggacgaaaaacaaaacctggtcgacagacgcctccaagttaacaggaagaaacaggttaagatgcactag

SEQ ID NO: 29052 - DNA, 1797 bp, synthetic construct
  source 1..1797: mol_type = other DNA; note = Synthetic coding sequence
atggggctacgtgcctcaagaccgagtaagctcacctggaagaagtgggccacaactgcagcttctaattcctgttcacgttctgtcagcagctgtaggcgctgcacaggaggacggcttatgaaagagccctggagaagaccaagttccagtatctgttatacatccaggagtagtacaataaaattcagtagtaataagtttaaaactttgtctgtcttgttgagtcatctacaccttttccgcctgcacgtgaaaatctctcagcctagcttgccaattagcagtcgcggagctgccagcagttcccagtttcaggggctgccctccaggagcgccatctttcagcaacagccagagaactgcagtagccccccaaacgttgctctcacctgtctaggaatgcaacagcccgctcagagccagcaggtcacaatccaggtgcaggagccagtggatatgctctccaatatgccaggaacagctgcaggatccagcggccgtggcattagcatctccccatctgccggtcagatgcagatgcagcacagaactaatctcatggccaccctcagttatggccaccgtcccctgagcaagcagctatctgccgactccgcagaggcgcacagtgcccaccagcaacctcctcattacacgacaagtgcgctccagcaggcgctgctgagccctacgcctcccgattacacaaggcaccaacaggtgccacatattctgcagggcctgctgtctccgagacactccctgaccggtcattctgatattcggctccccccaacagaatttgcgcaactgattaagcggcaacaacagcagcggcagcagcagcagcaacaacagcagcagcaggaataccaagaattattccgccacatgaaccagggagacgctggatctttggctccaagcctagggggtcagagtatgactgagcgccaagcactcagctatcagaacgcggactcctaccaccaccacacgtctccgcaacacctgctgcagatccgggctcaggaatgcgtgagtcaggccagctcccctacaccacctcatgggtatgcccaccaaccggctcttatgcattcagagagcatggaggaggattgctcctgtgagggcgctaaagacggattccaggatagcaaaagttccagcaccctgaccaaaggatgtcacgactcaccgctgctgctaagtacgggaggacccggagaccctgaatctctgctgggtactgtgtctcacgcgcaggaactcggtatccatccctacggtcatcagccaacagccgctttctctaaaaacaaagttccttctcgagagccagttatcgggaattgtatggacagatcctccccgggtcaggcagtggaactgccagatcacaatggcctcgggtaccctgccaggcctagtgtgcatgagcaccatagacctcgcgcacttcagaggcaccatacgatccagaattccgatgatgcatacgtccagttggataatctacctgggatgtctctcgttgccggtaaagctctctcgtccgccagaatgtctgatgctgtcctgtcccagtccagcctcatgggtagccagcagttccaggacggtgagaatgaggagtgtggagcaagcctgggtggtcacgagcaccccgacttgtccgacggttcacaacacctcaacagctcctgttacccatcaacttgtatcaccgatattctgcttagttacaagcacccagaagtgtccttctctatggaacaggccggagtttag

SEQ ID NO: 29053 - DNA, 3966 bp, synthetic construct
  source 1..3966: mol_type = other DNA; note = Synthetic coding sequence
atggccgctgccgcagcatcaggggctggcggtgccgcaggcgcaggaaccggtggggctgggccagccggtagattgctgccaccaccggcaccgggttcacccgcagcgcctgccgcagtgtctcccgcagctggacagcctagaccacccgcaccagcctctaggggtcctatgcccgctcgaattggttattacgagatcgaccggactattggaaagggtaactttgcagttgtgaaaagagctactcacctcgtgacaaaagcaaaagtcgccataaagatcatcgacaaaacgcagctggatgaagagaaccttaagaagatctttcgggaagtgcagattatgaaaatgctgtgtcatccgcatattattagactgtatcaggttatggagactgagaggatgatttatttggtgaccgaatatgccagtgggggagaaatattcgaccatcttgtggcccacggtcgcatggcagaaaaggaagccagaaggaaattcaaacagattgtgacagccgtctatttctgtcattgtcgcaacatcgttcaccgagatctgaaagcagaaaaccttctgctggatgccaacttgaacataaagattgccgactttgggttttctaacttgttcacaccgggacaactcttgaaaacttggtgcgggtcccctccatatgctgctccagagctgttcgagggtaaagaatatgacggtccaaaggtggacatttggagtctcggggttgtgctatacgtgttagtatgcggcgctctgcccttcgacggctccacacttcagaacctccgcgctcgggtcctttccgggaagttcaggatccccttttttatgagcactgagtgcgaacatttaatacgacacatgctggtgctggatcccaataaaagactatcaatggaacagatatgcaaacataaatggatgaaactcggcgacgctgacccgaattttgatcgactcatagccgagtgccaacagctgaaagaagagaggcaggtagaccccttgaacgaagacgtgttgctcgcaatggaagacatggggttggacaaggagcaaacgctgcagagtctgcggagcgatgcctatgatcactattccgccatctattctcttttgtgtgacaggcataagaggcacaagaccctgaggctcggggctcttcctagcatgcccagagcgctcgccttccaggctcccgtaaacatccaggccgaacaggcaggcaccgccatgaacatcagtgtgccccaagtccagctgataaaccccgagaaccagattgtcgaaccagatggaaccctgaacttggattccgacgagggagaagaaccctcaccagaagcgctcgtccgctatctgtcaatgcggagacatacggttggcgtggctgaccctaggacagaagtgatggaagatttacaaaaattactgcctggatttccgggagtcaatccgcaggcgccattcctgcaggtggccccaaacgtgaacttcatgcacaacctgttgcctatgcaaaatctacagccaaccggccagttggaatacaaggagcagagcctgctgcagccccctacgcttcagctccttaacgggatggggcctctggggagacgcgcatccgacggcggagccaatatccagctgcacgcacagcagctgttgaagagacctcgcggtcccagccccttagtgacgatgaccccagccgtcccagcggtcacccctgtggacgaggagagctccgatggagagcccgatcaggaggccgtgcagtctagtacctacaaggactctaatacactgcatctcccaacggagcgcttctcgccagttcggagattttcagacggggctgccagtatccaggcatttaaagctcaccttgaaaaaatgggaaataactccagcattaaacagctccagcaagagtgcgagcagctccaaaagatgtatggaggacagattgatgaacggacattagaaaaaacccaacagcagcacatgctctaccagcaggagcagcaccatcagatactgcagcagcaaatccaagacagtatctgtcctccacagccgagtcctccactccaggccgcttgcgaaaatcaacccgctctgctgacacatcaactacagcggctaagaatccagccatctagtccacccccaaaccatccaaataatcatttattcagacaaccctctaactcaccacctccgatgagctcggctatgattcagcctcatggggctgccagtagttcccaattccaggggttgcctagtcgatcagccatttttcagcagcagcctgagaactgttccagtcctcctaacgtggccctcacgtgtctcggcatgcaacagccagcacagtcccaacaagtcactatccaggtgcaagaaccagtggacatgctcagcaacatgccaggtactgcagctgggtcttccgggcgtgggatatctatctcaccctcagccggtcagatgcagatgcaacacagaaccaatcttatggcaaccctctcctatggccatagacccctaagcaaacaactctcagcggactctgcagaggcccatagtctgaatgttaataggttcagtcccgctaattatgaccaagctcatctgcatcctcatctgttttccgaccagagccgcggttctccctcttcatattccccttccaccggagttgggttctctcctacgcaagccctgaaggtgccacctctggatcagtttcctacttttcctccttctgctcaccaacagcctccccactacactactagcgccctgcaacaggctttactgtctcctactccccctgactatacccgacaccagcaggtgccccacattctgcagggactgctttcgccgagacactcattgacgggacactcagacatcagactgccacctactgagttcgcgcagctaattaagagacagcaacaacagaggcaacagcaacagcagcaacagcaacagcaggaataccaagagttgttccggcacatgaaccagggagatgcgggatctttggctccttccctcgggggacaaagcatgaccgagaggcaggctctgtcttaccagaatgccgactcttaccatcaccacacatcaccccagcacttgttgcagatcagggcccaagaatgcgtaagccaggctagcagccctacccctcctcacgggtacgcccaccagcctgcattgatgcacagtgagtcaatggaggaagactgctcatgtgaaggcgcaaaggacggattccaagactctaagtcttcttccacccttacaaagggatgccacgattcacccttgctgttgtctaccggtgggcctggcgaccctgaatcactcctgggaaccgtcagtcatgcacaagaattgggtatccacccttatggccatcagcccacagcagccttttctaaaaataaagtgcctagcagagaacccgtgattggcaattgtatggaccggtcaagccctggccaggccgtcgaactgcccgaccacaacggcctgggatatcccgcacgccctagtgtccacgagcatcaccgcccaagggctttgcaaagacaccataccatccagaacagcgatgatgcgtatgtgcaattggataatctgcccggaatgagcctggttgccggaaaggccctgagttcagcacgtatgagtgatgctgtgctgagccagagcagtctgatgggatcccagcagttccaggatggtgaaaacgaagaatgcggggctagtttaggaggacacgagcaccccgacttgagtgatggcagccagcatctgaactcttcatgctatccctcaacctgcatcacagatatcctgctgtcttataagcaccctgaagtcagcttctctatggagcaggccggtgtctag

SEQ ID NO: 29054 - DNA, 1569 bp, synthetic construct
  source 1..1569: mol_type = other DNA; note = Synthetic coding sequence
atgccaagaaagaaggctgctgccgcagcctgggaagagcctagcagcgggaatggaaccgcacgcgctggaccacgaaagagagggggtcctgctggaaggaaacgggagcgcccagagcggtgtagcagtagcagcggcggaggctcctctggcgacgaggacggcctcgagctggatggggcacccggtggtggcaagagggccgctcgtcctgcgactgccggaaaagccggaggtgcggcagtcgtcatcaccgaaccagagcatacaaaagagcgcgtaaaactggaggggtcaaaatgcaaaggacagctgcttatttttggggcaacaaactgggatttaattggtaggaaagaagtcccaaagcagcaggctgcttacaggaatctgggccagaatctgtgggggcctcatcggtacggctgtctggctggcgttagggtgaggactgtcgtgagtggtagttgcgccgctcactccctcctgatcacgacagaggggaagctgtggtcttgggggagaaacgagaagggccagctcggacacggagataccaagcgcgtcgaagctcctaggcttattgagggcctgtcccatgaagttattgtatccgccgcatgcggtcgtaatcatacgcttgcattgaccgagactgggtccgtgtttgcttttggggagaacaaaatggggcagctgggcctggggaaccagacagacgctgtgccatcccccgctcagattatgtataatggacagccaatcactaaaatggcgtgcggagctgagttttctatgatcatggattgtaagggaaatctctacagcttcggatgtccggagtatgggcagctggggcataatagcgacggaaagttcatagcgagagcccagcgcatagaatacgactgcgagttggtaccgcgtcgggtcgctattttcatcgagaaaaccaaggatggtcaaattttgcctgttcccaatgtggtcgtcagggacgtagcctgcggggcaaatcataccttagtgctcgatagccagaagagagttttttcctgggggttcggcggttatgggaggctgggccatgcggagcagaaggacgagatggtgccgcgtctcgtgaagttgttcgatttccccggaagaggggcaagtcaaatatatgccggatacacctgtagcttcgctgtgagcgaggttgggggactattcttttggggggctacgaatacatctcgggagtcaaccatgtatcccaaagcagtccaggatttgtgcggttggcggatccgctcgctggcgtgcggcaagtccagtatcatcgtggctgccgacgaatccacaatttcatggggcccatccccaacattcggagagttaggatacggagaccacaaacctaagagtagtaccgcggctcaggaagtgaagacccttgacggcattttctccgagcaggtcgcaatgggctactcacactctctcgttatagcgcgtgatgaaagtgaaacagaaaaagaaaagattaaaaagctgcccgaatataaccctagaaccctgtag

SEQ ID NO: 29055 - DNA, 1569 bp, synthetic construct
  source 1..1569: mol_type = other DNA; note = Synthetic coding sequence
atgcccaggaagaaagccgcagcagccgcttgggaggaacccagcagcggcaacggcaccgctcgggcaggcccacggaaacgcggtggcccagcgggacgtaagagagagcgccctgagcggtgctcatccagttccggtgggggaagttccggtgacgaggatgggctggaactcgacggcgctcccggtggcggaaaacgagccgcacgccctgcgaccgccggaaaggccggtggcgcagccgtggtgatcactgaacccgagcacacgaaagagagggtgaagctggaaggatccaagtgtaaaggacagcttctgatctttggcgctactaactgggacctgatcggacggaaggaagtgccaaagcaacaggctgcatatcgtaacctcggacaaaacttatgggggcctcaccgctatgggtgtcttgctggggtgagagtaaggacagtagtgtcaggtagctgtgcagcacattccctcctcattactactgagggtaagctgtggagttggggtcggaacgagaagggacagctgggccacggtgacactaaacgagtcgaagccccacgtctgatagaaggactatctcacgaagtcatcgtcagcgccgcatgtggtagaaaccacaccttggcattgaccgagactggcagtgtctttgcttttggtgaaaacaagatgggtcagctgggtctaggtaaccagactgatgcagtacctagcccagctcagattatgtacaatggtcagccgattaccaagatggcctgcggggcagagtttagtatgattatggactgtaaaggcaatctgtatagctttggctgcccagagtatggccagctaggccataactccgatggcaagttcattgcccgtgcccagagaattgaatacgactgtgagctggtgcccaggcgggtggcgatctttatagaaaaaaccaaggacgggcaaatcctgcccgttcccaatgtggtcgttagagacgtggcctgtggcgcaaaccataccctggtgctcgacagtcagaagcgagtgttttcgtgggggttcggaggttacggtcggttagggcatgccgaacaaaaggatgagatggtgcctaggctcgttaagctcttcgatttcccgggaagaggggctagccagatctatgccggatatacctgcagtttcgcagtatcagaggtggggggtttgttcttttggggcgctacaaacacaagtcgggaatctacaatgtatccaaaagccgtgcaggacttgtgtggatggcgcatccgatccctggcatgcggcaagtccagcatcatcgttgcagccgacgaaagcactattagttggggaccctcaccaaccttcggtgaactgggctacggagatcacaagcccaagtccagcacagccgctcaggaagttaaaactctcgacggcatcttctccgagcaagttgccatgggctacagccactctctggtgatcgccagggatgagagtgagaccgagaaagaaaaaatcaaaaaactgccagaatataatccacggacactatag

SEQ ID NO: 29056 - DNA, 552 bp, synthetic construct
  source 1..552: mol_type = other DNA; note = Synthetic coding sequence
atgactgaccagacatattgtgaccgcctagtacaggacactccctttcttaccggccatggaagactgtctgagcagcaggtggaccggattatcctacagttgaatcgctactaccctcagatcctgacaaacaaggaggctgaaaaatttcggaacccaaaggcgtcgttgcgcgttagactttgcgatctgctgtcgcatcttcaacgtagtggggaacgggattgtcaggagttctaccgcgctctttatatccacgctcagccgctgcactctcgcctgccttctcgtcacgcattgcagaacagtgattgcaccgaactcgattccggcagtcagtccggcgagctgtcgaatcggggaccaatgtcattcctcgcgggtctcgggctggctgttggactggctctgctgctttattgctatcctccggacccgaaaggcctgcccggtacacggagagtgctcggttttagccccgttattattgaccgacatgtgagcagatatctcctggccttcctggccgacgatctagggggtctctag

SEQ ID NO: 29057 - DNA, 492 bp, synthetic construct
  source 1..492: mol_type = other DNA; note = Synthetic coding sequence
atgctggacctcctggatatcgagggcttatacccactatacaacagggtcgagagatatctcgaggagtttcctgaagagaggaaaacactgcagattgatgggccatacgatgaggccttctatcaaaagctactggatcttagcaccgaagatgatggaactgtagctttcgccttgactaaggtccagcagtatcgcgtggccatgaccgctaaagactgcagcattatgatcgcgctgtccccttgtcttcaggatgccagttcagaccagcggcctgtggtaccctcttctcgtagccggtttgcttttagcgtgtcagtgttggaccttgatttaaaaccatacgagtccataccacatcagtacaagctggacggaaagatcgtgaactactactcgaagacagtaagggctaaagacaatgccgtcatgtcaacccgtttcaaggagtctgaagattgcaccctcgtcctgcacaaggtttag

SEQ ID NO: 29058 - DNA, 777 bp, synthetic construct
  source 1..777: mol_type = other DNA; note = Synthetic coding sequence
atggcaaggccacccgtgccgggatccgtggtggttcctaactggcatgagtctgcggaaggaaaagaatacctggcctgtatcctgcgcaaaaaccggagacgtgtctttggactgttagagaggcctgtattgctgccccctgtgtccattgacacggcatcctacaaaatattcgtgagcgggaagtctggggtcggtaaaacagcccttgtggctaagctggccggactggaagtgcccgttgtccatcatgagactaccggaattcaaacaacggtggttttctggcctgccaaactgcaagctagttctcgggtggtaatgtttaggttcgagttctgggattgcggtgaatcggccctcaagaaattcgatcacatgttgctagcttgcatggaaaacaccgacgctttcctctttttattttccttcactgacagagcttccttcgaggatctccctggtcaactagcgaggatagccggagaggccccaggcgtggtccgtatggtgattggctccaagttcgaccagtatatgcatactgacgtgccagagagagacctgaccgctttcaggcaggcttgggaactacccctgctgcgagtgaagtccgtgccgggacgcagattagccgatgggcgaacacttgacggacgagccggactggccgacgtggcccatatactgaacgggctggccgagcagctgtggcatcaagatcaggtagccgcaggccttctaccaaacccacctgagtccgctccggagtag

SEQ ID NO: 29059 - DNA, 333 bp, synthetic construct
  source 1..333: mol_type = other DNA; note = Synthetic coding sequence
atggccgacaaggtcctgaaggagaaacggaagcagtttatcagatctgtgggagaaggcactatcaacggactgctcggcgagctgctggaaaccagagtactctcacaggaagaaatcgagattgtcaagtgcgagaacgccactgtgatggacaaagcgcgtgccctgttggacagcgtcatccgcaaaggagcgccagcgtgtcagatctgcattacctacatctgcgaggaagacagccatcttgccggtaccttaggtctgtcagccggtcccacgagcggtaaccatctcaccacccaagattctcaaatcgtcctgccgtcctag

SEQ ID NO: 29060 - DNA, 924 bp, synthetic construct
  source 1..924: mol_type = other DNA; note = Synthetic coding sequence
atggagccctcaagtctggagctgccagcggacacggtacagagaattgccgcagagcttaaatgtcaccccacagacgagcgtgtggcactacacctggatgaagaggacaaattgagacattttcgtgagtgcttttatatacctaaaatccaggatttgccacctgttgacctgtctctggtgaacaaagatgaaaacgccatctatttcctgggcaactctctcgggctgcagccgaagatggtgaagacctacctggaagaagaactggacaaatgggctaaaatcgctgcatacggtcacgaagtgggtaaaaggccttggataaccggagacgagtccatagttggcttgatgaaggatatagtcggcgcaaatgagaaagagatagctctcatgaatgctctcacggtcaatctccatctcctgatgttgagcttctttaagccaactcccaagcgatataagattttgctggaggctaaggcctttccatctgatcactatgccattgaaagtcaactgcaactgcacggcctcaacattgaggaatccatgaggatgatcaagcctcgtgaaggcgaggaaactttgcgcattgaagatattctcgaggtcatcgagaaggagggtgatagcatagccgtgatcctgttcagtggggtccacttctatacagggcagcattttaatatccctgccattacaaaagcaggacaggccaaaggctgttacgtcggctttgatctcgcgcatgcggtgggtaatgttgaactttatctccacgattggggcgtggacttcgcctgttggtgctcgtacaaatatctcaatgcgggagcgggtgggatagcaggcgcatttatccacgagaaacacgcccacacaattaaacctgcgagatccgaatttttcaattag

SEQ ID NO: 29061 - DNA, 3060 bp, synthetic construct
  source 1..3060: mol_type = other DNA; note = Synthetic coding sequence
atggagcctggggaggtgaaggacaggatcctcgagaacatctctttgagtgtgaagaagctgcagtcttacttcgctgcctgcgaggacgaaatccccgctattcggaaccatgataaggtgcttcagcggctgtgcgaacacttagatcatgctctgttatacggactgcaggacttatcaagcggctactgggtcctcgtggtccattttaccaggagggaagcgatcaaacagatcgaagtgctccagcatgtggctactaacctcggaagaagtcgggcttggctgtacttggcattgaacgagaattccttagagagctatctgaggttatttcaagaaaatctgggattactgcacaaatactatgtgaagaatgcactcgtatgctcccacgatcacctcactctttttctgaccctggtgagtgggctcgagtttattaggtttgagttggatctggacgcaccctacctcgatttggctccatacatgcccgattattacaaaccgcagtatctgcttgattttgaggatagactgccaagctctgtgcacggtagtgactccttgagcttaaatagtttcaacagtgtaacaagtacaaatttggaatgggatgacagcgcgattgcaccttcgtcagaagactatgatttcggcgacgtatttccagcagtaccatcagtgcctagcacggactgggaagatggggatttgacagacacagtgagtggtcctaggagtacagcgtctgacctcacctcctctaaggcatcaacaaggagccctactcagaggcagaatccctttaacgaggagcctgctgaaacagtctcctcatctgacacaacccccgttcataccacctcgcaggagaaagaggaggctcaggcgctggaccccccagacgcgtgtacagagctggaagtgatcagagtgaccaaaaagaagaagatcggaaagaaaaaaaaaagccggtctgacgaggaagcctcgcccctgcacccagcatgcagccagaagaagtgtgccaagcaaggtgacggggacagccgtaatggtagtccctctctggggagagattctcccgacactatgcttgcatccccacaggaagagggcgagggtccaagctctaccactgaatcctccgagagatctgaaccagggctcctcatccccgagatgaaggacacctccatggagaggcttggacagcccctgagcaaagttattgatcagctgaacggacaattagacccgagtacttggtgcagcagagccgagccgccagaccagtccttcagaactggatcaccaggggacgccccagagcggccacctctgtgcgacttctctgagggcctcagcgcacctatggatttttataggtttactgtcgagtctccaagcaccgtaacaagcggaggcggtcaccacgatcccgctggcctcggacagccacttcacgtgcccagctcccccgaagcagccggacaggaagaggagggagggggaggcgaaggacaaacacccagacctttggaagacacaacccgggaggctcaagagctggaggcccagctgtctctggtgagggaggggcctgtctccgaaccagaacccggaacgcaggaagtcctgtgccaacttaaacgtgaccagccatcaccatgcctttccagcgccgaagacagcggcgtggacgaaggacaagggtctccctctgagatggtgcattcttcagaattccgtgttgataataaccatctcctgctgctgatgatacacgtgttccgtgagaatgaagagcaacttttcaagatgatccgcatgagtactggacatatggagggaaacttgcaactcttgtacgtcttgttaactgactgctatgtgtacctgctgcggaagggggctactgagaaaccctatctggtcgaagaagctgtcagttacaatgagttagactatgtgagcgtgggcttggatcaacagacggtgaagttggtgtgtaccaaccgtcgtaagcaattcctcttggatactgccgatgtggcccttgccgagttcttcctcgcatccctgaagagcgctatgattaaaggctgtagggaacccccatacccctctatcttgactgacgctacaatggaaaagctggcactggcaaaatttgttgctcaggagtctaaatgtgaagctagcgcagttactgtgcgtttttatggccttgtacattgggaggatcctactgacgagagtctcggacctaccccatgtcattgtagccctcctgagggaactattactaaggaaggaatgctgcattataaggctggtacttcttacctggggaaggaacattggaagacttgctttgtggtcctttctaacggcatcttgtatcaatatcccgacaggacagacgtcatccccctgctgtcagtaaacatggggggagaacagtgtggcggttgcaggcgcgctaacaccacagatagacctcacgccttccaagtgattctatctgaccgaccctgcttagagctttccgctgagtctgaagccgagatggccgagtggatgcagcacttatgccaggctgtctccaagggggtgatccctcaaggtgtggcaccatccccctgcatcccatgctgtctcgtgctcacagacgacaggctttttacttgccacgaggactgtcagacatcattttttcgcagcctcggcaccgccaagctgggcgacattagcgctgtgtccactgaaccaggcaaagaatattgcgttctggagttctcacaggactcacaacagctgctcccaccctgggttatctatctgtcatgcacgtcggaactggaccggctcctgagcgctctgaactccggctggaagaccatttaccaggtggatctcccgcacacagcaattcaagaggcaagcaacaaaaagaagtttgaggatgctctgagtttgattcatagcgcttggcagaggtctgattctctgtgtaggggcagagcttccagggacccttggtgctag

SEQ ID NO: 29062 - DNA, 318 bp, synthetic construct
  source 1..318: mol_type = other DNA; note = Synthetic coding sequence
atgaagcccttcgaagacgccctgaaaaatcagcccctcggccctgtgctgagcaaggcggcttcagtggaatgcatttccccggtgtcccccagagcacccgacgcgaagatgctagaagagctgcaggcagaaacctggtaccagggcgaaatgagcaggaaggaagcagagggactgctggagaaagatggagacttccttgtaagaaagtcgactacaaaccctggatcattcgtcctcaccggtatgcacaacggccaggccaaacatttgctgctcgtggatcctgaaggcactagatcaaactcctactag

SEQ ID NO: 29063 - DNA, 318 bp, synthetic construct
  source 1..318: mol_type = other DNA; note = Synthetic coding sequence
atgaagccctttgaagacgctctaaagaatcaacctctgggccctgtgctgagcaaagcggcttccgtggagtgcatttctccagtgtctccacgagctcctgacgccaaaatgctcgaagagctgcaggccgaaacctggtaccagggtgaaatgtctcggaaggaagcggagggtctacttgagaaggatggcgacttcctggtacgcaaaagcaccactaacccaggatccttcgtgctgaccggaatgcataacgggcaagccaaacacctgctgctggtagaccctgagggaacccggtcaaacagctattag

SEQ ID NO: 29064 - DNA, 1785 bp, synthetic construct
  source 1..1785: mol_type = other DNA; note = Synthetic coding sequence
atgttgccgcgaaccaagtacaaccggtttaggaacgactccgtgacttccgtagacgacctacttcacagcctttctgtgtcaggaggcggtggcaaagtttccgccgctagggctacgccggcagccgcaccttacctcgtctctggagaagccctgaggaaagcccctgatgatggccctggctctctggggcacctgcttcataaggtcagccatctgaagttatcctcgtctggcctccggggactgtcctccgccgcaagggaaagggcaggggcacggctatctggaagttgctccgctccatcactagctgcccctgatggtagcgccccaagtgcgcctagagctcccgcaatgtcagccgctcggaaggggaggccaggcgacgagcctcttccgaggccgcctcgcggtgcaccccacgccagcgaccaagttttgggcccaggcgttacctacgtcgtaaagtacctgggctgtatcgaagtgcttcgttctatgaggtcactggatttctctacacgcacccagatcacgcgggaggctattagccgcgtttgcgaagccgtacccggtgctaagggcgcttttaagaaaaggaagcctccgagtaaaatgttgagctccattctgggcaaatcaaatctgcagtttgccggtatgtccatctcacttacgatttccaccgccagtctgaatctgcgcacccccgactcgaagcagataattgccaatcaccacatgaggtccataagcttcgcgagcggaggcgacccagatacaactgactatgtggcttatgtggcaaaagacccagtcaatcgccgtgcctgccacatactcgagtgctgtgacggcctggcgcaggacgttatcggctcaattggacaggcctttgagctaagattcaaacagtacctgcagtgcccaacaaagattcccgctctgcacgacagaatgcagtcccttgacgaaccatggacagaggaggaaggagacggctccgaccacccgtattataactcaataccctctaagatgcctccccctggcggttttctagacacccgcctgaagcccagaccacatgcaccagatacagcccaattcgcagggaaggagcaaacttactatcagggtcgccatttgggagatacgttcggggaggactggcagcagacaccccttagacaagggtctagtgatatttattccactccggagggaaaactgcacgtggccccaacgggagaggctcccacctatgtgaatactcagcagatcccaccccaagcctggccagcagccgtgagttcagccgagagcagcccccgaaaagatcttttcgatatgaagcccttcgaagacgctctgaagaaccaaccgcttggacctgtgctgagcaaagccgcttcagttgagtgtatttctcctgtgagtccccgtgcccctgacgcaaagatgctagaggagttgcaggccgaaacctggtaccagggagaaatgtctcggaaagaggcagaggggctattagagaaggacggcgacttcttagttagaaaaagtactaccaatcctggatccttcgttctgacaggcatgcacaacggccaggctaaacacttactgttggttgacccggaaggcacaatacgcacaaaagatagagtgttcgactcgatttcccaccttattaatcaccatctggagtccagcttgccaatcgtgagcgctggtagcgaactgtgtcttcagcagcccgttgaacgcaaacagtag

SEQ ID NO: 29065 - DNA, 693 bp, synthetic construct
  source 1..693: mol_type = other DNA; note = Synthetic coding sequence
atgaatacactaatggatgtgctcaggcataggccaggttgggtggaagtcaaggacgaaggcgaatgggatttttactggtgtgacgtctcctggctcagagagaattttgatcacacctacatggatgagcacgtgcggatttcgcattttcggaaccactacgagcttacaaggaagaattacatggtgaaaaacctgaaaaggttccgaaaacagctggaacgcgaggctggcaagctcgaagctgccaaatgtgacttttttcccaaaacctttgagatgccttgcgaatatcacctgtttgtggaagaattcaggaaaaatccagggatcacctggatcatgaagcctgatacaaggtcaagcgacgatcaaaaggacgacatcccggtggagaactatgttgcacaaagatacattgagaatccttatctaattgggggacgcaaatttgatttgagagtgtacgtactcgtaatgtcctatatcccccttcgggcatggctataccgcgatggtttcgctaggttctccaatacaaggttcacgctgaactctatagatgaccaatatgtgcaccttacaaacgtggctgtgcaaaagacaagccccgattatcatcctaaaaaagtcgcaccgggaggccagtgtgtgccaattacggatagccaacagcctggcagactgtag

SEQ ID NO: 29066 - DNA, 1068 bp, synthetic construct
  source 1..1068: mol_type = other DNA; note = Synthetic coding sequence
atgaatacattgatggacgtcttaagacatcgtccgggttgggtggaagtgaaggacgaaggtgaatgggacttctattggtgcgatgtcagctggttgcgggaaaattttgaccacacatacatggatgagcatgttagaatcagccacttccggaatcactacgaactgactcgcaaaaattatatggttaagaacctgaagagattccggaagcagctggaacgcgaggcaggcaagctcgaggcagctaagtgcgactttttccccaagacttttgagatgccatgtgaatatcacttatttgtggaagagttcagaaagaaccccggaataacctggatcatgaagccagatacccgctcttccgatgaccagaaagacgatattcctgtggagaactatgtggctcagcgttatatagagaatccgtatttaattggcggtcgcaagttcgacctgagagtctacgtccttgttatgtcttacattccccttagggcatggctgtatagggatggctttgctaggtttagcaatacacgctttacactgaactctattgacgaccaatacgtgcacctgacaaacgtcgccgtgcaaaaaacgtcccctgactaccatcctaaaaaggggtgtaagtggaccctgcagcgattccgccaatatcttgcctctaagcacggcccagaagccgtggagacgcttttcagggatatagacaatattttcgttaaatctttgcagtctgttcaaaaagtgattatttcagataaacattgtttcgagctgtacggatatgatattttgatcgaccaggacctgaagccgtggttattggaggtgaacgcctctccaagtctcacggccagttcacaggaggattacgagctgaaaacttgtctgcttgaggatacactgcatgtagtcgatatggaggcgagattacggcaacgctccgaagagaccacagaagctgcactactgctcccctctagtagtgaggagtcgttccagctgattccttcatgtcaggaggagatttccctgagcaggccatgtgtgtag

SEQ ID NO: 29067 - DNA, 840 bp, synthetic construct
  source 1..840: mol_type = other DNA; note = Synthetic coding sequence
atgtctagaccaaagaaccagaattataagggtcatggtctgagtaaaggaaaggaacgcgagcagcgagcaagcattaggttcaagaccacactcatgaacacgttaatggacgttttgcgccacagaccaggatgggtggaagttaaggacgagggtgaatgggatttttattggtgtgatgtcagctggctgagagaaaactttgaccatacctatatggatgagcacgtcaggatctcccacttccgcaaccactacgagctgacccgaaaaaactacatggttaagaacctcaaacgcttccgcaaacagctggagcgcgaagcgggaaagctagaagcagccaagtgcgacttctttcccaagactttcgaaatgccgtgcgagtatcacctgtttgtcgaagagtttaggaagaaccccggaatcacttggatcatgaaacccgtggctcgtagccagggaaagggtatcttcctgtttcggaggctcaaggatatcgtggactggcggaaggacacacggtcttccgacgaccagaaagacgacatccccgtggaaaactatgtggcgcagcgctatattgaaaacccctacctcattggcggacgtaaattcgatctgcgcgtgtatgttctagtgatgtctatgttcacatcacctacttggttgtgtaagaagcatcttccaacaacaacacagcgccgagccgctagcgggcgatgttctgcttccggctccacctggcgacccaatactggtcctagacagtggagacatagcagcgggacaagcacaactagcttgagtaaggcctgtagagtgtgtcgtaggtag

SEQ ID NO: 29068 - DNA, 1116 bp, synthetic construct
  source 1..1116: mol_type = other DNA; note = Synthetic coding sequence
atgagcaggcctaagaatcagaactacaaggggcacgggctgtccaaaggcaaggagagagagcagcgggctagtataaggtttaaaaccactctaatgaataccctgatggacgtcctcaggcatcggcctggctgggtagaagttaaagacgagggggagtgggatttctattggtgcgacgtatcctggttgcgggagaatcttgagagagaggccggaaagttggaagccgcaaaatgtgactttttcccgaagaccttcgagatgccctgcgagtaccacctcttcgtggaagaatttcggaaaaatcctggaatcacatggatcatgaaacccgtcgctagatcacaggggaaaggcatctttttgttccggagactaaaagacattgttgactggcggaaggatacgagatcttccgacgaccaaaaggacgatatcccagtggagaattacgtagctcagcgatacattgaaaatccctacctgatcggaggcaggaagtttgacctacgggtatatgtgctggtgatgtcatatattcctcttcgcgcatggctgtaccgggacggttttgccaggttctcaaatacccgatttaccctcaattctatagacgatcagtatgtgcatctcaccaatgtggccgtgcagaagaccagtccagactaccaccctaagaagctccatcctaccgttggtcccctctgcatacattcccctgaaaatggatctttgtctgtgactccttggccgtgggacgcgcatatgggctgcaaatggactttacaacgtttccggcaatacctcgcttcaaagcatggaccagaagctgtcgagactttgtttagagatatcgacaacatcttcgtcaaaagtttacagtctgtccagaaagtgatcattagtgacaaacactgttttgaactctatgggtacgacattttaatcgatcaggacctcaaaccctggctgctggaggtgaacgcaagtcccagtctgaccgccagttctcaggaggactacgaactgaagacatgcctccttgaggatactctgcacgtggtggatatggaggcctccttttcgcccatcataccagctgaggtttag

SEQ ID NO: 29069 - DNA, 1320 bp, synthetic construct
  source 1..1320: mol_type = other DNA; note = Synthetic coding sequence
atggtgccatctagggaagcccttctcgggcctggaactacggctatcagatgtccaaaaaagctccagaaccaaaactacaaaggccatggactttcaaagggcaaagagagggagcaaagggcaagtattcggttcaagactaccttgatgaacacactgatggacgtgctgaggcacaggccaggctgggtggaagtcaaggatgaaggtgaatgggacttctattggtgcgatgtttcttggctgagggaaaattttgatcatacttatatggacgaacatgtgaggatctcccacttccggaaccattacgagctcaccagaaaaaactatatggtgaagaaccttaaaaggttccgcaaacagcttgagcgtgaagcgggaaaactagaggctgcaaagtgcgatttcttccctaaaacgttcgagatgccctgcgaataccatctctttgtggaggagtttcgcaagaacccagggatcacctggataatgaagccagtggcacgctcacagggcaaaggaatctttttatttaggcgacttaaagacatagtggattggcggaaggacacaagatcctcagatgaccagaaggacgatatccccgttgagaactacgtcgctcagcggtatatcgagaacccttaccttattgggggaagaaagttcgatctgcgggtatatgttctagttatgtccgtcttcgctgagtgcttactgtggagcggccaccggaggcaggacgttcatctgaccaatgtggcagtccagaagacctcaccggactatcaccccaagaagggctgcaaatggactctccagagattcagacagtacctcgcatctaagcacgggccagaagctgtggaaaccttgtttcgcgatattgataacatcttcgttaagtcactgcagtccgttcagaaggttatcatatccgataaacattgctttgagctgtacggctatgatattctgatcgatcaggacctaaagccctggctgcttgaggtcaacgcaagcccgagcctaactgcgagctcacaggaggactatgaattgaagacatgtctgctggaagacacactgcatgtggttgatatggaagccagattgaccgggcgagagaagagagtgggtggatttgacctgatgtggaatgatggacccgtctcacgcgaggaaggcgctcccgacttgagtggcatggggaactttgttactaacacccacctggggtgcgtgaacgaccggaagaagcagctgaggcagctgttttgttcacttcaggtgcaaaagaaagcttcgtcctag

SEQ ID NO: 29070 - DNA, 501 bp, synthetic construct
  source 1..501: mol_type = other DNA; note = Synthetic coding sequence
atgaaggagatgcttgcaaaagatttggaagagtcacagggcggaaagtcctccgaagtcctatccgccacagagctccgcgtccagctcgcccagaaggaacaggagctggctagggcgaaggaagctctgcaggccatgaaggccgaccggaagaggctcaaaggagagaagacggatttggtctctcagatgcagcagctctatgccaccttagagtctagagaggaacagctgcgtgacttcattcgaaattacgagcagcatcgcaaggagtcagaagacgccgtgaaggcactcgccaaagagaaggatctgttagaacgggagaagtgggaactaaggcggcaggccaaagaggccaccgatcacgcaactgcactgcgaagccagcttgatcttaaggacaataggatgaaggagctggaggccgaacttgcaatggcaaaacagagtcttgctactctcaccaaagatgttcctaaacgccacagcctgtag

SEQ ID NO: 29071 - DNA, 2328 bp, synthetic construct
  source 1..2328: mol_type = other DNA; note = Synthetic coding sequence
atgatggaggataacaagcagctagcactcagaatcgatggggcagtccagtcagctagtcaggaggtgacaaacctgagagcggaattgacagctactaatcgaagactggccgagctgagcgggggaggaggcccagggccaggccctggagccgcagctagtgcatctgccgctggagacagtgccgcaacaaacatggagaacccccagttgggcgctcaggtcttgttacgagaagaggtctctaggctccaggaggaggtgcacttgcttcggcagatgaaggagatgttagccaaagatctcgaagaatcgcaaggcggtaaatccagcgaagtattgtccgccacagagttacgcgtgcagctggctcagaaggagcaggaactggctagagccaaagaggcactgcaagccatgaaggccgaccggaaacgtctgaagggggagaagaccgacctggtttctcagatgcagcagctctacgcaactttagaatcaagggaggagcagcttcgcgacttcatcagaaactacgagcaacaccggaaggagtctgaggatgcagtgaaggccctggccaaagagaaagatctgctggagcgagaaaagtgggaactgcggaggcaggctaaggaggcgactgatcacgcaactgccctacggagtcagctggatcttaaggataatcgtatgaaagagttagaggccgaactcgccatggctaagcagtccctcgctacactgacaaaggacgtgccaaagcgccatagcttggccatgcctggcgaaacagtgctgaatggcaaccaggaatgggtcgtacaggcagatctgccactcacggcagccattcgccagtctcagcagactctgtatcacagtcacccacctcatcctgctgacaggcaggccgtgcgggtgagtccatgccactcccgacagccttctgtgatctctgatgcttctgccgcagaaggggaccgctcgagcactccatctgatataaacagcccaagacatagaactcattccctatgtaacggggatagccctggcccagtgcagaaaaatctgcacaacccaatcgtgcagagtttagaagacttagaggaccagaaacgcaagaaaaaaaaagaaaaaatggggtttggaagtattagtagggtcttcgctcgcggaaaacagaggaagtccctggaccccggtctgtttgacgattccgactcacagtgcagccccacacggcaatctctttctctgtcggagggcgaggagcagatggatcggctacagcaagtcgagctggtgagaaccactccgatgtcgcactggaaggctggcacggtgcaggcctggctggaggtcgtgatggcaatgccaatgtatgtaaaggcatgcaccgagaatgtcaaatctgggaaggtccttctatccttgtccgacgaagatctgcagctgggactaggtgtgtgttcatcgctacatagaaggaagctacgtctcgccattgaagactacagggacgccgaggcagggagatcactgagcaaagccgctgagctggaccatcattgggtggctaaggcgtggctgaatgacatcggactgtctcaatacagtcaggcttttcaaaatcacctcgtggacggacgtatgctgaactcactcatgaagcgcgacctagaaaaacatctaaacgtcagcaaaaagtttcatcaggtgagcatcctcttggggatagaacttctctaccaagtgaatttttcccgagaggcattacaagagagacgggcaagatgtgagacccagaacattgaccctgtggtatggaccaatcagcgggtgcttaaatgggttcgggatattgacctgaaagagtacgcagataacctgaccaattctggagtgcacggagccgtgcttgtgctggaacccacgtttaatgcagaggcaatggcaaccgcccttggaattccgagcgggaagcatattctcagacgccatctggccgaagaaatgagcgcagttttccaccctgcgaactccaccggcatacgggaggctgagcgatttggaaccccacctgggcgagcaagttctgtaacacgggctgggaaggaggaaaatagcagcgggttaaagtacaaggctggaagacttccactcgggaaaattggcaggggcttttctagtaaagatcctgactttcatgatgattacgggagtttgcagaatgaagattgcggcgatgatgatccccagtcaaggctggaacaatgcaggttagagggatataactcactcgaggttacaaatgtctag

SEQ ID NO: 29072 - DNA, 861 bp, synthetic construct
  source 1..861: mol_type = other DNA; note = Synthetic coding sequence
atgtattcactagacaggatctttgctggtttccgtacacggtctcagatgcttctggggcatatagaggagcaggataaggttctgcactgtcagttctccgacaattctgatgacgaggagagtgaaggacaagagaaaagtggcactcggtgccgctcacggtcctggatacagaagccagacagtgtgtgtagcctcgtagaacttagcgacacccaagacgaaacccagaaatccgaccttgaaaacgaagatttgaaaatcgattgtttgcaggaatcccaggaactgaatctacaaaagctgaagaattcagaacgaattctcaccgaagcaaagcagaaaatgcgggagctgacaataaacatcaagatgaaggaggatttgattaaagagttgattaagacggggaacgacgctaagtctgtgtctaaacaatactctctgaaagtgacaaagctcgagcatgacgcagaacaggccaaggtcgaattgatcgagacacagaagcagctacaagaattagagaacaaggacctctcagatgttgctatgaaagtgaagctgcagaaggaattccggaagaagatggacgctgccaaactgcgtgtccaggtcctccaaaaaaagcagcaagactcaaagaagctggcctccctctccatacagaacgagaagcgggctaacgagttggaacagtcagttgaccatatgaaataccagaagatccagctgcagcgaaaattgagagaagagaacgagaagcgcaaacagctagacgccgtcataaagcgagaccagcagaagatcaaggtcatcctttcctacatcccagccaagtacaacatgaagtgctag

SEQ ID NO: 29073 - DNA, 1662 bp, synthetic construct
  source 1..1662: mol_type = other DNA; note = Synthetic coding sequence
atgaacaagaacactagcacagtagtgtcaccgagcttactcgagaaggaccctgcctttcaaatgataacgatcgctaaggagaccggactcggactcaaagttctgggcggtatcaatcggaatgagggacctttggtgtatatacaggaaatcataccaggaggggattgctacaaggacgggcgattaaaaccaggtgatcagctggtgtcagtcaacaaggagagtatgatcggagtttcttttgaggaagccaagtctattattacaggggcaaagctccgcctggagtctgcctgggagatagcattcattcgccagaagagcgataatatccagcctgaaaacctaagctgtactagcctgatcgaggccagcggggagtacggcccacaggcctctacactgtccttgttctcctcacctccagagatactgatccccaaaacctctagcacccccaagacaaacaacgatatcctgagctcctgtgagatcaagactggatataacaagacagttcagattccaatcacaagcgagaactctacagtcggtttaagtaataccgatgtggcatccgcctggaccgagaactacggcctgcaggagaaaatttccttgaaccccagcgtgcgcttcaaggctgaaaaactcgagatggcattgaactacctgggaatccaaccaactaaagaacaacaccaagcgcttcgtcaacaggtgcaagccgattccaagggtactgtctccttcggtgacttcgtacaggtggcccgtaacctgttctgcctgcagttagacgaagtgaatgtaggcgctcacgagatcagcaacatattagactcccagttgctgccatgcgactccagtgaggccgatgagatggaacggctgaagtgcgaacgggatgatgctctcaaggaggtaaacaccctaaaggagaaactgttggagtccgacaaacaacggaaacagttaacggaggagctgcagaacgttaagcaggaggctaaagctgtggtggaggaaacgagagccctgaggtcgcgaatacatctggctgaggctgcccagcgccaagcccacggcatggaaatggattacgaggaggtaatccgtctcttagaggctaagattactgaactgaaagcacagcttgccgattactccgatcagaacaaagagagtgtccaagatctgaaaaagagaatcatggtgctggattgtcagctcagaaaatccgaaatggccaggaagacattcgaagcttccaccgagaagctattgcattttgtggaggctattcaggaggtctttagcgacaactccaccccactatccaacctgagcgagcgcagggccgtgctcgctagccaaacctctctgacccctctgggaaggaacgggaggagcatacctgccacattagctctagagtcgaaggaacttgtaaaatcggtacgcgcacttctggatatggactgcctgccatatgggtgggaggaagcatacacagcagacgggatcaagtactttattaatcacgtgacccagactacatcatggattcaccccgtcatgagcgttttgaacctttcacgaagcgaggagaacgaggaagattgcagccgcgaattacccaatcagaagtcctag

SEQ ID NO: 29074 - DNA, 564 bp, synthetic construct
  source 1..564: mol_type = other DNA; note = Synthetic coding sequence
atggccgctcccggagcccttctggtcatgggagtgtccgggtctggcaagagtactgtgggggctctgctggctagcgagctcgggtggaagttttacgatgctgatgattaccatcccgaggagaatcgccgaaaaatgggtaagggcatccctctcaacgatcaggaccgcatcccatggctctgcaatttacatgacatactgttacgcgacgttgcatctggacagcgggttgtgctggcctgctctgcacttaaaaaaacataccgggacattctcacccaggggaaggacggggtagcgctcaaatgtgaggaaagtggaaaagaggccaagcaagcggagatgcagctcctggtcgtccaccttagtggtagcttcgaggttatttccggcaggctcctgaaacgtgaaggccacttcatgccccctgaactgctgcaatcccaattcgaaacactcgagcccccagccgcaccagagaattttatccagatatcagtggataaaaatgtgtcagagatcatagccactatcatggagaccttaaagatgaaatag

SEQ ID NO: 29075 - DNA, 1134 bp, synthetic construct
  source 1..1134: mol_type = other DNA; note = Synthetic coding sequence
atggctaccatacccgactggaaactccagcttttggcgagacggagacaggaagaggccagtgtgagaggacgcgagaaagccgagcgcgagaggctttctcagatgccagcctggaagcgcggactgcttgagcgacgcagggcaaaactgggcctgagtcctggggaaccatccccagtgcttgggaccgtagaagctggacctcccgatcctgacgagagtgccgtgttactcgaggcgattggaccagtgcaccaaaacaggttcatccgacaagagcgacagcagcaacagcagcagcagcagagatcagaggaactcctcgccgaacgaaaaccaggaccattggaagccagagaaaggagaccatcccccggtgaaatgagagaccagagtccgaagggcagggaatcgagagaagagaggctttcccctcgcgagacccgtgagcgcaggctgggtattggtggcgctcaggagctttccctgcgacctctcgaagctagagactggaggcagtcccccggtgaagttggtgatagaagttctagacttagcgaggcatggaaatggagactgtccccaggtgaaacaccagaacggagcttgaggctggccgagtcccgggagcagtctcctaggagaaaagaagtggagagtcggctgtcacctggtgaatctgcttatcaaaaactggggctaacggaggcacacaaatggaggcctgattcaagagaatctcaggagcagtccttagtccaacttgaggctacagaatggcgactcaggtccggcgaagagcgtcaggattatagcgaggaatgtggccgaaaggaagaatggcctgtgccaggagtggcccctaaggagactgccgagctgtctgaaactttgacacgtgaagcacagggaaactcctccgctggagtggaagccgcagagcagaggccagtggaggacggagaacgcggaatgaaaccaacagagggctggaagtggacacttataatgtcgctcgcaggaaaaggaaaccagcacctggttacctgcttcccgcatcctgtgagtggcggacgcgcaaattgccccatttctacattgatccagtccccatggtgcggatggggatag

SEQ ID NO: 29076 - DNA, 2223 bp, synthetic construct
  source 1..2223: mol_type = other DNA; note = Synthetic coding sequence
atggaggcagacggcgacggagaggaactggcacgtctccgctcggttttcgctgcgtgtgacgcgaatagatcagggaggttggagagagaggagtttcgcgcactatgcacggagctgcgagttcggcctgctgacgccgaagctgttttccagcgtctcgatgctgacagggatggtgccatcaccttccaggagttcgcgaggggtttccttggtagcctgcgaggaggacggaggagggactggggaccgctcgatcctgcccctgccgtgtctgaggccggtcccgagacccatgactcggaggaagatgaaggcgatgaagacgcggctgcagctctggcaacatcttgcggacctgcttcacccggtagagcgtggcaggattttcaggctcgactgggcgacgaggctaaatttatcccccgtgaggagcaggtgtcaacactgtatcaaaatataaatttagttgagccgagactgatccaaccctacgaacacgtcattaagaatttcatccgagagattcggctgcagagcacagagatggagaacttggctatagctgtgaagagggcacaggacaaggccgctatgcaactgtccgaactcgaggaagaaatggatcagagaattcaggctgctgaacataagacgcgcaaggatgagaaacgaaaagctgaggaggctctgagcgatctccggagacaatacgagactgaggtgggggatctgcaagttaccattaagaaactgcggaagttggaggaacagagtaagagggtgagtcagaaagaagatgttgcagcactgaagaaacagatctatgacctgtcgatggaaaatcaaaaggtgaagaaagacctgctggaagcccagacaaacatcgccttcctgcagtctgagctggatgcccttaaatctgactatgccgaccagtccctgaatactgagagagacttagagatcatccgcgcatataccgaagaccgcaattcgctcgaacggcaaattgagatcctgcagacggcaaatcgaaaactgcacgattctaatgacgggcttcgcagtgctttggagaattcatattctaagttcaaccgatccttgcatataaataacatcagcccaggtaatacaattagcagatcctcacctaaattcataggacactcccctcagcctctgggttatgataggtcctcacgttcaagctatgttgatgaggattgcgattccctggcactgtgcgatccacttcagagaacaaactgtgaggtggattccctgcccgaatcatgctttgactcgggactaagtacgctgcgagaccctaatgagtacgattctgaagtggagtataagcaccagagaggatttcaaaggagccacggggtacaagaaagctttggcggagacgccagcgacacagatgtgccagacatacgagatgaggagacctttggcttggaagatgttgcctctgtgctggactggaagcctcaaggctccgtgtctgaagggagtatagtgagtagttctcgcaagccaatttccgccctttcccctcagaccgaccttgtggacgacaatgcgaagagcttcagctcccagaaagcgtataagatcgtcctcgccggtgacgccgctgtgggaaagagtagcttcctgatgcggctttgcaagaacgagttccgcgaaaacatttctgcgaccctaggagtggatttccaaatgaaaactttaatcgtcgacggagagcgcactgttctccaactttgggataccgcagggcaggagaggtttagaagtatcgccaagagttactttagaaaagccgatggtgtcctgttgctttacgacgtcacatgtgagaagagctttcttaacatccgggaatgggttgacatgatcgaagacgctgcccatgagactgtgccaattatgttagtgggcaacaaagctgatattagagacacagcggcaactgagggtcagaagtgcgtgcccggtcactttggagaaaagctggcaatgacctacggagccctcttctgcgaaacatctgcaaaagatggaagcaacatcgtggaagcagtgctacacctggctagggaggtgaaaaaacgaacagacaaggatgacagcaggagcatcacaaacctcacaggcactaacagcaagaagtcgccacagatgaaaaattgctgcaatggatag

SEQ ID NO: 29077 - DNA, 4125 bp, synthetic construct
  source 1..4125: mol_type = other DNA; note = Synthetic coding sequence
atggaagaaaatgaatctcagaaatgcgaaccttgtttaccttattcagccgaccgtcgtcaaatgcaggagcagggaaagggtaatctccacgtcacttctccagaggatgcagaatgccggagaacaaaagaacggctgagcaatgggaactctcgagggagtgtgtcgaaatcatccagaaatatccccaggaggcacactctgggcggacccagaagcagtaaggaaatactggggatgcagacgagcgagatggataggaagcgagaggcgttcttagagcacctcaaacagaaatacccacatcacgcctctgcgatcatgggtcaccaggagagattgcgcgatcagacccgatcccctaaattgagccattcaccgcaacctccgagcctgggagatcctgtggaacatctctcagaaacttctgccgacagtttggaagctatgtccgaaggcgacgcgccaacccccttcagtaggggctcacgaactcgggcttctttgccggttgttcgctccactaaccagacgaaagaaaggagcctcggagtgctttacctgcagtacggcgacgagacgaagcagctaaggatgcctaacgaaatcacaagtgccgacaccataagggccctgttcgtctctgcatttccacagcagctgaccatgaaaatgttggaatctccctcagtggcaatatacattaaggatgagagtagaaatgtgtactatgagctgaatgacgtgcgcaatattcaggaccggtccttactaaaggtatacaacaaagaccctgcccacgcctttaaccacaccccaaaaacaatgaacggcgacatgcgaatgcagcgggaactggtctacgcaaggggcgacgggcctggtgcccctcgaccgggaagtacagcccaccctccccacgcgattccaaattctcctcccagtacccccgtgcctcactcaatgccaccctccccgtccaggatcccttacggcggaactagatcaatggtcgtgcctggcaacgctacaattcctcgcgacaggatttccagccttcccgtgtctaggccgattagccctagcccgtctgcaatactggagcgcagggacgttaaaccagatgaagatatgtctggaaagaatatcgcgatgtacaggaatgaaggcttctacgccgacccctatctgtaccacgaaggccgaatgagcattgcatctagccatggcggtcatccacttgatgtccctgatcatatcatcgcttatcacaggaccgctatccgcagcgcttctgcttactgcaaccctagcatgcaggcagagatgcacatggaacagagtctgtatcgccagaaatccaggaagtacccagacagccacctgccaactcttggcagcaaaaccccgccagcgtcaccccatagagtgtccgacctccgcatgatagatatgcacgcccactacaatgcccatgggcctcctcacacaatgcagcccgaccgcgcttcaccctctcggcaagctttcaaaaaggagccaggcacactcgtctatattgaaaaacccagatctgctgccggactgtcctctttggtggatttgggccctcccctgatggaaaagcaggtcttcgcttatagcacagctacaatccccaaggacagggaaacgtcagagaagatgatgaagacgaccgcgaataggaatcacactgatagcgctggcacacctcacgtgagtggtggaaagatgttatccgcgctggagtccacggttcccccttcccagcccccacctgttggcacaagtgctatccatatgagcctactggaaatgaggcggagtgtggctgaattgcggctgcagttgcaacagatgcggcaattacagttgcagaatcaggagctactccgtgccatgatgaaaaaggccgagctggagatctccggaaaagtaatggagaccatgaagaggctggaagatcccgtgcagaggcagcgcgttttagtagagcaggaaagacagaagtatcttcatgaagaggagaaaatagtgaaaaaactctgtgagctggaggacttcgtggaggaccttaagaaggacagcaccgctgcttccagactggtcacactgaaggacgtagaggatggagcattcctgctacggcaagtgggagaggcggtggccaccctcaaaggcgagttcccaaccctgcagaataagatgcgggctatactgaggatagaggtcgaggcagtcaggttccttaaagaagagccgcacaaacttgacagcctcctgaaacgtgtccgctcgatgacggatgttctaactatgctaaggcgacatgtgaccgacggcctgctgaaaggcaccgatgctgcacaagccgctcagtacatggccatggaaaaggcaacagcagccgaagttttgaaatcacaagaagaggcggcacacacttctggacaaccgttccacagcaccggagctcctggggacgcaaagagcgaagtcgtccccttgtctgggatgatggtgagacatgcccagagcagtcccgtcgtcattcagccgtcacagcattctgtggccctccttaatccagcgcaaaacctgccacacgtggcgagttcacctgccgtccctcaagaggcaacctctaccttacaaatgtcacaggctccacaatcgccgcagattcccatgaacgggagtgccatgcagtcgttgttcatcgaagagattcatagtgtgtctgcaaagaatagagccgtcagtatagaaaaagccgaaaagaagtgggaggagaagagacagaacctcgaccattacaacggaaaggagttcgaaaagctccttgaagaagcccaggcaaatatcatgaagtctatccccaatttagagatgccccctgccaccggacctctgcctagaggtgatgctcctgtggacaaagttgaacttagtgacagtcctaactcagaacaagatctggagaagctgggtggtaagtcgccacctccaccccctccaccgcctcgcaggagctacctccccggatccggcctgactactaccagatctggtgacgtggtgtacaccggaaggaaggagaatatcaccgccaaggcctcctcagaagacgctgggcctagtcctcaaacacgagcaaccaagtaccctgctgaagaacctgcatccgcttggacaccctccccacctcctgtgactacttccagctctaaggatgaggaagaggaggaggaggaaggagacaagataatggccgagttacaggcatttcagaaatgctccttcatggacgttaattcaaactcccatgcggagccttcgcgagccgattcccacgttaaagacactcgcagcggagctacagttccaccgaaagagaagaaaaatctggaatttttccacgaggacgtcaggaaatccgacgtggaatacgagaatgggcctcagatggagttccagaagggttcatcaggcgctccacagacctctcgcatgccagtgcccatgtccgcaaagaataggccgggaaccctcgataagccaggaaaacagtcaaaattgcaagacccccgtcagtatcgccaggcaaacggctcggctaagaagtcgggcggtgacttcaagccaacatctccaagccttcccgcaagtaagataccagcgctttctcctagcagcggtaagagctcttccttgcctagctctagcggggacagctctaacctgcctaatcccccagctacaaaacctagtatcgcctctaaccctctgtcacctcagaccggtccccctgctcattccgcttccctgatcccgtcagtaagcaacggctcactcaagtttcagtcactgacgcacaccggaaagggtcatcacttgtccttctcgccacagtctcagaacggtagggcaccccctccattgtctttcagctcttcacctccttcacctgctagttcagttagtcttaaccagggggctaagggtactcgcacaatccacactcccagtctcactagttacaaggcacagaatggcagcagcagtaaggccactccttcaaccgccaaagaaacctcctag

SEQ ID NO: 29078 - DNA, 5831 bp, synthetic construct
  source 1..5831: mol_type = other DNA; note = Synthetic coding sequence
atggaggaaaacgagtcacaaaagtgtgagccatgtctcccctactccgcagaccgcaggcagatgcaggagcagggaaaagggaacttacacgtcacgagccccgaggatgcggagtgtcgccgtaccaaggagcgattgtcgaacggcaattcacgaggctctgtgagcaagtccagtcggaacattccgaggcggcatacccttggcggtcccaggagttccaaagagattcttggcatgcagacttcagagatggatcggaagagggaggctttcctcgaacatctaaaacagaagtaccctcatcatgcgtctgctataatgggccatcaggagcgcctgagagaccagactaggtctcctaaactgtctcactcgccgcagccaccctccctgggcgatcccgtggagcatctatcggaaaccagcgctgactctttagaggcgatgtcagaaggcgatgctcctacaccctttagccggggaagtagaacccgggcttccctgccagtggtgcggtcaacaaatcagacgaaagaacggtctttgggtgtattgtatttgcagtatggagacgaaacaaagcagcttcgaatgcccaacgaaattacatctgccgacaccattagagccctgtttgtgtccgcctttccccagcagttgacaatgaaaatgctggagagccccagcgttgctatttatatcaaagatgagagtcgcaatgtctactacgaattaaacgacgtgaggaacattcaagatcggtcactgcttaaggtgtataacaaagaccccgcacatgcctttaaccacactcccaagacgatgaacggggacatgcggatgcagcgtgaacttgtgtacgcccgaggtgacggacccggtgccccaaggcctggttcgaccgcgcacccaccacacgcaatccctaattccccgccatccacacccgtgccacactccatgccacctagtcccagtcgcattccttatggtggaacccgcagcatggtggttccgggaaacgctacaatccctcgagatcgcatctcatctctacctgtaagcagaccaattagtccgagtccgagcgccatcctcgagcggagggacgtgaagccagacgaagatatgagcggcaagaatattgccatgtatagaaatgaagggttctatgccgatccttacctttatcacgaagggagaatgtcgatcgcctcctcccatggcggacatcctctggacgtccccgatcacattatcgcttatcataggacggccattaggtccgcctcggcatattgcaatccatctatgcaggctgagatgcatatggaacagtccctctacagacaaaaatcccgcaagtatccagattcccacctgcccactctgggatcaaagactccgcctgccagcccccaccgagtctctgacttaagaatgatagacatgcatgctcattacaacgcacatggcccaccgcataccatgcaacctgatagagcatcgcccagccgacaagcatttaagaaagaaccaggtacccttgtctatattgagaagccacgctccgcagcaggactgtccagtctcgtggatctcggtcctcctttgatggagaaacaggtgtttgcatactcaacggcaaccatccccaaagatcgcgaaaccagagagagaatgcaggccatggagaaacagattgcttctctgactgggcttgtccagagtgccctatttaagggccctatcacaagctactcaaaagatgcctctagtgaaaaaatgatgaagaccacagccaatcggaaccacacagatagcgccggaacaccccacgtttctggaggcaagatgctgtcagccctggagtctacagtccctccatcccagccacccccagtgggaacttcagcaatccatatgtcccttctcgagatgcgacgatctgtagctgagctgcgcctgcagttgcagcagatgcgccagctgcagttgcagaatcaggaacttctgagagctatgatgaagaaggcagaattagagatttcagggaaagttatggagaccatgaaacgccttgaggacccagtacaacgacagagagtgcttgtggagcaggaacgacagaagtatttgcacgaagaagagaagatagtgaagaaactctgtgagctagaggattttgttgaggatcttaaaaaggactcaactgcagcatcacgactcgttacattgaaagatgtagaagacggggctttcctgctgaggcaggttggcgaagccgtggctacgctcaaaggagagtttccaactctccagaataagatgcgggctatcttacgcatagaggtcgaagctgttcgcttcttaaaagaagaaccacataagctcgattccctactgaagcgtgtccgcagcatgaccgatgtgctcactatgttaaggagacatgtgactgatggtttactgaagggaaccgacgccgctcaggcagcccagtacatggctatggagaaagccacagcagcagaagttctgaagagccaggaggaggcagcacacacctctggccagccgtttcactccaccggagcgcctggcgatgcaaaatcagaggtagtgcctctttccgggatgatggtgagacatgctcagagcagcccggtggtaatacagccttcccagcactccgtagccctgcttaaccctgctcaaaatctcccacatgtcgcttcatcccccgctgttccacaggaggctacttcgacgctccagatgagtcaagcgcctcaaagccctcagatccccatgaacggctccgctatgcagtccctctttattgaggaaatccattcagtttccgcaaagaaccgagccgtctctatcgaaaaagccgagaaaaaatgggaagagaagagacagaacctggaccattacaatgggaaggaattcgagaaactgctggaagaggctcaggccaacattatgaagtcaattcccaacctggagatgccccctgcgaccggccctttgcctcgaggtgacgcaccagttgataaggtagagctgtctgaggattcccccaattctgagcaagacctagaaaagctgggcggaaaaagtccaccaccacctccacctccaccacggagatcctatctgcccggttcgggacttactaccacgcgctctggtgacgtggtgtacacaggcagaaaagagaatattaccgccaaagctagcagtgaggatgcgggaccgagccctcaaacacgagctacaaagtaccctgccgaggaacctgcctctgcctggactccttcacctcccccagtgactacatctagcagcaaggatgaagaggaggaagaagaagagggtgacaaaattatggccgagctccaggcctttcagaagtgttcttttatggacgtgaacagtaattcccatgctgagccttcacgtgctgatagccacgtgaaagatacacgctcaggggcaactgtgccaccgaaagagaagaaaaacttagagttttttcatgaagacgtgcgcaagagcgacgtggagtatgagaatggtccgcagatggaattccaaaaggtcacgacaggcgctgtccgtcctagtgatccgcctaagtgggaaagaggtatggagaattcaatttcagacgcctcccgcactagcgagtataagaccgaaataatcatgaaggaaaatagcatcagtaatatgtctctgttaagggactccagaaattactcacaggaaaccgtacccaaggcaagctttggattctcgggcattagccctctcgaggacgagattaataagggttcaaaaatctccggactacagtatagtatacccgatacagaaaaccagaccctcaattatggcaaaaccaaagagatggaaaaacagaatacagataaatgtcacgttagtagccatacacgcctcaccgaatcttcagtgcatgacttcaagacggaggaccaggaagtcattactacggattttggtcaagtggtcctcaggcctaaggaggcccgtcacgcgaatgtgaatcctaacgaagacggagagagctcaagctccagccccacagaagagaatgccgcaaccgataatatcgcctttatgatcaccgagacaactgtgcaggtcttatcctctggagaggtgcatgacatcgtttcccagaagggcgaggacattcagactgtgaatattgatgctcgaaaagagatgactcccaggcaagagggaaccgataacgaagaccctgtcgtgtgtctagataagaaaccggtgatcattatattcgacgagccgatggatattcgcagcgcatacaagagactgtctactatttttgaggagtgcgacgaggaactcgagcgcatgatgatggaggaaaagatcgaagaggaggaagaagaggaaaatggggacagtgtggttcagaacaacaacacatctcagatgtctcacaaaaaagtcgctcccggtaatttaaggaccggccagcaggttgagactaagagccagccacactccctggcgaccgaaaccagaaatcctggtgggcaggagatgaatcggacggagctgaataaattctcccatgttgattctccaaactcagagtgcaagggggaggacgctaccgacgatcaatttgaatcaccaaagaaaaagtttaagttcaagttccctaagaaacaactcgccgcattgacccaggccatacgcacagggaccaaaacagggaagaagaccctccaggtcgtagtctacgaagaagaggaagaggacggaacattaaagcagcacaaggaagcaaagagatttgagatcgcacgttcccagcccgaggacacccccgaaaacaccgtgcggaggcaggaacaaccttccatcgaatctactagtcctatctctaggacagatgagattaggaaaaatacctatcgcactctggatagcctggaacaaacgatcaaacagttggagaataccatctccgagatgagtcctaaggcgctagtggatacaagctgctcatcaaacagagattctgtggcttcatcttcccacattgcccaagaggccagtcctaggccattgcttgtgccggatgagggccctacggctctggaacctccaacttctatccccagcgccagccgcaagggctcctcaggcgctccacagacatcccgaatgcccgtccccatgagtgcgaagaaccggccaggtaccctcgacaagcctggtaagcaatcaaaactgcaggacccacggcagtacaggcaagccaatggctcggcgaaaaagagcgggggagacttcaagcccacctccccctccttgccagctagcaagatcccagccctgagcccaagctctggaaagtcctctagtcttcctagtagctccggcgatagtagcaacttgccaaatcccccagcaaccaagccgagtattgcttccaatcctctcagcccccagaccggaccacctgctcacagtgcctcccttatacctagcgtcagtaatggctcgctgaaatttcaaagcctcacgcatactggtaaaggccatcaccttagtttctctcctcagtcccagaatggacgcgcacctccaccactgtctttcagttcaagcccaccctcccccgctagcagcgtatcactcaaccagggggctaaggggactaggacgatccatactcctagcctgactagctacaaagctcagaacgggagctcttccaaagctaccccttccactgctaaggaaacatccta

SEQ ID NO: 29079 - DNA, 3795 bp, synthetic construct
  source 1..3795: mol_type = other DNA; note = Synthetic coding sequence
atgcagacgtcagagatggacaggaagcgcgaggcattcctggagcatctgaagcagaagtacccgcaccatgcatctgccattatgggccatcaggagcggctccgcgaccagacccggtctcccaagctgagtcacagtcctcagcccccaagtcttggtgaccctgtagagcacctgagcgagactagcgccgattctttggaggccatgagtgaaggcgacgctcctaccccattttctaggggtagtagaacccgggcttccctgccagttgttaggagtactaatcagacgaaagaacggtcactgggagtcctataccttcagtacggtgacgagactaaacaactcaggatgcctaacgagatcaccagtgccgatacaatccgtgcacttttcgtgtcagctttcccccagcagctcaccatgaagatgctggagagccctagcgttgcaatatacatcaaggacgagtccaggaacgtgtattatgaattaaacgatgtgcggaatattcaggacagaagtcttctgaaggtgtataataaggatccagcccatgcattcaatcatacccccaagacaatgaatggagacatgagaatgcaacgggaactggtttatgctcggggtgatgggccaggggcaccacgccctggctctactgctcacccacctcacgcgatacccaacagtccaccatccacacccgtcccccattctatgccgccttcaccctcacgaatcccatacgggggaacaaggtcaatggtggtgcccggaaacgcaactataccgagagaccgcatttccagcttgccagtcagcagacccatatcgccatccccatccgctattctggaaaggcgtgacgttaagccagatgaagatatgtcagggaagaacattgcaatgtatcggaatgaaggtttttacgccgatccctacttgtaccacgaaggtcgcatgtccattgccagttctcacggtggacacccgctggacgtgccagaccacattattgcctaccaccggactgccatccgttcagcctcagcctactgtaaccccagcatgcaggccgaaatgcatatggaacaaagcctctaccggcagaaaagtagaaaataccccgacagtcatcttccaactctggggtcaaagactccaccagcttctccacacagagtttctgacctgcgcatgatagacatgcacgcccactacaatgcacatggtccaccacatacaatgcagccagatcgggcttctcctagtagacaggcatttaagaaggagcccggtaccctggtgtacatagagaagccaaggtcagctgctggcttgagcagccttgtggatctgggaccaccactaatggaaaagcaagtcttcgcatactcaacggccaccataccgaaggatcgggagacccgggaaaggatgcaggctatggagaaacagatagcgtcgctcacgggactggtccagtcagctctctttaaagggccaatcacatcatatagtaaggacgcatcttctgaaaaaatgatgaagaccaccgctaatcgaaaccacaccgattccgccggaacgccgcatgtgtctggaggtaagatgttgagcgccctggagagtaccgttccaccttcacagccacctcccgtgggtacatccgccattcatatgagcctattggagatgaggcggtcagttgctgaactacgtttacagcttcagcagatgagacagttgcagctgcagaaccaggagctgctgagagcaatgatgaagaaggcagagttagaaatcagtggcaaggtaatggagactatgaagcggctcgaggaccccgtgcagcgccagcgggtgctggtggagcaggagcggcagaagtaccttcatgaagaagagaaaattgttaagaaactctgcgaactagaggactttgtcgaggacctgaagaaggatagtacagcggcaagtagactcgtgaccctgaaggacgttgaggatggagccttcctcctccggcaggtaggagaggccgtggcgacactgaaaggggaatttcctaccctgcagaacaagatgcgcgcaattctgcggattgaagtagaggctgtgagattcctaaaggaggagccacataaacttgacagccttctgaagagagttcgaagcatgaccgatgtcctcactatgttgcgcagacacgttaccgacggcctgctgaaaggaaccgacgccgctcaggctgcccagtacatggcgatggaaaaagccacagccgctgaagtgctgaagtctcaggaggaagcagcacacaccagcggtcaaccttttcattctaccggtgcccctggggacgcaaaaagtgaagtggtccccttgagtgggatgatggttcggcacgctcaatcaagcccagtggtcattcaacctagccagcatagtgtggctttgttgaaccctgctcagaatcttccccacgtggcctctagccctgccgtacctcaagaggccacttcaacgctgcaaatgtcccaggcgccacaatcaccccaaattccgatgaacgggagcgcaatgcaatccctgttcatcgaggaaattcacagtgtctcagccaaaaatcgagctgtgtccatcgaaaaggccgaaaagaagtgggaggaaaaacggcagaatctggatcactacaacgggaaggaatttgagaagttgttggaggaggcccaggctaacataatgaagtctataccaaacttagagatgccacccgctaccggtccactacccagaggcgatgcacctgtggacaaggtggaacttagcgaggacagccccaactctgaacaggatctggaaaaactgggcggaaagagcccacccccaccgccacctccacctagaagatcttatctcccaggctcaggactgactaccacccgtagtggtgatgtggtgtacacgggcagaaaggagaatattactgcgaaggccagctctgaggacgctggcccatcgccccagacccgtgccacaaagtatcccgcagaggagcctgccagtgcctggaccccgtccccacccccagtgacaacaagcagctctaaggatgaggaggaagaagaggaagagggggacaagatcatggccgagttgcagggcagcagcggcgcaccacagaccagtcgtatgcctgttccaatgtccgctaagaatcggcctgggaccctggataaacccggaaagcagtccaagcttcaggaccccaggcagtataggcaagccaacgggagcgccaagaaatcagggggagactttaaaccaaccagcccaagcctgccagcctcaaagattcccgctctatcaccatcatccggcaagtcctcttccctcccatcaagctcaggagattcttcgaacttgccaaacccgcctgccacaaaacctagtatcgcgtcaaatccgcttagtccccagaccggtcctccagctcattcagctagcctaatcccctctgtcagcaacggcagcctgaagtttcagtcactgactcacactggaaaggggcatcatctttctttcagtccgcagagccaaaacggtcgggctccccctcccctgtcctttagctcttcaccgcctagtcctgccagcagtgtgagtttgaaccagggggctaagggcactaggacgatccacactccgtccctgacaagctacaaagcccagaatggtagctcttcgaaggcgacccctagtacagctaaggagaccagctag

SEQ ID NO: 29080 - DNA, 531 bp, synthetic construct
  source 1..531: mol_type = other DNA; note = Synthetic coding sequence
atgggctgttgcgggtgtagcgggggatgcggctccggttgcggcggatgcggtagcggctctggcggatgcggttctggctgcgggggttgcgggagctcctgctgtgtgccaatatgttgctgcaagcctgtatgttgttgcgtccccgcatgttcctgctcctcgtgtggatcatgcggaggctcaaaggggggttgcggctcttgcgggtcttcaaaagggggatgcggttcatgcggatgctcacaaagtaactgttgcaagccatgctgctccagcagcggttgcggtagcttttgctgtcagagctcttgctcaaagccttgctgttgtcagtccagctgctgccaaagctcctgctgtaagccctgctgctgccagtcttcctgctgccagagctcctgcttcaagccatgctgctgccagtcaagctgctgtgtgcctgtgtgttgccaaagctcttgctgcaaaccatgttgtagtcaatcatcctgttgcgtgcctatttgttgccaatacaagatttag

SEQ ID NO: 29081 - DNA, 513 bp, synthetic construct
  source 1..513: mol_type = other DNA; note = Synthetic coding sequence
atgggatgctgcggttgctctggcggatgcgggagtggttgcggaggatgcgggagcggctgtggcggatgtgggtccggatgcggcggttatggatctggctgtgggggttgcgggtccagctgttgtgttccggtttgttgctgcaagccagtgtgttgctgcgtgccagcctgttcttgtagctcttgcgggagctgcggcggaagtaaaggcgactgtggctgtggatcttgtggaggcagtaaggggggatgtggctcatgcggatgtagtcagtgtaactgttgcaagccatgttgctgtagttccggatgcggctcctgttgccagagcagttgttgtaacccttgctgttgccagtctagctgctgcgtgccggtgtgctgtcaatccagttgctgcaagccctgctgttgccagtcttcttgttgcgtgccgagttcctgctgtcggagctgctgtagcaaaagtagttgttgcgtccctatatgttgccagtataaaatctag

SEQ ID NO: 29082 - DNA, 2169 bp, synthetic construct
  source 1..2169: mol_type = other DNA; note = Synthetic coding sequence
atgatcgattctgttaagctgcggagggactccgccgctgattttttctcacactatgaatacttgtgcgcattgcagaattccgtgccgcttcccgcagtcagggcatgtctccgagaaggcgtcctcgacttcaacgccgatcgcctcaggggcgtcgattgggcacccctcctgagtactcttaagatcaataaggacctaccactggttagtatcaaatcttttttccagccctggctgggcgacaccggcagcgatatgaacaagttctgcaggtccagagtgcccgctatcagatataaggatgtcactttccagttgtgcaaggccctgaagggatgtttatccattagcagcgtcctgaaaaatctggaactgaacgggctcattctaagagagagagatctcaccatcttggcgaagggactaaataaatccgccagcctcgttcatctgtccctggcgaactgtcccataggggacggaggactcgaaatcatttgtcagggcattaaaagcagtatcacattgaagacagtgaacttcacaggttgtaatctgacatggcagggtgcagaccatatggctaagatcttgaagtatcaaacgatgcggaggcatgaagagacctgggcggagtcacttagataccgcaggccagatcttgattgtatggccggtttgagaaggatcaccttaaattgtaatactctgatcggagatttgggggcatgcgcattcgcagacagcctgtccgaagatctttggctgcgggcattggatttgcagcagtgtgggctcacaaatgagggagcaaaggcgctcctggaggccctcgagacaaatacaacgcttgtcgtgttggacattcggaagaacccgctaattgatcactctatgatgaaagcagtcatcaaaaaagtgctgcagaatgggcgatccgcaaagtccgagtatcaatggattaccagtccgagcgtgaaagagccctcgaagactgcaaagcaaaagcgcagaaccattatcctcggaagtgggcataaaggaaaggccactatcaggatcgtcggtctggccacaaaaaagcccgtgtcctccggccgtaagcactctctcgggaaggagtactacgccccagcccctctgccgcctggggtatcaggatttctcccatggaggaccgctgaacgggctaagagacaccggggatttccactcataaaaacacgcgatatttgtaatcagctacagcagcctgggtttcccgtgaccgtgaccgtggaatcaccaagttcaagcgaggtcgaggaagtggacgattcctcagagagcgtacacgaagttcccgaaaagacaagcatcgaacaggaagccttacaggaaaaactggaagaatgtctgaagcagcttaaagaagagcgggtgatcaggctgaaggtggataagagagtatccgagctcgaacacgagaatgctcagttacggaatattaacttcagcctgtccgaagcactccatgcgcagagccttactaacatgattctcgatgacgagggcgtgttgggaagcatcgagaattcatttcagaagttccacgctttccttgacctgttgaaggacgcagggctggggcaactggccacgatggcgggaattgaccaaagcgacttccaactcctagggcatccccaaatgacctcaacagttagtaacccgcctaaagaggaaaaaaaggctctcgaggacgagaagccagagcccaagcagaatgccctagggcagatgcaaaatatccaggtgagtatatgtatgcagtccgcttataacgagggtactctgatgaaattccagaagatcacgggagatgctcgcatcccactgccactcgactcattcccagtccctgtgtctactcccgagggattaggcacctcaagtaacaatctgggcgttccagccaccgagcagaggcaagaatcttttgaagggttcattgcacggatgtgcagcccctctccggacgctacaagcggcactggcagccaaaggaaagaagaagagctctcacgcaatagccgtagttctagcgaaaagaagaccaaaactggcgagtacactaagaaacacagcgataagcagcacccgggaaaggatctccactcctag

SEQ ID NO: 29083 - DNA, 1122 bp, synthetic construct
  source 1..1122: mol_type = other DNA; note = Synthetic coding sequence
atggcattgaatgtcgctccagtgcgcgacacgaaatggctcacactcgaggtatgtaggcagttccaacgcggtacctgttctcgttccgacgaggagtgcaagtttgcacaccctccgaaatcgtgccaggtagagaatggcagagtgatagcatgcttcgactctctcaagggcagatgtagtcgcgaaaactgtaagtacctgcatccaccaacacaccttaaaactcagttggagatcaatgggagaaataatttaattcagcaaaagaccgctgccgcaatgctggcacagcaaatgcagtttatgttcccaggcacaccccttcaccctgtccctacttttcccgttgggcctgccattggcaccaatacagccatcagttttgccccatatctggctccagtgacgccaggtgtgggcctagttccaacagagatcctgcctactaccccagtgattgtgccaggttctcccccagtgaccgtgcctggttcgaccgcaactcagaagctgcttcggaccgataaactcgaagtgtgcagggagttccagaggggcaactgcgcccgaggggagaccgattgtcgattcgctcatccagcggatagcaccatgatcgatactagtgacaataccgtgaccgtctgcatggactatatcaagggaaggtgcatgagggaaaaatgtaaatactttcatcccccagcccatcttcaggctaagatcaaagcggctcaacaccaggctaatcaggcagcagtggccgctcaggctgcggcagctgcagcaactgtgatggctttcccaccaggggctcttcatcccttgcctaaaaggcaggctcttgaaaagtctaatggtactagcgcggttttcaatccctcggttctgcattaccagcaggccctgacttccgctcagctgcaacagcatgccgctttcatccctactggctcagtgctatgtatgacgccagctacttccatcgacaattcggagatcatcagccgtaatggcatggagtgccaggagagcgcacttagaattaccaagcactgttactgcacctattaccccgtgagcagctccatagagctccctcagactgcctgttag

SEQ ID NO: 29084 - DNA, 321 bp, synthetic construct
  source 1..321: mol_type = other DNA; note = Synthetic coding sequence
atgacacaatccaccgcaaaagctatgaagagacccctcgaagctactgtggacctcgcctttccccctggggctctccaccctctgcctaaacgccaggctcttgagaaatccaacggaacttcagccgttttcaatccttcggtgctccattatcagcaggcacttacctcagcgcagctccagcagcacgctgcctttatccctaccgtaccgatgatgcattctgccacaagcgccaccgtgagcgcagccacaacacctgcgacctccgtcccctttgccgctaccgcaacggcgaatcagctggtctactcttag

SEQ ID NO: 29085 - DNA, 915 bp, synthetic construct
  source 1..915: mol_type = other DNA; note = Synthetic coding sequence
atggccaagatcgagaaaaatgctcccacaatggagaagaaaccagaactgtttaatataatggaggtagacggcgtccctactctgatcctgtctaaggaatggtgggagaaggtgtgtaacttccaggcgaaaccggacgacctgattcttgcaacttacccgaagagcggaactacttggatgcacgagatcctcgatatgattttgaatgatggagacgtggagaagtgcaaaagggctcaaacacttgatcgacacgcttttttggagctcaagttccctcataaagagaagcctgatctggagtttgtgctggagatgagcagcccacagctgattaaaacccaccttcctagtcatttgatcccgccaagtatctggaaggagaattgtaaaatcgtatacgtcgcccgaaaccccaaggattgcctggttagttactatcactttcaccgaatggcgagcttcatgccagatcctcagaatctggaagagttctacgaaaagttcatgtccggaaaagtggtggggggtagctggttcgaccatgtgaagggttggtgggccgctaaggacatgcaccgtatcctctaccttttttacgaagacatcaaaaaaaacccgaagcacgagatccacaaggtccttgagtttctggaaaagacctggtcaggcgacgtcatcaataagattgtgcatcacacatctttcgacgtgatgaaggataacccgatggccaaccatactgcggtgcccgctcacattttcaatcacagcatctccaagtttatgcgaaagggaatgcccggagattggaagaaccactttaccgtggccctgaatgaaaattttgataaacattatgagaagaaaatggcaggttctacactgaacttctgcttggaaatatag

SEQ ID NO: 29086 - DNA, 1188 bp, synthetic construct
  source 1..1188: mol_type = other DNA; note = Synthetic coding sequence
atggcctccgcggctagcgttacgagcctggccgacgaggtcaattgcccaatctgccaggggaccttacgggagccagttacaatagactgcgggcacaatttttgccgcgcatgtcttaccaggtactgcgagattcccggaccagacctggaggagtctcctacctgccccttgtgtaaggaaccattccgacccggttccttcaggccgaactggcagctggccaatgtggtggagaacatcgaacgactgcagttggtctccactctcggtctgggcgaagaggatgtgtgtcaagagcatggggaaaaaatatacttcttttgcgaggatgatgagatgcaactttgtgtagtgtgccgggaggccggagaacacgccactcacaccatgagattcctagaagacgctgccgctccataccgggagcaaatccacaaatgtctgaagtgtttgagaaaggaacgtgaagagatacaggaaattcagtcaagggagaacaaaagaatgcaagtgctgctgacgcaggtctccactaagagacagcaggtgatctccgaattcgcgcatcttcgcaagttccttgaggaacagcagagtatcctgctcgctcagctggagagtcaggacggagatattttgagacaacgtgatgagttcgacctccttgttgctggcgagatctgtcggttctctgctcttatagaggagctggaagaaaagaatgaaagaccggcacgggaactgctaaccgacattagatccacattaataaggtgcgaaacccgcaagtgcaggaagccggtggccgtgtcaccggagctgggtcagagaattagagactttccacagcaggctctcccattacagcgggagatgaagatgtttctagaaaaactgtgttttgagcttgattacgaaccagctcacatcagtctggatccacagaccagccaccccaaactgttgctgagtgaggatcatcagagagctcagttttcttataaatggcagaacagccccgacaatccccagaggtttgaccgggctacctgcgtcctggcgcacacagggataaccggtggaagacacacatgggtgtggatggctagggtgcccggagacagcggctgctgccagttctgtagcccccctagcgtgctcggaacggaggtagcggcttag

SEQ ID NO: 29087 - DNA, 1446 bp, synthetic construct
  source 1..1446: mol_type = other DNA; note = Synthetic coding sequence
atggcctcagccgcttctgttacctcattggccgatgaggtaaactgccccatctgtcagggcacattgcgcgagccggtgactatagattgtggtcataacttttgccgggcatgtcttacaaggtactgcgagattcccggaccagatttggaagagtctcctacctgtcccctctgtaaggagccatttaggccaggatcttttcggcctaactggcagctggccaatgtggttgaaaatattgagaggttgcagttagtgtctactctcggcctaggtgaagaagatgtgtgtcaggagcacggagagaaaatctattttttctgtgaagacgacgaaatgcagctctgtgttgtgtgcagagaagcgggagaacatgctacccatacaatgcggttcctggaagatgccgcagctccatatagagaacaaatccacaagtgtttgaagtgcctccgtaaggaaagagaagagatccaagagattcagagccgggaaaacaagaggatgcaagtgctgctgacccaggtgagcacaaaaagacagcaggtcatcagcgagttcgcacacttaaggaagttcctagaagaacagcagtcaatcctgctcgctcagctggagagccaagatggcgacatcctcagacaacgcgatgaattcgacctgttagtcgctggagaaatctgcagattcagtgctctcatcgaagagctcgaagagaaaaatgagagaccagctcgcgaactgctcaccgacatacggtccactctaatcaggtgtgagaccaggaaatgtcgcaaaccagtggcggtgtcccccgagcttgggcagaggatccgtgattttcctcagcaagccctgcctctacaaagggaaatgaagatgttcttggagaaccttcccaaccatctcgttattcccactgcccatatctcactcgacccccaaacaagccaccctaagttactgctgtccgaggatcaccagagggcccagttttcatataagtggcagaacagtcctgataatccacagcgttttgatcgagcgacctgtgtgctggcccacactgggatcacagggggaaggcatacttgggtagtctcgattgatctcgcgcacggcggaagttgtacagtcggggttgtgtcggaagacgttcaacgtaagggtgagttacgtctcagacccgaggaaggcgtttgggctgtgcgtcttgcctgggggtttgtttcagctttaggctcctttcccactcgcctgaccctaaaggagcaaccacgtcaggttcgggtgtccctggactacgaagtcgggtgggtcacctttacgaatgcagtcactcgcgagcccatctacactttcactgcctcctttactcgtaaggtgatccccttttttggtctttggggaaggggttcatccttcagcttgtcgtcctag

SEQ ID NO: 29088 - DNA, 2604 bp, synthetic construct
  source 1..2604: mol_type = other DNA; note = Synthetic coding sequence
atgcaggccgaagccgcagactggttctcatctatgcctttccagaaacatgtgtactacccgctcgcaagcggaccagaaggccctgacgtggctgttgcagctgccgctgccggagcagcttcaatggcttgcgcacccccaagtgccgcatccggaccactgcctttttttcagttccggcctcggttggagagcgtcgattggcgcaggctgtctgctatagacgtcgataaggtcgctggggcagtagatgtccttactcttcaggagaacattatgaatatcacgttttgtaaactggaagacgagaagtgcccacattgccagagcggcgtcgaccccgtgctgctcaagctgatccgtcttgcacaatttacaatcgaatatcttctgcatagccaggagttcctgacaagtcagttgcacacactggaggaacggctgagactgagccattgtgatggcgaacagtccaagaaactgctcaccaagcaggccggtgaaattaagaccctgaaagaagaatgtaaaaggagaaaaaaaatgatcagcacccagcagctaatgattgaagctaaggcaaattattaccagtgccatttctgtgacaaagcttttatgaaccaggcatttcttcagtcacatatccagcgcaggcataccgaggaaaactcccatttcgagtaccaaaaaaacgcccaaatcgaaaaattgagatcagaaatcgtcgtattgaaggaagaactgcagctgacccgttctgagctggaagcggctcaccacgcctctgcagtacgattttcaaaagaatatgaaatgcagaagaccaaagaggaagacttcctcaaactattcgaccgctggaaggaggaggaaaaggagaaacttgttgatgagatggagaaggtaaaagagatgttcatgaaggagttcaaagagctgactagcaagaacagcgctcttgaatatcaactcagtgagattcagaaatcaaatatgcagatcaaaagtaatattggcacacttaaagatgctcacgagttcaaagaggatagaagtccatatccacaagattttcacaatgtcatgcagctgctggacagccaagagtccaagtggaccgctagagtccaggctatccatcaagaacataagaaggaaaagggtcggcttctcagtcatatagagaagcttcggacatcaatgattgacgacctgaatgcctcaaatgtcttttacaagaagcgcatagaggaactaggacagcgcttgcaagagcagaatgagctgataatcactcagaggcagcaaataaaagactttacctgtaatccattaaacagcatcagcgagcccaaggggaatccactcgcctggcaggccttcgaatcgcagcccgcagcgcctgcagtgcctatgaatgccccagctctccacactttggaaacaaagagttccctccctatggttcacgaacaggcgttctcttctcatattctggaaccgattgaggagcttagcgaggaggagaaagggagggagaatgagcaaaagctgaataacaataagatgcatctgcgaaaggcactcaagagcaattcatctctaacaaaagggctgcggaccatggtggagcaaaatctgatggaaaaacttgagacccttggtattaacgctgacatccgtggaatcagcagcgatcaacttcacagagtgctaaagtcagtggagtctgaacgtcacaagcaggaacgggaaatcccaaactttcaccaaattcgggagtttctggaacatcaggtatcatgcaaaatagaggaaaaagcactcttgtcctctgatcaatgctctgtgagccaaatggacacactgagcaccggagaggtccctaaaatgattcagctaccctctaagaaccgtcaactcatcaggcaaaaggctgtctctaccgaccgtacctctgtccccaagattaaaaagaacgtgatggaagatccgtttccgaggaaaagtagtactatcaccactccccctttctcatccgaggaagagcaggaggacgacgatctaatccgcgcatatgcctcacctggccctcttcctgtcccaccaccacaaaataaaggcagcttcgggaaaaacactgtcaagtccgatgcagacggtaccgaggggtctgagatcgaggacacagatgactctcccaagcccgcaggcgtggccgtcaagacaccaaccgagaaggtcgaaaagatgttcccacatcggaagaatgtgaataagccagtcggcggtaccaatgtgcccgagatgtttatcaagaaagaggaacttcaagaattgaaatgcgccgacgtagaggacgaagactgggatatttcaagcctggaggaggagatctctctcggtaaaaagtccggtaaagaacagaaagagccaccccctgctaaaaatgagccccatttcgctcatgtccttaatgcatggggagcgttcaatccgaagggaccaaagggggaaggactccaggagaacgagagcagcacccttaagagttcactcgtgacggtgactgactggtctgatacgtccgacgtgtag

SEQ ID NO: 29089 - DNA, 279 bp, synthetic construct
  source 1..279: mol_type = other DNA; note = Synthetic coding sequence
atggcaacccccccaaaacgcagagcagtcgaggccactggagagaaagtgcttcgttacgagacttttatctctgatgtgcttcagcgggatttgagaaaggtcctcgaccatagggacaaggtgtacgagcagcttgctaagtatctccagctgcggaacgtcatcgagcggctgcaagttaaaacaatggggctcgggaccatcttcctagtgtgcgtgggcaaagggggaaaatgggaggaacgattgcagactcaaccatgtcacctgacatag

SEQ ID NO: 29090 - DNA, 2532 bp, synthetic construct
  source 1..2532: mol_type = other DNA; note = Synthetic coding sequence
atggcggtggaggattctactctgcaggtggtcgtgcgcgtcagaccaccgacgccccgagagctggactcacagagacgccctgtggtccaagtggttgatgagcgcgtgctggtctttaaccctgaggaacccgacgggggtttccccggattgaagtggggtggcacccatgacgggccaaaaaagaagggcaaggatctcacgtttgttttcgaccgggtgttcggagaggctgcaactcaacaggatgtgtttcagcacacaacgcactcagtgctggattcattcctgcagggctataattgctccgtgtttgcttacggagccactggggctgggaagacacacacgatgctggggagagagggggaccccggtatcatgtatctaacaaccgtggagctctaccgacgcctagaggcaagacagcaggaaaagcacttcgaagtgctgatttcgtatcaggaggtctacaatgaacagattcacgatctgctggaacccaagggccctcttgctatcagagaagatcccgataaaggagtggttgtgcaggggctgtcattccaccaacccgcttctgctgagcagttgctagagattttgacacggggtaacaggaacaggacccaacatcccaccgatgctaacgcaacctctagcaggtcacatgctatttttcagatatttgtgaaacagcaggacagagtgcccggacttacgcaggcggtccaggtggctaagatgtccttgatagatctcgccggtagcgaacgtgcttcatccacccatgcaaagggcgagcgtctgagagagggcgcaaatattaaccgtagtctgttagcgctgataaatgtgttgaatgctcttgctgacgcaaagggcaggaagacccatgtgccctacagggactcgaaactcaccagactgctgaaggattcactgggaggcaattgcagaaccgtcatgatcgccgcaattagcccatcatctcttacttatgaggacacctacaatacattaaagtatgcagacagggctaaggagataaggctctctctaaaatctaacgtcacttctctagactgccatatatcccagtacgcaacaatctgtcagcagctgcaggcagaggtagccgcactacgaaagaagttgcaggtgtacgagggcggagggcagccccctcctcaggaccttcctggatctcctaagtcaggcccacctcctgagcatctgcccagctcacctttacctcctcatccaccgagccagccatgtacccctgagctgccagcaggcccacgcgctttgcaggaggagtcacttggcatggaagctcaggttgagagggccatggaaggcaatagctcggatcaggagcagagtccagaggatgaggatgaaggacctgctgaagaagtgcccacccagatgccagaacagaacccaacccacgcccttcctgagtccccacgacttaccctacagccaaagcctgtggtgggccatttctctgccagggagttagacggagaccgttcaaagcagctcgccctaaaagtgctgtgtgtggcccaacgccagtactctttactgcaggccgcaaatcttttgacacctgatatgataacagaatttgaaactctgcagcagctggttcaggaggaaaaaatagagcccggagcggaagcccttaggacttcagggttagcaaggggcgctcctctggctcaggagctgtgcagtgagtccatccctgtgccttctccgttatgcccagagcccccagggtatacgggcccagtgactcggacaatggccaggcgactgagtgggccactgcataccctagggatacctcccggaccaaactgtactcccgcacagggtagccgctggcccatggagaaaaaacgacgtaggccatcggctctggaagccgatagtcccatggctccgaagagaggcaccaagaggcaacgacaaagcttcctgccttgtcttcgccgaggctctttacctgatacacagccaagccaaggaccctccactccaaaaggcgagcgcgcatcttccccctgccatagtccccgtgtatgcccagcaaccgtgatcaagtctcgggtgcctctgggcccatccgccatgcaaaactgctctacaccactggctctgcctaccagggacttgaatgcgactttcgacttgtcagaggaacctccgagcaagccctcattccacgaatgcattggctgggacaaaatcccacaggagctgtcccgcctggaccagccctttatccccagagccccagtccccctgtttactatgaaaggcccaaaaccaacatcaagtctgccgggtacaagtgcctgcaagaagaagagagtcgcgtctagctccgtcagtcacgggcgttccagaattgcgaggctgccaagcagtacactgaagaggccaggtcctctctattctcaggtaaccgggacccgggatcgagatagcctcggccacgggggaagatag

SEQ ID NO: 29091 - DNA, 561 bp, synthetic construct
  source 1..561: mol_type = other DNA; note = Synthetic coding sequence
atggaacctcctaggggacctccggctaacggcgcagagccaagcagggccgtcggcacagtgaaagtgtacctcccgaataagcaacgaaccgttgttactgtcagagatggcatgtccgtgtatgactccctggacaaggccctcaaagtgaggggactgaaccaggactgctgcgtggtttatcgcttaattaaagggaggaagactgtcactgcatgggataccgccatcgctccgttggacggagaagagctgattgtggaggtgctagaagatgtccccttgactatgcataatttcgtgaggaagaccttcttctctctggcattctgtgatttctgcctgaagtttctgttccacggattcaggtgccagacttgcggttataagttccaccagcactgttcttcaaaagtgccaactgtttgtgttgacatgtccacaaacaggcagcagttctatcacagcgttcaggacctgtccggtggttcccgccagcatgaggccccttccaataggcccctgaatgagctgctgactcctcaagggccaaggtag

SEQ ID NO: 29092 - DNA, 1821 bp, synthetic construct
  source 1..1821: mol_type = other DNA; note = Synthetic coding sequence
atggagcccccacgaggacctcctgcgaacggggctgagcctagccgcgcagtaggcaccgtgaaggtctacctccctaataaacaacgtactgtcgtgacagttagggatggaatgtcagtctacgactcccttgataaggcactcaaggtgagaggactcaatcaggattgttgcgtcgtgtatcggttgatcaagggcaggaaaactgtcactgcttgggatactgctatagccccattggatggagaggaattgatagtggaggtgttggaagatgtgcccctaacaatgcataattttgtcaggaagactttctttagtcttgcattctgcgatttctgcctgaagttcctgtttcacggctttagatgtcagacttgtggatacaaattccatcagcattgttcttcgaaggtgccaacagtttgcgttgatatgagcacgaacagacagcaattttatcactctgttcaggatctcagcggtggcagccgtcaacacgaggccccaagcaacagaccgttgaatgaactgttgactccccaagggcctagcccccgaacccagcattgcgacccagaacactttccctttccggctcctgccaacgctccgcttcagcggattcggtctacatctacgcctaacgtgcacatggtttccacaactgcccctatggattctaacctgattcagctgacagggcagtctttcagtaccgatgcagcaggctcacgaggcggttctgatgggacccctcgtggctctccaagcccagcttctgtgtcctcagggaggaaatctcctcatagcaaatctcccgctgaacagcgggagaggaagtctttggctgacgacaagaagaaggtaaaaaaccttggctaccgcgactcaggttattactgggaagtcccccctagcgaggtgcagttgctgaaacgtattggaaccggtagctttggaaccgttttcaggggacgctggcatggcgatgttgccgtgaaggtgttgaaagttagtcagcccaccgccgagcaagcacaggctttcaagaacgaaatgcaggtgcttagaaagacccggcacgtgaacatactcctcttcatggggtttatgactcggcctggcttcgcaattatcacccagtggtgcgaaggcagctccctctaccaccatctgcatgtggccgacaccaggtttgacatggtccagctcatcgacgttgcaaggcagacggctcagggcatggattatctccacgcaaagaacatcatccatagggatctcaaaagtaacaatattttcttgcacgaagggctaacagtgaaaatcggagactttggtctggccacagttaagactcggtggagtggggcacagccccttgagcagccaagcggaagtgtgctttggatggcagccgaagttatacggatgcaagacccaaacccttatagctttcaatccgacgtgtacgcttacggagtcgtcctctacgaattgatgaccggatcattgccatactcacatatcgggtgccgagaccagattatcttcatggtggggagagggtacctctcaccagatttatcgaagatttcctctaattgtcccaaggccatgcgcagactgctgagcgactgtctgaaatttcagcgggaggagagaccccttttcccacagattctggcgactatagagctcctgcaacgcagtttacctaagatcgagcggtccgctagcgagccttcactgcataggacgcaggctgacgagctgccagcctgcctgttgtctgctgccaggctggtgccttag

SEQ ID NO: 29093 - DNA, 3036 bp, synthetic construct
  source 1..3036: mol_type = other DNA; note = Synthetic coding sequence
atggtgagttcggacagacccgtgtccctggaagacgaagtatctcactctatgaaggagatgatcggagggtgttgcgtgtgcagtgatgagcgaggatgggctgaaaaccccctcgtctactgcgacggccatggctgcagtgtggcggttcaccaagcatgttatgggatcgtacaggtgcctacaggcccatggttctgcaggaaatgcgaatcccaggagagggccgcaagagttagatgtgagctgtgccctcacaaggacggagccctgaagagaacagacaacggaggctgggcccacgtcgtatgcgccctctacatacccgaagtccagttcgcaaacgtgagtacaatggagccaatcgttttgcagagtgtgccccatgaccgctacaataaaacctgctacatatgtgatgagcagggcagagaatctaaggccgctactggagcttgcatgacttgtaacaagcatgggtgcaggcaagccttccacgtgacatgtgcccaatttgccggacttttgtgcgaagaagaaggaaacggagctgataatgtgcagtactgcggatactgtaaatatcatttttctaagttgaagaagtcaaagcgtggttctaatcgcagctatgatcagagcctatctgattcctcctcccatagccaagataaacatcatgagaaagagaagaagaagtataaggagaaggacaaacacaagcagaagcataagaaacaaccagaaccaagccccgctcttgtacccagcctcaccgtcactaccgaaaagacgtacacatctacctccaataattctatatcaggcagtttgaagcggcttgaggacacaacagccagatttacgaacgcaaattttcaggaagttagcgcacatacatcctccggtaaggatgtgtccgaaacacggggatccgagggaaaagggaagaaatcctcagcccacagctctggccaacgcggacggaagcccggtggtggtaggaatcctggcaccaccgtcagcgccgcaagtccttttccccaggggtccttttctgggactccgggatctgtaaagtcttctagtggttccagcgtgcagagccctcaggactttttatcgtttaccgacagcgaccttaggaacgactcgtactcacacagccagcagtcttctgctaccaaagatgtgcataaaggagaatctggcagccaggagggcggtgttaacagcttcagcacgttaatcggcctgccctctacaagcgctgtaaccagccagccgaaaagctttgagaacagtcccggtgatctgggaaatagcagcctgcctacagctggctataagagggctcaaacttcaggcatcgaagaagagaccgtaaaagagaaaaagagaaagggcaataaacagagtaaacacggaccgggtaggccaaaggggaacaaaaatcaggaaaacgtatcgcatctctctgtgagtagtgcgagcccaaccagcagcgtggcttcagcagcgggatcaattaccagctcatctctgcagaagtcccctacactcttacgaaatgggtcgctccagagtttatcagtgggtagctcccccgtgggatctgagatatctatgcagtatagacatgacggcgcttgccccactacaaccttttcagagctgctcaatgctattcataatggaatctacaactctaacgacgtcgctgtctcgttccctaacgtggtgtctgggagtggttcctcgaccccagtgagctctagccacctgcctcagcaaagctcagggcatctgcagcaggttggcgctctgtcacctagcgctgtgtccagtgcggcaccagcggtcgctaccacccaggccaataccctcagcggctcatcactctctcaggctcccagccacatgtatggcaaccgttcaaattcttctatggccgcactgatcgcacagtctgaaaataaccaaaccgatcaggacctgggtgataattctagaaatctggttggtcggggatccagcccgagaggatccctgagccccaggagccccgtgagtagtctgcagattcgctacgaccagcccggtaatagctccttagaaaatctacctcctgtggccgcttctatcgagcagctccttgaaaggcagtggtctgaagggcagcagtttcttctggagcagggtacccccagcgatattcttggaatgttgaagtccctccatcagctgcaagttgaaaaccgccgactagaagagcaaattaagaacctgactgccaaaaaggaaagactccagctgctcaatgcccagctgtcagtgcctttccccactatcactgccaatccaagcccctctcaccagatacacacatttagtgctcaaacagctcctacaactgattctctcaactcaagcaagtccccacatattgggaactcctttctgccagacaatagccttcctgtcttaaatcaagatttaacatcttcaggccaatccacgtcaagttccagcgctctcagtacgccacctccagctggccagtcaccggctcaacaagggtccggcgtgagcggtgtccaacaagtgaacggagtaacggtaggggctttggcctccgggatgcagcctgtgacctccactatcccagcagtaagtgctgtaggcggtatcattggggcactacctgggaatcagttggctatcaacggcattgtaggagccctaaacggtgttatgcagacaccagttaccatgtcgcagaaccctactccactgactcacacaacagtaccacctaatgccactcatcccatgcccgctacactcacaaatagcgcatctggcctcgggctcctgtccgaccagcagcgtcaaatcctcatacaccagcagcagttccagcagctgctgaatagtcagcagttgacgcccgttcatcgccatcctcacttcactcagcttccccctactcacttttctccaagcatggagattatgcaggtaagaaaatag

SEQ ID NO: 29094 - DNA, 3084 bp, synthetic construct
  source 1..3084: mol_type = other DNA; note = Synthetic coding sequence
atggtgtcaagtgatcgccctgtgtcattggaggacgaggtctctcattccatgaaagaaatgatcggcggatgttgcgtatgtagtgatgagaggggatgggccgagaatccgctagtgtactgtgatggtcatgggtgtagcgttgctgtgcaccaggcttgctatgggatagtgcaggtgcccaccggcccttggttttgcagaaagtgcgaaagccaggagagggctgctcgcgttaggtgtgaattatgcccacacaaggacggggctcttaagagaacagacaacggtggctgggcacatgttgtttgtgccctttatattcccgaagtacagtttgccaacgtgagtacgatggagcccatagtgctgcagtccgttcctcacgataggtacaataagacctgttacatttgcgatgagcaagggagggaaagcaaagcagctaccggggcatgtatgacctgcaataagcatggatgcagacaagcctttcacgtcacatgtgcccagttcgctgggttgttatgcgaggaggaggggaacggtgccgacaatgtgcagtactgcggatactgcaagtatcacttctctaagctgaagaaatcgaaaaggggttcaaaccgctcctacgaccagagcctgagtgatagcagttcccattcgcaagacaaacatcacgaaaaggagaagaaaaaatacaaagagaaggataagcataaacagaaacacaaaaagcagccagaacctagcccagccttggtgccatctttgacggtgacaacagaaaagacgtataccagcaccagtaacaactccatctctggctctttgaaaagactggaggataccactgctcggttcacaaatgctaatttccaggaggtcagcgcgcacactagtagtggaaaagacgtgtcggaaacaagagggtctgaaggcaagggcaagaaaagttccgcccacagcagtggacagagaggcaggaagccagggggagggagaaacccgggaacgactgtcagcgcagcgagtccttttccccagggctccttcagcggtaccccaggaagtgtgaagtccagctccggttccagcgttcagagcccgcaggattttctgagttttacagactccgatctccgtaatgacagctatagtcacagccagcagagctctgccaccaaagacgtgcataaaggggagtccgggtcacaggagggtggcgtcaatagtttcagtacattaataggattgccatctacatccgcggttacttctcagccaaaatcttttgaaaattccccaggagatctgggtaactcttccctgcccacagccggatataagcgcgcacagacaagcggaatcgaggaggagaccgtgaaagaaaaaaaaagaaaaggcaacaagcagagcaagcatggaccaggtagacctaagggaaacaagaaccaggagaacgtgtcccacctgtctgtgtcctctgctagccctacaagctccgtggcgtctgcagctggcagtataacatcttcctccctccaaaagagccctacactgctgaggaatggaagtctgcagtctttgagtgtcggatcttcacctgtcggttctgagattagtatgcagtacaggcacgatggggcttgtcctactaccacattctccgaactcttgaacgctattcataacgatcgcggagattcctccacactcactaagcaagaactcaagttcataggcatctataatagcaacgacgtggccgttagcttccctaacgtggttagcggcagcgggtcttccacgccagtgagctcctcccacttgcctcaacagagctcgggacatctacagcaggtgggggcactcagcccctctgcggtgagttctgctgcgccagcagtagcaacgactcaggcaaatacactctccggttcttccctgtcgcaggcgccttcccacatgtacggcaaccgatccaactccagcatggccgcattaattgcccagagtgagaacaatcagactgaccaagacctcggcgataatagcaggaacttagttggtagaggcagtagtcccagagggtcccttagccctcgctcccctgttagttctcttcagattcggtacgatcagcctggcaactcttccctcgaaaacctacccccagttgcagcttcaatcgagcagttacttgagcgacagtggtcagaaggtcagcaatttcttctcgaacagggaaccccgtcggacattctggggatgctcaagtcattgcaccagctgcaggtagagaatcggagactcgaggaacagattaaaaaccttaccgccaaaaaagaacgccttcagcttctgaacgcgcagctgtcagtcccgttccctacgattacggcgaatccctcgccctcccaccagatccatacttttagcgcccagacagctcccacaactgacagcctgaacagcagcaaatctcctcacattggtaattcttttttgcctgacaattccctcccggttctcaaccaagacttaacatcctccggacagtcaacctcatcctccagcgccctgtcaaccccgcctccagctggccagtccccagcccaacagggctcaggggtgtccggagtccagcaggtgaacggtgtcacggtgggcgcactcgcttccggtatgcagccagttacttccaccattcccgctgtttctgctgtgggtggcatcattggagcactcccaggcaatcagttagctatcaatgggatagtgggtgcgctaaacggggtaatgcagacgcctgtgaccatgtcacagaatccgacgccactgactcataccacagtgcccccaaatgccacgcatccaatgcccgctaccctgactaactctgcatccggcctgggcctgctttcagaccagcagcgacagatcctcatccaccagcagcaatttcagcaactgctcaactctcagcaactcactcccgtacaccgacatcctcacttcacgcagttgcctcccacccacttcagccccagtatggaaatcatgcaggttagaaagtag

SEQ ID NO: 29095 - DNA, 567 bp, synthetic construct
  source 1..567: mol_type = other DNA; note = Synthetic coding sequence
atgaccgctccctcctgcgcctttcctgttcaatttcgccagccaagcgtgagtgggctcagccagatcacaaagtctttatacatctcaaatggcgtggctgcgaataacaagctgatgcttagtagcaaccagatcacaatggtgatcaatgtctctgtcgaggtcgtgaatacactatacgaggacatccaatacatgcaggtgccggtcgctgattcacctaatagcaggctctgtgacttttttgacccgatcgctgatcacatccactctgttgaaatgaaacagggccgtactttgctgcattgcgcagcaggagtttctcggagtgcggctctttgcctggcctatcttatgaagtaccacgcaatgtcactactggacgctcatacctggaccaaaagctgccgaccgatcatccgcccaaattctggtttttgggaacagctgatccactacgagttccagcttttcggaaagaacactgttcatatggtatccagccccgtaggaatgatacccgatatctacgagaaggaagtccgtctaatgatcccactgtag

SEQ ID NO: 29096 - DNA, 381 bp, synthetic construct
  source 1..381: mol_type = other DNA; note = Synthetic coding sequence
atggtgtcctctgacagaccggtcagcctggaggatgaagtgtcgcactcaatgaaagagatgatcggcggatgctgcgtttgtagcgatgagcgcggatgggccgaaaaccccttggtgtactgcgacggacacggatgctctgtcgcagtacaccaggcgtgctatggaattgtgcaggtgccaaccggtccatggttttgccggaagtgtgaatcccaagagcgggctgcaagggtagccgagtctcgctccgttgcacaagcaaaagttcagtggtgcgatctgtcgcctctgcagccactgctgccgggatttaaacgcttctcctgcctgtccctgccaaacggtatgcagttcctgctggtgtctctcatttag

SEQ ID NO: 29097 - DNA, 540 bp, synthetic construct
  source 1..540: mol_type = other DNA; note = Synthetic coding sequence
atggtaagctccgatcgccctgtgtcactggaggatgaggtgagccacagtatgaaggagatgattggtggttgctgtgtctgttccgacgagcgcggatgggccgagaatcccctcgtttattgtgatgggcacggatgctccgtggccgtgcatcaggcttgctatggaattgtgcaagttcctacaggaccttggttttgtcggaaatgcgaatcacaagagcgcgctgcccgagtgatggtttgtaactcatgctggctggctagcagcgagaacgtaacaccaggttacattgaacatcactgcgcttgtgccagtcctcatcctcgttgtcttgtatcaaacgtcccacccgtgtccggggctctcatgcactgtttctgggcctgcctgacgaccgcggctttctttgggcctcagagcttcacaacctgtcacatgtctttcctggtgagtcgagatatcctattttacatttacggttttatgccatttataagcgtcgtcatttggagatttaagaaggaacgatggtag

SEQ ID NO: 29098 - DNA, 540 bp, synthetic construct
  source 1..540: mol_type = other DNA; note = Synthetic coding sequence
atgggactgattttcgctaaattatggtccctcttctgcaatcaagagcacaaggtgatcatagtcggacttgataatgcgggtaaaacgactattctttaccagtttctgatgaatgaggtggtacatacctcacccaccattggcagcaacgtggaggagatcgtggtcaaaaacactcatttcctgatgtgggacataggagggcaggaaagcctcagatcaagttggaacacctactattccaatactgaattcataatcctggtggtcgatagcattgatcgtgagaggcttgccattaccaaggaagaactgtatcgcatgctagctcatgaagacctgcgcaaggccgcagtcttaatttttgctaacaagcaggatatgaagggttgcatgacagccgcagaaataagcaagtatctgacactatccagcatcaaggaccacccttggcacatccagagctgctgcgccctgacaggagaaggattgtgccagggcctggagtggatgacaagtcggataggcgttcgatag

SEQ ID NO: 29099 - DNA, 3345 bp, synthetic construct
  source 1..3345: mol_type = other DNA; note = Synthetic coding sequence
atgagtcaaactcaggattacgagtgtcgatctcataatgtggacttgccggagtcacggattccaggatccaacacgcggttggaatgggtggaaatcatagaacctcgcacccgcgaaagaatgtacgcgaacctcgtcacgggtgagtgtgtttgggacccccctgccggtgttcgaattaagaggacctcggagaaccagtggtgggagctattcgatccaaatactagcaggttctattattataatgccagtacccagagaacggtgtggcatcggcctcagggatgcgatatcatacccttggctaagctgcagaccctgaagcagaataccgagtcaccacgtgcctctgctgaaagcagtcccggaagaggctcttcagtgtcacgggagggctccacatcttcttccctggagcccgagcctgataccgaaaaagcccaagagcttccggctagggcagggaggcccgctgccttcggaactgttaaggaggactcaggcagctctagcccacccggagtcttcctcgagaaagattacgagatctatagagactatagcgcggacggccaactgctccactaccgaacctcctcactacggtggaattcaggggcaaaagaacgaatgttaatcaaggtggctgaccgtgagcctagctttcttgcagcacaggggaacggatacgctcctgacggtcctccgggagtccggagtcggagaccttctgggtcacagcattctcctagcctacagacctttgcacccgaagccgacggtaccatcttttttccagagcgacgcccatctccctttcttaagcgcgcagaactgcctgggtctagcagccctctactcgcccagccacggaagccatcaggtgactcccagccgtcatctcccagatatgggtacgagcccccactctatgaggagcccccagttgagtatcaggcccctatttacgacgaacctccaatggacgtgcagttcgaggccggaggaggttaccaggccggttctccacagaggtccccaggcaggaagccccgaccgtttctacaacccaacaagcaagggccaccgagtccctgtcagcaattagtattgacaaagcagaaatgtcctgagagattcctgagtctggaatactctccagcaggcaaagagtatgttaggcaactggtatatgtagagcaggctggatcttcgccaaagctccgggcaggcccaaggcataaatacgctccgaaccccggaggaggtagctactccttacagcccagcccatgcctgctgcgggatcagcgattgggggtgaagtctggtgattacagcactatggagggacctgagctgcgtcattcgcaaccaccgactcctttaccccaagcacaggaagatgccatgagctggagttcacagcaggacactctctcctccaccggatatagtcccggaaccaggaagagaaaaagccgcaaaccctccctgtgtcaagcgacttcggcaacacctactgaggggccaggagatttattggtggaacaaccattggctgaagagcagccaccttgtggaacatcacttgctcctgtgaagcgcgctgagggcgaggctgagggggctaggggcgctgcggaacctttcctggcgcaggcaagactggcctgggaggcccagcaagctcactttcatatgaagcagaggagttcttgggatagccagcaagatggatctggctacgaatccgacggagcactgccccttccgatgcccggaccagtggtcagagcgtttagcgaggacgaggcgctcgctcagcaggagaataggcactggcggcgaggaacctttgagaagctggggtttcctcagatcctgctggaaaaatctgtttctgtccagaccaacctggccagccctgagccgtatctgcatccttcccagagcgaggatctcgccgcttgcgctcagttcgagtcgagcaggcaaagtcgctccggagttccctctagtagctgcgtcttcccaacatttactctgaggaaaccatcttctgagacggatatcgagaattgggctagcaaacacttcaataaacatactcaggggttgttccggcgtaaggtttcaatagccaatatgctagcgtggtcttctgaatctattaaaaagcccatgattgtgacttctgatcggcacgtgaagaaggaggcttgcgagctgttcaagttaatccagatgtatatgggcgatcgcagagcaaaagcagaccctctgcacgtggctctggaggtggctaccaagggctggagcgtgcagggcctgagagacgaattgtatatccagttatgtaggcagaccactgagaacttccgcctggaatccctcgctagggggtgggaattaatggccatctgcctggccttcttccccccaacccccaaatttcacagctatctcgaaggctatatttatcgccacatggaccccgtgaatgatacaaaggttacacagcacatcaaagagctcttggagagaaacacaaaaaagaaatctaaacttagaaaaaagcccaagccgtacgtggaagagccagacggcgtggccatcagcacttacgctaagtattgctaccataagttgcagaaggccgctttaactggcgctaagaagggcttaaaaaaacccaatgttgaggaaattaggcacgctaagaacgccgtctttagcccgagtatgttcgggtcagcgctccaggaggttatgggtatgcaacgagagagatacccagagcgtcagctgccctgggtgcaaacaagactcagtgaagaggtcttagcgttaaacggggatcagactgagggtatttttagagtgcctggcgatatagacgaggtgaacgccttaaagctgcaggtggaccagtggaaggttcccacaggattggaagatcctcatgttccggcttccctgctcaaactgtggtaccgtgaacttgaagagccactcatcccccacgaattttatgagcagtgcatcgcccattacgatagccccgaagctgccgtggccgtcgtccatgcgcttcccagaatcaaccgcatggtgctgtgctatctgattaggttcctccaggtttttgtgcagcctgctaacgtcgccgtcacaaaaatggacgtaagcaatctggccatggtcatggcgccaaactgcctcagatgtcagagcgacgaccccagagtaatctttgagaacacaaggaaagagatgagttttttacgtgtgctgatccagcacctcgacaccagcttcatggagggcgtgttgtag

SEQ ID NO: 29100 - DNA, 822 bp, synthetic construct
  source 1..822: mol_type = other DNA; note = Synthetic coding sequence
atgggccagaaagtgacaggcggaatcaaaaccgtcgatatgcgtgatcccacataccgtccgttaaagcaagaattgcagggcttggactactgtaagcctactagactagacctgctcttggacatgccaccagtgtcttacgatgtgcaattgttgcattcctggaataacaacgatagaagtctgaatgtttttgttaaagaagatgacaaactgatttttcatcgacacccagttgctcagtcaactgatgcaatccggggtaaggtcggctatacaaggggtctacacgtgtggcaaatcacatgggctatgaggcagcggggaacccatgctgtggtcggagtggccactgccgatgctcccctacactccgttggctataccacattggtggggaataatcatgaatcctggggctgggaccttggcagaaaccggctgtaccatgacggtaaaaatcaaccttcaaaaacctaccccgcttttctagaacctgacgaaacatttattgtgcctgattcattcctcgtggccctggacatggatgacgggaccctctctttcattgtggacggacagtatatgggtgtggctttcaggggtctcaagggcaaaaagctctatcctgtagtgtccgctgtttgggggcactgcgagattcgcatgagatatctcaacggcctcgatcctgagccgctccccctcatggacctgtgcaggcggtccgtcagattagcccttggccgagagaggctgggcgagatccatacccttcctctgccagcctccctgaaggcttacttactgtatcagtag

SEQ ID NO: 29101 - DNA, 3633 bp, synthetic construct
  source 1..3633: mol_type = other DNA; note = Synthetic coding sequence
atgcctagaggagaggcccctggtccaggacgtcgcggagcaaaggacgaggctctaggtgaggagagcggcgaaaggtggtctccggaatttcatctgcaacgaaagcttgctgattcatctcatagtgagcaacaggatcgaaaccgggtgtccgaagagctaatcatggtcgtacaggagatgaagaaatattttccatccgagcggaggaacaaaccttccacccttgacgctctgaactacgcgctgcgctgtgtccacagtgtacaagcaaacagcgagttctttcagattttaagccagaatggcgcacctcaagcagatgtgtcgatgtactcgcttgaagagctagcaactatagcatcggaacacacctccaagaacacggatacatttgtggccgttttctctttcctttcaggaagactagtgcatattagcgaacaagccgcactaatcctgaaccgcaaaaaggatgtgctcgcgagcagtcatttcgtagacttacttgccccacaggatatgagagtcttttacgcacacaccgcgagagctcaactgccattttggaacaattggacccagagggccgcagccaggtatgaatgtgcccctgttaagccctttttttgcaggatccgcggaggcgaggaccgtaagcaggagaaatgccactctccattcaggattattccctacttgatccatgtgcatcatcctgctcaacctgagctcgagtctgagccctgttgcctaaccgtggtggagaaaattcactccggctacgaggcccctagaattcccgtaaataaaaggatcttcacaacaacccacacaccgggatgcgtttttctagaggtggacgagaaggcagtgccactcctaggatacctcccacaagaccttattggaacctccattctcagttatctacaccccgaagacaggtcactgatggttgcaatccatcagaaggtactgaagtacgcagggcatcctccatttgagcactctccaattagattctgtactcaaaatggtgattatattatcctcgattcaagctggtcttcctttgtaaacccttggtcccggaagatctcctttattattggtcgccacaaggtacgcacaagccctttgaacgaagatgtgtttgccactaagattaagaagatgaacgataatgacaaagatataacagagctccaggagcagatttacaagcttctgctgcagccagtgcacgtgagtgttagcagtggatatggctccttgggttcttccggttcccaggaacaactcgtctctatagcctcaagtagcgaagcctccggtcaccgcgtggaggagactaaagccgagcagatgactctccagcaggtttatgcctcagtgaacaagatcaagaacctgggccagcaactgtacattgagagcatgacaaagtctagttttaaacccgtgactggaactcgcaccgagccaaacggaggtggtgagtccgccaatggaggaggcgagtgcaagacctttacttccttccaccagactctgaagaataactctgtttacaccgagccatgcgaggaccttcgcaatgatgagcactccccttcttaccagcaaatcaactgtatcgattcagtgatccgttacctcaagagctataatattccagctctgaaaagaaaatgtatttcctgtacaaataccacttcaagtagctccgaggaagacaagcagaaccataaagccgatgacgtgcaggcgcttcaggctggcctgcagatcccagccattcccaaatccgagatgccgacaaatgggaggtccattgatacagggggaggggcaccacagatactaagcactgctatgctgtcgctcggttcaggcatatctcagtgcggctacagctctactattgtgcatgtgcccccaccagaaacagccagggatgctacactgttctgtgaaccctggaccctgaatatgcagcctgcacctctaacgagcgaagaattcaaacatgtgggcctgaccgccgcagttctctctgcacatacgcagaaggaagaacagaactacgtcgacaagttccgggaaaagatcctgagctctccatattcttcctatttacagcaggaatcacgctccaaggccaagtactcttattttcagggtgattctacatcgaaacagacaagatccgctggctgtagaaagggtaaacacaaacgaaagaagctacctgagccacccgattctagctcctccaacaccgggagtgggccacgcagaggggctcatcagaatgcccagccttgctgcccttctgctgccagcagtccccacacctcaagtccaacatttcctcccgctgccatggtaccttcccaggccccttatctcgtgcccgctttccccttgccagcagccacaagtcctgggagggaatacgcagcccctggaaccgcccctgagggcctgcacgggctgccactgtccgagggtctccaaccctacccagctttccctttcccttacctggacacatttatgaccgtcttcctgcctgatccccctgtctgtcccctcctatcaccatcattccttccctgcccgtttcttggggctaccgcaagctctgccattagtccatcaatgagcagtgctatgtcgccaacgctggatcccccaccttccgtgacaagtcagaggcgagaagaggaaaagtgggaggctcagagtgaagggcacccctttatcactagcaggagttctagtcccctccagttgaacctgttgcaagaagaaatgcccaggcccagtgagtcccctgatcagatgcgaaggaatacttgtcctcagactgaataccaatgcgtgacggggaacaacggctctgagtcgtccccggctaccactggcgctctctccacagggtcaccaccaagagagaatccttcacaccctacagccagcgctctctccactggtagtccaccaatgaagaatccaagccatcctaccgccagcgctctgagcactgggtcaccacccatgaagaatcccagtcatccgaccgcctctactttgagcatgggcttgccaccgtccaggacacccagccatccaacagcgactgttttgagtacaggctcacctcccagtgagtcaccctctcggaccggatccgccgctagtgggagtagtgattctagtatctatctcaccagtagcgtgtattccagtaagatttcccagaatggccagcaatctcaagatgttcagaagaaagagaccttccccaacgtcgctgaggagccaatttggagaatgatccggcagactcctgaacggatactgatgacataccaggtacctgagagggtgaaagaggtggtgctgaaagaggatctcgaaaagctggaatctatgcggcagcagcaaccccagttttcccacggccagaaagaggagctcgccaaagtgtacaactggattcaatcccagacagtgacgcaggagatcgatatacaggcctgtgtgacctgtgagaatgaagactcagcagacggtgctgcaacctcgtgcggccaggtcctggtggaagactcatgctag

SEQ ID NO: 29102 - DNA, 1137 bp, synthetic construct
  source 1..1137: mol_type = other DNA; note = Synthetic coding sequence
atgccacgtggagaagcccctggccctggcaggcgcggagctaaagacgaagctctcggggaggagagcggggaaaggtggtcccctgagttccaccttcagaggaagcttgcagacagttctcattcagagcagcaagatcggaatagggtttcagaagagcttatcatggtggttcaagagatgaaaaagtactttcccagtgaaaggagaaacaaacctagcacactagatgccttgaattacgcccttcgttgcgtgcacagtgtacaggccaatagcgaattttttcaaattctgagccaaaacggggctcctcaggccgacgtctctatgtacagtctggaagaactggctacaattgcaagtgagcatacctccaaaaatacggacaccttcgtggccgtattctcctttctttcaggccgactggtgcatatctcagaacaggcagccctgatcctcaatcggaagaaggacgtcctggcgtcctcacattttgtcgacctgctcgcgcctcaagatatgcgggtcttttacgcccataccgctcgcgctcagctcccattttggaataactggacacaaagggcagcaaggtatgaatgcgctcccgtgaagccattcttctgccgaattcgcggaggagaagatcggaagcaggagaagtgtcatagcccgttcaggatcattccatacctgattcacgtgcatcaccccgctcagcccgaactggaatccgagccgtgctgccttactgtggttgagaagattcacagcggttatgaggccccaaggattcctgtgaacaagaggatcttcaccaccactcacactccagggtgtgtattccttgaggtggatgagaaggccgtcccactgctgggctacctgcctcaggacctgattgggacgagcatcttgagctatctccaccccgaggaccggagtctgatggttgccattcaccagaaggtcctcaaatatgcaggacaccctccattcgagcactctccgatcagattttgtactcaaaatggggattacatcatcctggacagcagctggtcgagctttgtgaacccgtggagcaggaagatttccttcattatcggacgccacaaggtgcggacttag

SEQ ID NO: 29103 - DNA, 1794 bp, synthetic construct
  source 1..1794: mol_type = other DNA; note = Synthetic coding sequence
atggaaaggcccgcacccctggctgtgctcccattctctgaccccgcacatgctctcagcctccttagggggctgagtcagttacgtgctgaaagaaagttcctggatgtgacactggaggccgcagggggaagggatttccccgctcatcgagccgtccttgctgcggcatcaccatacttccgtgcaatgttcgccggacagctacgggagagcagggccgagcgcgtacgactgcacggcgttcctccggacatgttacagctcctcctggacttttcctacaccggacgggtggcagtcagcggggacaacgctgagcctctgctcagggctgcggatcttttgcaattccccgctgttaaggaggcatgcggagcctttctccagcagcagctagatcttgctaattgcctggatatgcaggattttgctgaggctttcagctgctcaggcctggcaagcgccgctcaacgctttatactacgccacgtgggagagttaggagctgaacagctcgaacgactgccacttgcgcgtttgctccgttatctgcgtgacgacgggctgtgtgttcccaaagaggaagccgcttaccaactggcccttcgctgggtgcgcgcagatccccctcgcagggccgcacactggccccagttactggaagccgtgaggttaccattcgtgcgacgcttctacctcttggcacatgtggaggcggagcctttagtcgcccgatgccccccttgtctgcggctgcttcgcgaagctagggacttccaggctgcacggtacgaccgacacgaccggggtccatgccctaggatgcgacccaggccatcgactgggcttgccgagatcctggtgcttgttggcggatgcgatcaagattgcgacgaattggtgaccgtagattgttataatcctcagaccggacagtggcgatatctcgccgaatttcctgaccacttagggggtgggtacagcatcgttgctctcggcaacgacatttatgtgaccggtggctctgatggctctcgactgtacgactgcgtgtggagatataattctagtgtgaatgaatgggccgaggtcgctccgatgctcaaggcacgagaataccactcctccagcgtcctggacgggttgctgtatgtcgtggccgcagatagtactgagaggtatgaccacacgactgattcctgggaagccttgcagcctatgacctacccaatggacaattgctctaccactgcttgtcgagggaggctctatgcaattggctcgctcgccggaaaggagacaatggtgatgcagtgctatgatccagataccgacctgtggagcctcgtcgattgcggacagctcccaccctggagcttcgcccctaagacagctaccctgaacggtctcatgtacttcgtgcgcgacgactcagctgaggtagacgtatacaatcctacacgcaacgagtgggacaagattccctccatgaaccaggtccacgttggcggaagcctcgcagtcctgggaggaaagttgtacgtctctgggggttatgacaacactttcgagttgagtgatgttgtggaggcttacgacccggagactagggcgtggagtgtggtggggagacttcccgagcctactttttggcatggatcagtttcaatatttcgacagtttatgcctcagacgttttccggaggcagggggtttgagctggactcagggagcgatgatatggatcctggccgtcctcggccaccgagagatcctgatgaactgcattag

SEQ ID NO: 29104 - DNA, 1620 bp, synthetic construct
  source 1..1620: mol_type = other DNA; note = Synthetic coding sequence
atggagcgacccgcacctttagcggtcctgcctttttctgaccccgctcacgcacttagcctcctgaggggactgtcccagctgcgcgctgagcgcaaattccttgacgtcactctcgaggccgctgggggtcgcgatttccccgcacaccgagcagtcctggctgctgcatccccgtactttagggcgatgtttgctgggcagctcagagagtcccgagctgagagggtgaggctgcatggagtaccaccagacatgcttcagctgttgttagactttagctacacagggagggttgccgtgagcggagacaatgcagagcccttacttagagccgctgacctgcttcaatttccggctgtaaaggaagcatgcggggcattcctgcagcagcaactggatttagccaattgtctagatatgcaggacttcgccgaggcgttctcctgcagcgggcttgccagcgccgcacagcgctttatcctcaggcacgtgggagagctgggcgcagaacagctggagaggctcccacttgctaggctactaaggtacttacgggatgatggactgtgcgttccaaaagaagaggccgcatatcaactggcactcaggtgggtgagggctgacccacctagaagagccgcacattggccccagctgcttgaggctgtgaggctgccattcgttcgacgcttttacctcctcgcacacgtggaagccgaacccctggtagccaggtgtcctccatgtctgcggttgcttcgtgaggctagagacttccaggctgctcggtatgacaggcatgacagagggccatgcccgaggatgaggccaagacctagtaccggactggccgagatccttgtcttggtgggcggttgcgaccaggactgcgatgagctcgttacagttgactgctacaacccacaaacaggacagtggcgatacctcgctgagtttcccgatcatttgggcggaggatactcaatcgtcgctctcggcaatgatatatatgtgaccggcggtagtgatggaagcagactctacgactgtgtgtggcgttataatagcagtgtaaacgagtgggctgaagtggcgccaatgctcaaagcccgagaatatcatagtagctctgtgttagatggattgctgtatgtggtggctgccgactcaactgagaggtacgaccatactaccgactcctgggaggccttacagcccatgacatacccgatggataattgttcaaccacagcttgcagagggcgactgtacgctataggctctttggcaggtaaggagaccatggtcatgcagtgttacgatcctgacaccgatttgtggagtctggtcgactgcggtcaactcccaccatggtccttcgcacccaagacagcgaccctaaacggtctcatgtattttgtccgggacgattctgctgaagtagatgtctataatcctacgcgcaatgagtgggataagatcccatcaatgaaccaagtcaactttcaggctggacagcactggaagcatcggctggtcctcattttgcaacctaaatgccacagagacgaatgtctgggcagcacagccatgatgggtgggagccacttgaattag

SEQ ID NO: 29105 - DNA, 2067 bp, synthetic construct
  source 1..2067: mol_type = other DNA; note = Synthetic coding sequence
atggatggaagcttcgtgcagcatagcgtgagagtcctgcaagagttgaacaaacagcgggagaaaggacaatactgcgacgccacattagacgtgggaggattggtgttcaaggcacactggagcgtgctggcttgctgtagccacttcttccagtctttgtatggcgatgggtcagggggtagcgtggttctgcccgctgggtttgctgagatcttcgggctgctgctggacttcttttataccggccacttagcgctgacttctggaaaccgggatcaagtgttacttgccgcaagggagcttagggtgccagaggccgtggaactgtgtcagtcttttaagcccaagacttccgtggggcaggcagccggaggacagtccggactggggccacccgcaagccagaacgtgaattcacacgtgaaggagccggcaggcctagaggaggaagaggtcagcaggactctaggtctggtccccagagaccaagaaccccgaggtagccacagccctcagaggccacaattacactcccccgctcagtccgaaggtccaagtagtctctgtggaaagctgaagcaggccctgaaaccgtgtcctctggaggataagaagccggaggactgtaaagtgccccctcggccacttgaagccgaaggagcccaactgcagggaggtagtaacgagtgggaggtagtggtgcaggttgaggatgatggagatggtgactacatgtcagaacccgaggccgtactgacacgtcggaaatccaatgtcattaggaagccatgcgcggcagaacctgcattgagtgcaggcagtcttgccgctgagccagctgagaatagaaaaggtaccgctgtgcctgtcgagtgtcctacctgccacaaaaagtttctgtccaaatattacctgaaggtgcacaaccgaaagcacaccggggaaaagccttttgagtgccctaaatgcgggaagtgttattttagaaaagagaatctcttagagcacgaggcaagaaattgcatgaacagatctgagcaggttttcacttgtagcgtctgccaggagacattccgaagaagaatggagttacgcgtccatatggtaagtcatacaggcgagatgccatacaagtgctcctcatgcagtcagcagtttatgcagaagaaagatttgcagagccacatgattaagctacacggcgcaccaaaaccacacgcatgcccaacatgtgccaaatgctttctctcaagaacagaattgcagctccacgaagcctttaagcacaggggggaaaagctctttgtctgtgaagagtgcggccacagggctagctcccgaaatggactgcagatgcatatcaaggcaaagcataggaatgagagaccacatgtgtgcgaattctgttctcatgctttcacccagaaggctaatctgaatatgcacctacgtacccacacaggggagaagcccttccagtgccacttatgtggcaagactttcagaacgcaggcctctcttgataagcataatagaacccacaccggagaaaggcctttctcatgcgaattctgtgagcagcggtttacggagaagggcccactcctccgacacgttgccagtcggcatcaggaaggaaggccccacttctgtcagatttgtgggaagacattcaaagcggtcgaacaacttcgggtgcatgtgcgacggcacaagggggtgcgcaagttcgagtgcacagagtgtggatacaagtttacccgtcaagcacatctccggcgtcacatggagattcacgatagggtcgagaactataatccacgccagcggaaactgaggaatctcattatcgaggatgaaaaaatggttgttgtggctctccagccacccgctgaactggaagttggttccgctgaggtgattgttgagtccctggcccagggaggtcttgctagccaactgccaggacagcgcctgtgtgcagaggaatcttttacaggacccggagtgctggagcctagcctgattatcaccgcagctgtgccagaggactgcgacacttag

SEQ ID NO: 29106 - DNA, 525 bp, synthetic construct
  source 1..525: mol_type = other DNA; note = Synthetic coding sequence
atgacccactgttgctccccgtgttgtcagcctacttgttgcagaaccacttgttgccgtaccacttgctggaagccgactacagtgacaacctgctcatccactccctgctgtcagcctgcatgctgtgttagcagttgttgtcagccctgctgtcgacccacttgttgtcagaatacctgttgccgtacaacctgctgccaacccacttgtgtcacctcatgctgtcagccaagctgctgctctaccccatgttgccagcctacctgctgcggctcaagctgttgcggacaaacctcctgcggctcctcttgcggtcagagctcttcatgtgctcccgtctactgcagaagaacatgttactatcctactacagtatgcttacccggatgtctcaatcagagttgcggcagcaactgctgccagccctgctgtagacccgcttgctgtgagactacatgttgcaggaccacatgctttcaaccaacatgcgtgtctagctgctgtcaaccctcttgctgttag

SEQ ID NO: 29107 - DNA, 597 bp, synthetic construct
  source 1..597: mol_type = other DNA; note = Synthetic coding sequence
atggtaagtagctgttgcggatctgtgtgtagcgaccaggggtgttcgcaagatctgtgccaagagacatgctgtagaccgtcttgctgtcagacaacatgttgtaggactacttgttataggcctagctgctgtgtttcctcatgctgccgacctcagtgctgtcaatcggtatgttgtcagcctacatgctgtcgcccacctagatgttgcatctccagttgctgccgcccatcatgctgtatgtcaagctgctgtaaacctcagtgctgccagtcagtttgctgccagcctaccactacttgttgccacccccgttgctgcatcagcagctgttgccggcctagctgttgcgtcagtagctgctgtaaaccccagtgctgccaatcagtgtgttgccagccaaactgttgccggcctagttgcagcatcagctcctgttgccggccaagctgctgtgaatccagctgttgtcggccatgctgttgcgttcggcctgtgtgtggtcgagtgtcctgccatacaacctgttaccgacctacatgtgtaatcagctcctgcccgcgacccctctgctgtgcttccagctgctgttag

SEQ ID NO: 29108 - DNA, 1296 bp, synthetic construct
  source 1..1296: mol_type = other DNA; note = Synthetic coding sequence
atgacttccgattgttcatctacccactgttctcccgagtcttgcggaacggctagcgggtgcgcgcctgcttcaagctgttctgtggagacagcctgcctaccaggcacgtgcgctacatccaggtgccagaccccaagctttttatctaggagcagagggcttacaggctgcttactgccatgttacttcacaggctcctgcaattccccatgcctcgtcggcaactgcgcctggtgtgaggatggtgtgtttacctcaaacgaaaaggaaacgatgcagtttctgaacgaccggctggcttcttatctagaaaaagttcggtccctcgaggagactaacgccgagttggagagtagaatccaagaacagtgtgagcaggacataccgatggtgtgcccggactaccagagatacttcaataccattgaggatcttcagcagaagatactgtgcacaaaggcggagaacagcagactcgccgtccaacttgataactgtaaattagctactgacgacttcaaatctaagtacgagagcgaactttccctgaggcagctgctcgaagctgacatcagctccctgcacggaatcctagaggaactgactttatgtaaaagcgacctggaggcacacgtagagtccctgaaggaggacttgctatgtctaaaaaaaaaccacgaagaggaagttaatctgctgcgtgagcaactgggagatagactgtccgttgaactagacaccgctccgacactggacttgaacagagttctcgacgaaatgcgctgtcagtgtgagactgtgttggcgaacaaccggcgtgaggcggaagagtggctggccgtgcagacagaagaactgaatcagcagcagttgtcgtccgccgagcagttgcagggctgtcagatggagatcctggagcttaaacgcacagctagcgctcttgagatcgagctgcaggcacagcaatccttgacggaatccctggagtgcactgtggccgagacagaggcacaatattctagccaactggcgcaaattcaatgcctgatagataatttagagaaccagctcgcagagatccgctgtgatcttgaacgccaaaatcaggaatatcaggtgctactggacgtcaaggctaggttagaaggggagataaacacctactggggcctgctggacagcgaggattcacggctgtcatgttcgccgtgtagtacaacttgcacctcatccaacacttgtgaaccctgtagtgcctatgtgatctgtaccgtggagaattgttgtctttag

SEQ ID NO: 29109 - DNA, 1047 bp, synthetic construct
  source 1..1047: mol_type = other DNA; note = Synthetic coding sequence
atggcaggctctctgccaccgtgcgtggtagattgcggcacaggctacaccaaactaggttacgctggtaataccgaacctcaattcattatccctagttgcatcgccatacgggagtcagcgaaagtggtcgaccaggcccagcgcagggtactgagaggggtagatgatctagacttcttcattggagacgaggcgatcgacaaacctacgtatgctacaaaatggcccatcaggcacgggattatagaggactgggacctcatggaacggtttatggagcaggttgtctttaagtacctgcgcgctgaaccagaagaccactattttcttatgaccgaacctccccttaacacgcccgagaacagagaatatctggcggaaatcatgtttgaaagtttcaacgtacctggcctgtatatcgcggttcaagcagtgttggcactggcggctagctggacaagtaggcaagtgggggagcgcaccctcaccggtattgtcattgattccggggacggtgtgacccatgtgatcccagtagcggaggggtacgtcattgggtcctgtatcaagcatattcctattgcaggccgagatatcacttacttcatccagcagctgctgagagaaagagaggtgggcattccgccagagcaaagtctggaaacagctaaggccatcaaagaaaaatattgctacatctgtccggatatagttaaggaattcgccaaatatgacgtggaccctagaaagtggatcaaacagtacactgggattaatgccatcaatcagaagaagtttgtcatcgatgtgggttacgaacgcttcctgggacccgagatcttttttcaccctgaatttgccaaccctgactttatggagagcatctccgatgttgtggacgaggtgatacagaattgcccaatcgacgtgagacgccctttgtataagcccgagttctttcaagtttgccatactaagaaggattacgaggagtacggcccatctatctgccggcataatcctgtgtttggcgttatgtcatag

SEQ ID NO: 29110 - DNA, 273 bp, synthetic construct
  source 1..273: mol_type = other DNA; note = Synthetic coding sequence
atggataacatgagcccccgtttgcgtgcattcctgtctgaacccatcggagaaaaagacgtttgttgggtggacggcatcagtcacgagttggcgattaacctagttacaaaaggtatcaataaagcctacatcctcctgggacaattcctgttgatgcataagaatgaagccgagtttcagagatggttgatttgttgtttcggcgcaacagagtgcgaagctcagcagacaagccattgtctcaaagaatggtgtgcgtgctttctatag

SEQ ID NO: 29111 - DNA, 249 bp, synthetic construct
  source 1..249: mol_type = other DNA; note = Synthetic coding sequence
atggcaagctcgtcaggtgcaggcgcagccgcagcagcggctgccgctaaccttaatgctgtgcgcgagacaatggatgtgctgctggagatatctcgaatacttaacacagggttggatatggaaacactgtccatttgcgttagactctgcgaacaaggcattaacccagaggccctgagcagtgtgattaaagagctccggaaagccacagaggcccttaaggcggctgagaatatgaccagctag

SEQ ID NO: 29112 - DNA, 3732 bp, synthetic construct
  source 1..3732: mol_type = other DNA; note = Synthetic coding sequence
atggaaactagagcggctgagaatactgccattttcatgtgcaagtgctgcaacctcttctccccaaaccagagcgagctgctgagtcatgtgtcagagaagcatatggaagaaggagttaatgtggacgagataataattccattacgtcctctgtcaaccccagaacccccaaatagctccaaaacaggcgacgaattccttgtcatgaaaagaaaacgaggacgtcccaaggggtcaactaagaagtcctctaccgaggaagaattggcggagaatattgtcagccctaccgaagactctcctcttgctccagaggagggtaactctctgccaccatcctctcttgagtgtagcaagtgttgcagaaaattctccaataccaggcagctgaggaagcatatctgcattattgttctgaacctcggggaggaggagggggaggcgggaaacgaatctgatcttgaattggaaaaaaagtgtaaagaggatgatcgagagaaggcaagtaaacggcctagaagtcagaaaacggagaaagttcaaaaaatcagcgggaaggaggcccgtcagttgtccggagccaagaaaccaattatctctgttgttctgaccgcccatgaagcaattcccggagctaccaagatcgttccggttgaggcaggtcctccagagaccggggctacaaattccgagaccacaagtgctgatcttgtgccacgcagaggctatcaggagtacgccattcaacaaacgccctacgaacagccaatgaaatccagccggctaggacctacacagttgaagattttcacttgtgagtattgtaacaaagtcttcaagttcaagcattctctgcaggctcacctgcgcattcacaccaatgagaaaccctataagtgtccgcaatgctcatacgcctccgctatcaaagccaacctcaacgtccatctgcggaagcacacgggggagaagttcgcctgcgattattgctccttcacctgtctgtcgaaaggacacctcaaagtccacattgaacgggtccacaagaaaattaagcagcattgccggttctgcaagaaaaaatattctgacgtgaaaaacctaatcaaacacatccgtgatgcccatgatcctcaggacaagaaagtcaaggaagccctggatgaactttgcctaatgactcgggaaggaaagaggcagctgctctatgattgtcacatttgcgagagaaaattcaagaacgaactggaccgggacagacatatgcttgtgcatggagataagtggccatttgcctgtgaattgtgtggacatggtgctacaaagtaccaggctctggaattacatgtgcggaagcacccttttgtgtacgtttgcgcagtctgtcgcaagaaattcgtttctagcatcaggttgagaacccatatcaaggaagtccacggagctgcccaggaagcactggtgttcacaagcagcatcaaccagtccttctgtttactcgagccgggaggagatatccaacaggaagctttgggcgaccaactgcagctcgtggaggaagagttcgcactccagggcgtaaacgccctgaaggaagaggcctgccccggtgatacccaacttgaggagggtaggaaggaacctgaagcccctggcgagatgccagctcctgccgttcatttagcaagtcctcaggcagaatccaccgccctccctccctgcgagctggagactaccgtggttagctcaagtgacctgcactctcaagaggtcgtctctgacgactttttgctcaagaacgataccagctctgcagaagcccacgcagccccagaaaaacctcccgatatgcagcaccgaagctccgtgcagactcagggagaggttataactctgctcttaagcaaggcgcagagcgcgggatcagaccaggaatcgcatggtgcccaatcaccattgggcgagggacagaatatggcggtgttatcagccggagacccagacccctcccgctgtcttaggagtaatcccgcagaggcatctgacctcctgccaccagtggctggtggcggtgacactataacccatcaaccagatagctgtaaggctgcacctgaacatcggtctgggattaccgcattcatgaaggttctcaacagcctgcagaagaaacagatgaatacctcactgtgcgagcgcataagaaaggtctatggagatctggagtgtgaatactgcggtaaactcttttggtaccaagtgcacttcgacatgcacgtgcgcactcacacacgcgaacacttatactattgttcacagtgccattactctagtattaccaagaactgtctgaagcgacatgtgattcaaaagcattccaatattttattgaaatgccccacagatggctgcgactattccacacctgataagtacaaactgcaggcccacctcaaggtgcatacggctctagacaaacggagttactcctgtcctgtctgcgagaagagttttagcgaggatcggctgatcaaatcccacattaagactaaccacccagaggttagtatgtccacaatcagcgaagtccttggacggcgtgtgcagcttaagggactgatcggaaaacgggctatgaagtgtccttactgcgatttctacttcatgaaaaacggatctgatctgcagcgccacatttgggcccacgagggggtcaagccctttaaatgctccctctgcgagtatgctaccaggtctaagtcaaatctgaaggcccacatgaatcggcacagcacagaaaaaactcatctatgtgatatgtgtggcaaaaagttcaaatcaaaaggcacactgaaaagccacaagctcttgcacaccgcagatggcaaacagtttaaatgtactgtgtgtgattacactgctgcccaaaagccacagctgctgcgacacatggagcagcatgtgagctttaagcctttcagatgcgcacactgtcattacagctgcaatatctccggaagcctgaagagacattataatcgtaagcatcccaacgaggagtatgccaacgtcggcactggagaactagccgctgaagttctgattcagcagggaggcctaaagtgtccagtttgcagctttgtctacggaacaaaatgggaattcaaccgccaccttaagaataaacacggcctgaaagtggttgagatcgatggcgatccaaaatgggaaactgcaaccgaggcccctgaggagcctagcacccagtaccttcacatcactgaagccgaggaagacgttcagggcacacaagctgctgttgcagctctacaggatttgcgttacacaagcgagtctggcgacagattggacccaacagcagtaaacatcctgcagcagattattgagttgggagctgagacccatgacgctaccgccctcgcctccgtcgtggcaatggctcccggaactgttaccgtggtcaagcaggtgaccgaagaggaaccttcctcaaaccatactgtgatgatccaggagacagtgcagcaggccagtgttgagcttgctgagcaacaccacctggtggtcagctcagacgacgtggaaggaattgagactgtcaccgtgtacacccaaggtggggaagcatctgaattcattgtctacgttcaagaagccatgcaaccagtggaggaacaagcagtcgagcaacctgctcaagagctttag

SEQ ID NO: 29113 - DNA, 2274 bp, synthetic construct
  source 1..2274: mol_type = other DNA; note = Synthetic coding sequence
atggcgctcggcgaagagaaggctgaagcggaagcttccgaggacactaaagcacagtcttacgggagaggttcctgtagggagagagagcttgacatcccaggcccaatgtccggcgagcagcctccacgcctcgaggctgagggaggactgatctcgcccgtttggggcgctgagggtatccccgctccaacttgttggatcgggacagaccccggaggtcctagtcgagcccatcagccccaagccagcgacgccaacagagagccagtggccgaaaggtcggaacctgctctgtcagggctacctcctgccaccatgggcagcggggacttactgttgtcaggggagtctcaagtagaaaaaacgaaattatcctcatcagaggagttcccccaaacccttagtctccccagaacgacaacgatctgcagcggtcatgatgctgatactgaggacgaccccagcctcgctgacctcccacaggctttagacctgtcacagcagcctcatagttccgggctgtcatgcctaagtcagtggaaaagtgttctgagtcctggcagcgccgctcagccgtcatcttgcagcatatcagccagctcaactgggtcttccctgcagggccaccaggagagggcggagccacgcggaggttccctagctaaggtgagttcttcgctggagcccgtggtgccacaggagccctcatcagttgttggcttaggcccaagaccccagtggtctcctcaaccagtattcagcggtggggacgccagcggactgggacgcaggcggttgtcttttcaagccgagtactgggcgtgtgtccttcccgacagtttacctccatcccccgataggcacagccccctttggaaccccaacaaagaatacgaggacctactggattacacttacccacttcggcctggccctcagctgcctaaacacttggatagcagggtgccggcagaccccgtcctgcaagactccggcgtggatctggatagtttttcagtctccccggctagtaccttgaaatcacctacgaacgtatcccccaactgtccacccgctgaggcgaccgcgctgccgtttagcggcccaagagagccctctctaaagcaatggccatcacgggttccccaaaagcaggggggaatgggacttgcgtcctggagccaactggcgtcaacaccgcgagccccagggagtcgcgacgcacggtgggagaggagggagcccgcacttcgcggagccaaggatcggctgacgattggcaagcatctcgatatgggctcaccgcagctccggacaagagatagaggttggccatcccctcggcctgaaagggagaaacgcacaagtcagtctgccagacgtcccacctgcacagaatccaggtggaaatcagaggaagaagttgagtcggatgacgagtacctcgctcttccagctcggctaactcaagtttcctctctggttagctatctaggaagtattagtacactcgttacactcccgaccggagatatcaaaggacagtcgccccttgaggtgtccgattccgatggaccagcttcatttcccagttcaagctctcagtcacagcttcccccaggcgctgcactgcagggaagtggggacccagagggccagaacccttgcttcctaagatccttcgttcgggcacatgacagtgccggtgaggggtctctcggatcgtcgcaggcactgggggtgtcctcaggactgttaaaaaccaggcctagcttgccagcccgtctcgatcgctggccattttcagacccagacgtggagggacagctaccaagaaaagggggtgagcagggaaaggagagccttgtccagtgtgtgaagacgttttgttgtcaacttgaggaactgatctgttggctctacaatgtagcggacgtcaccgatcacggaaccgcagctagatcgaatctgactagtttaaagtcctccttgcagctgtatcggcagttcaagaaggacattgacgagcaccaaagcctcaccgaatccgttctgcaaaagggcgagattctgttacagtgccttctggagaatactccagtgctggaagatgtcctaggtcgcatcgccaagcagagcggggaactggaaagccacgctgatagactatacgacagtattcttgcctcactggacatgcttgctgggtgcacacttatcccagataagaaaccaatggccgcaatggaacacccctgcgagggcgtctag

SEQ ID NO: 29114 - DNA, 540 bp, synthetic construct
  source 1..540: mol_type = other DNA; note = Synthetic coding sequence
atgaatcccagcatgaagcagaagcaggaagagattaaggaaaacatcaagaatagttccgtacccagacgtacccttaaaatgatccagccatctgcttccggatctctggttgggagggagaacgagttaagtgccggtctgagcaaaagaaagcatagaaacgatcacttgaccagcacaacttcttcccccggagtgatagtgccagagtccagcgaaaacaaaaatctggggggagtgacacaggaatcattcgacctgatgataaaagaaaacccttctagtcagtactggaaggaggtggccgagaagcgcaggaaggcattatatgaagctttgaaggagaatgagaagctccacaaagaaatagaacaaaaagataatgaaattgcaagactcaagaaagaaaacaaggaactggccgaggtggcagaacatgtgcaatacatggccgaactgattgaacgattaaacggtgagccactcgataactttgagtcactggacaaccaggagttcgattccgaagaggagtag

SEQ ID NO: 29115 - DNA, 309 bp, synthetic construct
  source 1..309: mol_type = other DNA; note = Synthetic coding sequence
atgaacccctccatgaaacagaagcaggaagaaattaaggaaaacatcaagaactcttcagttcctagacggacactcaaaatgattcaacccagtgcatccggatcactcgtgggtcgggagaacgagttgtcagccggactctctaagcgtaagcacagaaatgaccacctgacttctaccactagctcaccaggcgtcatcgtccctgaatccagcgagaataagaacttgggcggagttactcaggagagtttcgaccttatgatcaaagagaatccttcatcccagtactggaaagaagtatag

SEQ ID NO: 29116 - DNA, 2259 bp, synthetic construct
  source 1..2259: mol_type = other DNA; note = Synthetic coding sequence
atggctgagcccgcttccgtaacggttactttcgatgatgttgccttatattttagtgagcaggaatgggaaatcctggagaaatggcagaaacagatgtataagcaggagatgaaaacaaactatgagaccctggactccctgggctacgctttctccaaaccggacctgattacttggatggaacaggggcgaatgttgcttatctccgagcagggctgtctggataaaacaaggcggaccacatctccccctacagacgaacagctcaacatgaagaacacaggaaagttgctgtgcttcgatgatgagggtacccctagaaccaaagaggaagactgtcggctaaatggtccacagaagcaagacctgtgtgctgcccttcgaggtaaggaacggaaaatcttgctcgcacaaactgcgacgttccagagcccctctctgcgcgaaactgagattctgaataagaaggtgagcatcacagcctacgaccctgataagaaggatctgcgccataagcctagagaaaccccgggaagactggaaattccaacaggccctagatgctacagttgttatgtctgccgcaaggtgttccaggtgcgcagggatcttctaaagcacaagcgttctcactcgaaatcccagctttgtcggtaccccaaatataagaacagttccaggggaaagagcgaactgcgacgcacacagcgtctgttgtgccaaaagaagcgcttccagtgcagtgagtgcgagaagtcctacttcctcaaaggtagtctcgtgacgcaccaagtcgtacatacaggacagcggccttatccatgtcctgagtgcgacaagactttccgctaccgagctaatttaaaaaaacacctgtgtcttcaccgcggagagcgtcccttttgctgtggagaatgtggacgggcatttgttcagcaatgtgagctcacggaacaccttcgattgcactcaggggaaaagccattccagtgccctcaatgtgatagatgtttcaggctgaagaggggtatgaaagtccacctgactcaacattccggcaaacggccttttcactgtcccgagtgtgggcgttcttttagcagaaaggcagcactgaagacccatcagcgaacccacagcgaagagaagcccttcagctgcggagagtgtggtcggaagtttatatacaaaatcaagctggacgaacacattcgggtgcatacaggtgaaaagcccttctcctgccccgagtgcaacaagagcttccgtctgaaacgctcattaaaagctcatggactccagcacatcggcaagcggccatttcagtgtcctgagtgttctaggggctttttttggcgtaacgctatgcgcgcacaccagagattgcattcggaacagaagcccttcccgtgcgccgagtgcggtaaaagattcacaagacccagcaagttggcttgtcacacccgcgtacacgatcgccagaaggaatttccttgtggggaatgtaagaaaacattctcacaacaaagtcgcctgacacagcatctcaaggtgcacacaaccgagaagccatttagctgtgctgagtgcggcagaagtttccgcagacgcgcacatctgacagagcacacaagactccacagtggcgaagagccctttcagtgtcccgaatgtgacaaaagctttagctggaaagcgtctatgaagttccaccagaggatgcatcgagatgaaaagcccttcgcctgcggcgaatgcgataaaacgtacacacatcaatcacagctgactgagcatctgcggttacacagcggcgagaagccgtatcaatgtcccgagtgtgagaaaaccttccgattaaagggtaacctaaaatcccatctcctgcaacactctggccagaagcctttcagttgcgtgatgtgtgggaagtcattcacccaacaatatcgcctgacagagcatatccgcgtgcattccggtgagaaacctttccagtgtcctgaatgtgataaaagctactgtatccgagggagtctcaaggtccatctgtacaagcacagcggcgagcgcccatttcagtgccccgaatgtgggaagggatttttacaaaaacggagcttgaaagcccacctctgtctgcacagcggggaaagacccttcagttgcgatgaatgtggcagatcttttacatatgtaggcgctctcaaaacccacattgccgtgcacgcaaaggaaaagcccagtagtctatag

SEQ ID NO: 29117 - DNA, 1935 bp, synthetic construct
  source 1..1935: mol_type = other DNA; note = Synthetic coding sequence
atgttcctaacttacatggagacagtgactaaagagttggtcagctggatgcgaggccacgagtcctctgtattcagcatttccgtccacgcctcaggaaagtatgccataactacttcctcagataccgcccagctctgggacctcgataccttccagcggaaacgaaagcttaacatccggcaaagtgtgggaattcaaaaggtcttcttcttgcccctaagtaatacgatcctgagttgcttcaaagacaactcaattttcgcctgggaatgcgacacactgttttgcaagtatcaattacctgccccacccgaatcaagctccatcctctacaaggtgtttgcagtgactcgtgacggacggattctcgctgcaggtggaaagagcaaccacctacacctgtggtgtctggaggctcgtcagctgttcaggatcattcagatgccaacaaaggtgcgggctatcaggcacctcgaattcctgcctgactcatttgacgctgggtccaatcaggttctgggcgtgctttcacaggacgggataatgcgcttcattaacatgcagacctgcaagttactgtttgagattgggagcctcgatgagggtatatctagctccgcaatttccccgcacgggagatacatagctagtattatggagaacggtagtctgaacatttatagcgttcaggcgctgactcaagaaataaataaaccacctcccccactggtgaaggtaattgaggaccttccgaagaacaagctgtcttcatcagaccttaaaatgaaagtaactagcggcagagtgcagcagccagccaagtcccgagagagtaaaatgcagacaagaattttgaagcaggacttgaccggggacttcgagtcaaagaaaaatgaactccccgacggtctgaataaaaagagactccagatcttgctgaaaggatacggcgagtatccaaccaaataccggatgtttatctggcggtccctcctccagttacctgagaaccacaccgctttctcaacacttatcgacaagggcacccacgtggcattcctgaatctacagaagaagtatcctattaaaagcagaaagctgctgcgcgtgctgcagagaacactcagtgctctagcccactggtcagttattttcagcgataccccctatctgcctctactggcgttcccttttgttaagcttttccagaacaatcagctaatctgcttcgaggtgatcgctacactgatcatcaactggtgccagcattggttcgaatattttcctaacccacctatcaatatcctgagtatgatcgagaatgtgttggccttccatgacaaggagctgctccagcacttcattgaccacgacataacatcccagctctacgcctggcctctcctggagactgtgttcagcgaagtgcttacaagagaggaatggctgaagctgttcgataacatcttctccaatcacccctcctttcttctgatgaccgtggttgcttataacatctgttctcggacccccctcctgagttgcaacctaaaggacgactttgaatttttctttcaccatcgtaacaacctggatatcaacgtagtgattcgacaggtctatcacctgatggaaacaacaccaactgatatccatccagacagtatgctcaatgtatttgtcgccctaaccaaaggccagtacccagtcttcaatcagtatccaaaatttatagttgattaccaaacacaggaaagagagcgtatccgtaacgatgagctcgattatctgagggaaaggcaactaaagatttgtaaactcaaatctaccagcaaggagctgaaaatgaaattaggcacacgaaaccgctcttgcttcgtcaaattgaagaagcaggaggagaaatgtagttacaagaggcgccgaaagtag

SEQ ID NO: 29118 - DNA, 735 bp, synthetic construct
  source 1..735: mol_type = other DNA; note = Synthetic coding sequence
atgccgcacaaaataggttttgtcgtggtgtcgtcctctggtcatgaagacgggttctcagccagggagcttatgatccatgcccctaccgtgagtggatggaggagcccaagattctgtcaattccctcaggaaattgtgttgcagatggtagaacgttgtcgcattcgcaaactccaacttctcgctcatcaatatatgattagctccaagattgagttctacatttcagaatcgttgccagaatacttcgcaccttaccaagccgaacggttcaggaggctgggttatgttagcctctgtgacaatgagaaaaccggatgtaaggcgcgagaactgaagagcgtgtacgtcgacgcagtcggccagtttctgaagctgatttttcaccagaatcacgtgaacaagtataatatttataaccaggtggcacttgttgcaataaacattatcggagaccccgcagattttagcgacgagtcaaacaccgcatctagggaaaagctcatcgatcattaccttggccacaatagcgaagaccccgctttggaaggcacctatgcgagcagcgtccggactggtggcgagtctaccttcggggaactgaaggggcctgccgttccatcatccgtgacactgagcgtgctgggaacatcgctcggccagtggttcccgtgtcacctccctgctgtggacgataatgagggtacaccattccagagatgtctcgtgtag

SEQ ID NO: 29119 - DNA, 2778 bp, synthetic construct
  source 1..2778: mol_type = other DNA; note = Synthetic coding sequence
atgccccataaaatcggttttgttgtggttagcagctccgggcatgaggacgggttcagtgcgagggagcttatgattcatgctccgactgtgtcgggctggcgctcgcctaggttctgccaatttccccaagagatcgtactgcaaatggttgagcgatgtcggataagaaagttgcagctcctggcacaccagtacatgatctcttctaagattgagttttacattagtgaaagcctgcccgaatacttcgcaccttaccaagctgaaaggtttcgacgactcggatatgtgtcactgtgtgacaatgaaaagactggctgtaaggccagggaactgaagagcgtatatgttgacgctgtggggcagttcctgaagctgatctttcatcagaaccacgtgaacaagtataatatttataatcaagtcgcccttgtggccataaacataatcggcgatccagccgacttcagcgacgagtccaacactgcgtcgcgggagaaattgattgatcactatttaggccacaattctgaggaccctgccttagaggggacctacgcaagaaaaagtgactacatcagtccccttgacgatcttgctttcgacatgtaccaagaccctgaggtagctcagatcattcggaagcttgatgagcgaaaaagggaggccgttcaaaaagagcggtatgattatgccaaaaagctgaagcaggcaatcgctgatctccaaaaagtcggagaaaggctgggcagatatgaagtcgagaagaggtgcgctgtggagaaggaggactacgacctggccaaggagaaaaagcaacagatggaacagtatcgagccgaggtgtacgagcagttggagttacactccttgctggatgctgaacttatgcgacggccattcgatcttcctctacagcccctggccagatctggctcaccttgccatcagaagccaatgccctctctaccccagctagaagaacgcggtacagaaaaccagtttgcggaaccctttctacaagaaaagcctagtagctattctctaaccatttccccccagcatagcgcggtggatccacttctgcccgcaaccgatccgcacccaaagatcaatgccgagagtcttccctacgatgagcgccctttgccggctataagaaagcactacggggaggccgttgtggagccagaaatgagcaatgccgacatttcggacgccaggcgcggagggatgcttggtgaacctgagcctttaacagagaaggcactcagggaagcttcatcggccatcgatgtcctgggcgagacacttgtagccgaggcttattgcaaaacttggagctatcgggaggatgcactcctggcactaagtaagaaacttatggagatgcccgtgggcactcccaaagaagatctgaaaaacacactgcgagcttccgtctttctcgtgcgcagggcaataaaggatattgtgacctcagtgttccaggcttcactcaaactcctgaaaatgattattactcaatacatcccaaaacataaactcagtaagctggaaaccgcacactgtgttgaaagaacaatccctgtgttgctgacaaggacaggagactcaagcgctcgacttagggtaaccgcagctaattttattcaggagatggctctgttcaaggaagtcaagtctttgcagatcattccttcatacctcgtgcaaccactaaaagccaattccagcgtgcacttggcgatgtcacagatgggactgttagctcgcctactgaaagaccttggaacgggtagcagcggcttcaccattgataacgttatgaaattttcagtttccgctctagagcatcgcgtgtatgaggtgagagagacagccgtgcgcattatactcgacatgtatcgccagcaccaagcctctattctcgagtatttgccccctgacgacagcaacactcgaaggaacatcctttataaaacgatctttgaaggctttgccaagatcgacggccgtgccacggacgccgaaatgcgcgctagaaggaaagccgcaacagaggaggctgaaaaacaaaaaaaggaggagatcaaggccctccaggggcaactggccgctctcaaggaaatccaggccgaagtacaagagaaggaatccgacgccgtaaagcctaagaatcaggacattcaaggcggtaaggccgctcccgctgaggctctgggcatcccagatgagcactacctggataatctgtgcatattctgtggtgagcgatctgaatcctttactgaagaaggactggacctgcattattggaagcactgtcttatgctcactaggtgcgatcactgcaaacaggtggtcgagatctcctccttaaccgagcacctgctgacggagtgcgacaagaaagacggatttgggaagtgttataggtgcagtgaagccgtctttaaggaagagctgccacggcatattaagcataaagactgcaatccagcaaaacccgagaaattggcgaaccggtgtcctctttgtcatgagaatttctctcccggtgaagaggcatggaaggcccacctgatggggcctgcaggttgtacgatgaatctcagaaagacccacattctgcagaaggctcccgctttgcagccaggaaaatctagcgctgtggcagcaagcggccctctaggcagtaaggcaggaagcaagatacccactcctaaggggggactgtccaaatcctcatccaggacttacgccaagcggtag

SEQ ID NO: 29120 - DNA, 2145 bp, synthetic construct
  source 1..2145: mol_type = other DNA; note = Synthetic coding sequence
atggcaagagcgggttcatgtgggggagctgccgctggcgctggcagacctgagccttgggagctcagcctcgaggaggttttaaaggcctatgaacagccactgaacgaggaacaagcttgggccgtttgcttccagggatgtcggggactgcgcggttcccccggacgtaggctgcgcgataccggggacctgctactgagaggggatggatctgtgggcgcaagagagccagaagcagccgaacctgccaccatggttgtgccactcgcctcatccgaagctcagacagtacagagcctgggatttgcaatctaccgagctcttgattggggcctggacgagagtgaggagcgcgagctttctccgcagctagaacggctcatagatctgatggccaataatgactccgaggattcaggctgtggagccgcagatgaggggtacggtggcccagaagaggaagaagaagcagagggtgttcccagaagcgtgaggacatttgcccaggctatgagactgtgtgccgctagactcaccgacccacgtggtgcgcaggctcattaccaggcagtgtgtcgggctctgttcgttgaaacactagagcttcgcgcatttctggctagagttagagaagccaaggagatgctgcagaaactgagagaggacgaacctcacctggaaaccccaagggcagagcttgacagcctggggcataccgattgggcccgactctgggtccagctgatgagagaactgagaagaggtgtcaaactgaagaaggtgcaggagcaagaatttaaccctctgccgacagagtttcaattgacgcccttcgaaatgctaatgcaggacatccgcgctaggaattacaagttgagaaaggtaatggtggatggcgacattcctcctcgggtgaagaaagatgcgcacgaacttatcctggatttcatccggagtcgcccaccattgaagcaggtttccgagaggcgcttgcgtccactcccgcctaagcaaaggagcctgcacgagaagatccttgaggagatcaagcaagagaggagattgcgcccagtccgcggagagggctgggccgctcgtgggtttggcagcttaccatgcattctcaatgcttgttcaggggacgctaaaagcacttcttgtatcaatcttagtgtcacagatgctgggggatccgcacagcgacccaggccaagagtccttttgaaggcccctaccctggctgagatggaggaaatgaatacatccgaggaggaagaatcaccatgtggagaggtcactttgaaaagggacagaagcttctcagaacatgacctggctcagctcagaagcgaagtggctagcggactacagtctgccacgcatcctccaggcggaacagaaccacccagacccagagccggttccgcacatgtctggcggcctgggagtagagaccagggcacctgccccgcttctgtctcagacccttcacaccccctgctgtccaatagggggtcatctggggaccgacctgaggcatcgatgaccccagacgcaaaacatttgtggcttgaattcagccatcccgttgagagcctggcccttacggtcgaggaggttatggatgttcgtagggtgctcgttaaggccgaaatggagaagtttctgcagaacaaagaactgttcagcagcctgaagaagggtaaaatctgctgttgttgccgggcaaagtttccgttattttcatggcctcccagctgccttttttgtaagcgtgctgtctgcacatcctgttcaataaagatgaagatgccatccaagaagtttggacacatccccgtttacacgctgggctttgaatcaccccagcgagtttccgccgcaaagacagccccaatccagaggagagacatttttcagtcattacaaggccctcagtggcaatctgtagaggaggcttttccacatatttattcacatggatgtgttctcaaagatgtttgcagtgaatgcacgtcatttgtggccgacgtggtacgctctagccgtaagagcgtggacgtgctcaatacaacaccccgacggtcccgccaaacccaaagcttgtacatccccaataccaggactctggattttaagtag

SEQ ID NO: 29121 - DNA, 1308 bp, synthetic construct
  source 1..1308: mol_type = other DNA; note = Synthetic coding sequence
atgaatttttcagaagtattcaagttgagttccctcctttgcaaattctcccccgatggtaaatatttagcctcttgcgtgcagtataggctagtcgtccgcgacgtcaataccctccagattctccagttgtacacctgcctggaccagatccaacacatagagtggtccgccgactccctgttcatcctctgtgcgatgtacaaaagagggctggtccaggtgtggtcccttgagcagcccgagtggcattgcaaaatcgacgagggctccgccggacttgtggcctcctgctggagtcctgatgggcgacacatccttaacaccaccgagtttcatcttcgcattaccgtatggagcctgtgtacgaaaagcgtgtcctatattaagtacccgaaggcctgccttcagggtatcacctttacaagggacgggagatatatggcactggccgagcggagagactgtaaagattacgtgtctattttcgtgtgcagtgactggcagctcctgagacatttcgacacagacacacaggatctcactggtatcgagtgggcccctaatggttgtgtgcttgctgtatgggacacttgcctggagtacaaaatactcctttactccctagatggcagactgctgagcacatatagtgcctatgagtggtcccttggaattaaaagcgtggcatggagccccagctcacagtttttagcggttggcagctatgatggtaaagttcgaatactgaatcatgtaacgtggaagatgatcacagaattcggccaccctgccgctataaatgatcctaaaattgtggtttacaaggaggctgagaagtctcctcaactgggactgggatgcctgtccttccccccacctcgtgccggagccggacccttgccaagttctgagagcaaatacgagattgcttctgtgcccgtgagtctgcaaacacttaaaccggttacagatcgcgcaaatcccaaaattggcattggaatgctggccttctcacccgactcctattttcttgctactcggaacgacaacataccgaatgccgtgtgggtttgggatatccagaaattacggcttttcgctgtgctggagcagctaagccccgtgcgggcattccagtgggatcctcagcaaccgagacttgcaatctgcactgggggatcaaggctgtacctgtggtctccagctggatgtatgtctgttcaggttccaggggaaggcaaacacattccagaagctacggatgtcgccgctctcctgtgcgcagtgtggcatcacactgggtag

SEQ ID NO: 29122 - DNA, 819 bp, synthetic construct
  source 1..819: mol_type = other DNA; note = Synthetic coding sequence
atgctccagttgcgcgactcggttgacagcgcaggaacaagccctacagccgtactggctgcaggcgaggaggttggcgcaggaggtgggcctgggggtgggcgtcccggagcaggaactcctctccgacaaaccctgtggcccttaagtatccatgatcccacgcggagggcaagggtgaaggagtatttcgtgtttaggccaggcagcattgagcaggccgtggaagagatccgtgttgtggtacggccagtagaggatggtgagatacagggtgtgtggctactgacagaggtcgaccattggaataacgaaaaggagagactggttctcgtgacagaacagtctctgctgatttgcaaatacgactttattagcctccaatgccagcaggtcgttcgaatcgcccttaacgcagtcgataccatttcatatggtgaatttcaattcccgcctaagtcattaaacaagagggagggcttcggaatccggattcagtgggacaagcagtccagaccgagcttcatcaaccgttggaacccttggagcacaaatgttccttacgcaacgtttacagagcacccaatggctggggcagatgagaaaaccgcctctctgtgccagctggaatccttcaaagcccttctcatacaagcggttaagaaagctcagaaagaatcccctctaccgggtcaggctaacggggtgctcattctcgagcgcccactcctaattgaaacctatgttggattgatgtcgttcattaataacgaggcaaagctgggctactccatgacacgtggcaagatcggattctag

SEQ ID NO: 29123 - DNA, 870 bp, synthetic construct
  source 1..870: mol_type = other DNA; note = Synthetic coding sequence
atgtggccgtttccctctaggagtctttttccccctcctactcaggcttggttgcagactgtctcttcagacccagaggcccagggctggggcgcatggaatgagaccaaggagattttagggcctgaaggaggtgaaggcaaagaggaaaaagaggaggaggaagatgccgaggaagatcaggacggtgacgccggattcctactatctctgctggaacaggaaaatctggccgagtgtcccctgcctgatcaagagctggaggctatcaagatgaaagtgtgtgccatggagcaggcagaggggacacccaggccccctggtgtgcagcagcaagccgaagaggaggaagggacagccgcagggcagctgctaagcccagaaaccgtcgggtgtccactgtctggcactcccgaagagaaggtggaggcagatcatcgctcagtgtacgtgggcaatgtggactacggcggttcggcagaagagctggaagctcacttttcacggtgtggcgaagtgcatagagttacaatcctgtgtgacaagttcagtggccaccccaaagggtatgcctatatagaatttgctactaagggatcagtacaggctgctgtcgagctggatcagtccctgttcagaggaagagtcatcaaggtgcttcctaagcgaaccaatttcccaggaatcagctctacagaccgcggtggcctgagaggccaccctggaagtagaggcgcacctttcccccactccggactgcagggcaggcccaggctacgcccacaggggcagaataggactccggctgccttgacgccactctgggcaaggccgctgccctgggtggtggtgagccacgtcatcaagtag

SEQ ID NO: 29124 - DNA, 1266 bp, synthetic construct
  source 1..1266: mol_type = other DNA; note = Synthetic coding sequence
atgtttgagattcttactagcgagttcagctaccagcacagtttaagtattctggttgaggaattcctgcagagtaaggaactgcgagccaccgtaacccagatggagcaccaccacctattcagcaatattcttgatgttctgggcgcatcccaaagatttttcgaagacctggagcagagacacaaggcccaggtgttggtggaggacatttctgacatactggaagagcacgccgagaaacatttccatccttatatcgcttattgtagcaatgaagtataccaacagcgcaccctgcagaagctgattagttctaatgcagctttcagggaggctttgcgggagatcgagcgtcggcctgcttgcggcggactgccgatgctatccttccttattttacccatgcaacgcgtaacgagactgccactcctgatggacaccttgtgtctgaaaacgcagggccattctgaaaggtataaggccgcatccagagcactgaaggccatatccaagctcgttcgccagtgtaatgaaggggcacaccgaatggaacgtatggaacaaatgtacactctgcatactcagctcgacttctccaaagtcaagagcttgccactaatatcggcctccagatggctgctgaagcggggagaattatttttggtggaggaaaccgggctgtttcgcaagattgctagccgacctacttgttacctgtttttgttcaatgacgtgctggttgttaccaaaaagaagagtgaggaatcatacatggttcaggactacgctcagatgaaccacatccaggtggagaagattgaacctagtgagctgccacttcccggagggggaaaccggtccagtagcgttccccatcccttccaagtaacactgctcaggaatagcgaaggcagacaagaacaactcctgttgtcttcggactctgcctctgacagggccagatggatagtagctctgacccatagcgaaagacagtggcagggtctttcgagtaagggggacttaccacaagtggaaatcaccaaggcctttttcgctaaacaggccgacgaggtgacgctccaacaagcggatgtcgtgctggttctccagcaagaagacggatggctttacggcgaaagactaagggatggggagaccggatggtttcctgaggattttgcgaggtttattacctcaagggtggcagtggaaggcaatgttagaaggatggagcgattacgcgttgaaaccgacgtgtag

SEQ ID NO: 29125 - DNA, 1266 bp, synthetic construct
  source 1..1266: mol_type = other DNA; note = Synthetic coding sequence
atgtttgagatcctgactagtgagttctcttaccagcactccctgagcatccttgtggaagaatttctgcaatctaaagagctcagagccacagtcacccaaatggagcatcatcatctgtttagcaacatcttggatgtgctgggggcatcacagcgatttttcgaggacctcgagcagcggcataaggctcaggtccttgtagaggacatttccgatattcttgaggaacacgccgaaaagcatttccacccttatatcgcttattgcagtaacgaagtttaccagcagcgcaccctccagaaactgatatcatctaacgcagcttttcgagaagctctccgagagatcgaaagaagacctgcgtgcggcggacttccaatgctctccttcctgatcctcccaatgcagcgggtcactaggctcccacttttgatggacacactctgtttgaaaacgcaggggcactccgaaaggtataaggccgcatcaagggctctcaaagcgatctcaaagctggtgagacagtgcaacgagggtgcacaccgcatggagcgcatggagcaaatgtacaccctccatacacaactggacttcagtaaggtgaagagtttgccactgatctctgctagccgctggttgctcaaaagaggggagcttttcctggtcgaagagaccgggctgtttcgtaaaattgcctccaggcctacctgctatcttttccttttcaacgacgttcttgtggtcaccaagaagaagagcgaagagtcatatatggttcaagactatgcgcaaatgaaccacatccaggtggagaagattgaaccaagcgagttgcccctgcctggcggtgggaacaggagcagctcagtgccgcacccatttcaagtaaccctcctgcgcaactcagaaggaagacaggagcagctgctgctttctagtgattccgcttctgatcgcgcacgctggatcgtggcgctgacccactctgaaagacaatggcagggattgtcatcgaagggggacctgcctcaggtggagattaccaaggcgtttttcgccaagcaggccgacgaggtaaccttgcaacaggccgatgtcgtgctggtactgcagcaagaagatgggtggctttacggcgaaagactgagggacggagaaacgggatggttcccagaagacttcgcgagatttatcacttcacgggtcgccgtagagggtaacgtccgccgaatggaaaggctccgcgttgaaacagacgtgtag

SEQ ID NO: 29126 - DNA, 2130 bp, synthetic construct
  source 1..2130: mol_type = other DNA; note = Synthetic coding sequence
atggctcagagacattccgatagtagcctggaagagaaacttctgggccacaggttccacagtgaactgagacttgatgccggaggaaaccccgctagtggactcccaatggttaggggctctcccagagtacgggatgatgcggctttccagccacaggtgcctgctcctcctcagcctcgacctcctgggcacgaggaaccgtggccaatagtcttgtccaccgaatccccagcagccctcaagctgggcacccaacagctcattcccaagtctctagctgtggcttctaaggccaagactcccgcacgccatcagtcatttggcgcagcggtcctttcgagggaagcagctcgacgcgaccccaaactactcccagccccttcgttttcactggacgacatggatgtggacaaagatcctggtggcatgctcagaaggaacttgaggaaccagagttacagagctgcgatgaaaggattaggtaagccagggggtcagggcgacgcgatacaactatcacccaaactgcaggcattagcagaggagccgtcccaaccccacactcggagccccgctaaaaataaaaagacactaggaaggaaacggggtcacaaggggtcgttcaaagacgacccccagctctaccaagagattcaagaacgaggcttgaataccagccaggagtctgatgatgacatcctcgacgaatcttcaagcccagaagggacacagaaagtggatgccacgattgtggtgaagtcctaccgcccagcccaggtgacctggtcgcagctacctgaagtggtcgagctaggtatcctggaccagctgagtactgaggaaaggaagcgacaggaggctatgttcgaaattctcacatctgagttctcatatcagcactccctgagcattttggtggaagaattcctacaaagcaaagagctccgcgctactgtaacacaaatggaacatcatcacctcttttcaaacatcttggacgttctgggggcatcccagagattctttgaggatttagaacaacgtcacaaggcccaggtgctggtggaggatattagcgatatactagaggagcacgctgagaagcacttccacccatacattgcgtactgctccaacgaagtgtaccagcagagaacgctccagaaacttataagcagcaatgccgcattcagggaagctctgcgggaaatcgagcggcgaccagcctgcggtgggttgccgatgttgtcttttctcattctgcccatgcagcgtgtgacaagattgcccttgctaatggatacactgtgcctgaaaacacagggccattctgagcgctacaaggctgcctctagggcactaaaagcaattagtaagctggttcgccagtgcaatgaaggggcacatcgcatggagcgcatggagcaaatgtacacccttcatacgcaactggacttctccaaggtgaaatccctcccactgataagcgccagcaggtggctccttaaacgaggagagctctttctggtggaagagacaggattgttcagaaagattgcgtcgcgccctacctgttatctgttcctcttcaatgatgttctcgtggtaactaagaagaaaagtgaagagagctatatggtgcaggactacgcacagatgaatcacatacaagtcgagaaaatagaaccttcagagctgccgctgcccggaggtggcaatcgctcctcaagtgttcctcatccatttcaggtgacactgttgcggaacagcgaggggcgacaagagcagttgctgttgagcagcgattctgcctctgaccgcgctcgatggatagtggctttgacccacagcgagagacagtggcaggggctctccagtaagggggatctgccacaggtcgagatcacaaaggcctttttcgctaagcaggctgacgaggtgactctgcagcaggcagacgtagtgctcgttctgcagcaggaggacgggtggttatacggggagcggttgcgcgacggagagaccggatggtttcctgaggattttgcccgattcatcacatccagggtcgccgttgagggaaatgtgagaagaatggaacgcttgagggtggaaaccgatgtttag

SEQ ID NO: 29127 - DNA, 1287 bp, synthetic construct
  source 1..1287: mol_type = other DNA; note = Synthetic coding sequence
atggtgtggcaggtattggagggattgagccaggacagtgctaaacgactccgatttgttgcgggtgtgatttttgtggacgagggagcggcttgcggacagtctttagaggaacgcagtaagacactcgccgaagtaaagcccattctgcaggccactggttttccctggcacgtcgtggcactggaagaagttttctctttgccgccatcagtgctctggtgctccgcccaagagctcgttggcagcgaaggcgcttacaaggctgccgtcgactcattcctgcagcagcaacatgtgctaggagctggcggaggccctggtccaactcagggagaagagcaacccccacaacctcctttggacccacagaatcttgctcggcctcctgccccagcgcagacagaggctttgtctcagctgttctgttcagttcggactctgactgcaaaggaagagctgctgcagactctgcgtacccacctgattctccacatggccagagcccatggctattccaaggtgatgaccggcgactcctgcactcgactagcaattaaactaatgactaacctggccttaggccgtggtgcgtttctcgcgtgggacaccgggttctctgatgagaggcatggggacgttgtggtggtcagacctatgagagaccataccctcaaggaagtggctttttataataggttatttagtgtaccatccgtgttcacacctgctgtcgacacaaaagcccctgagaaggcctccattcaccgcctcatggaggcatttattctgaggctgcaaacgcagttcccgtccacagttagcactgtctaccgcacgtctgagaagctggtcaaagggccacgggatggaccggcagccggagactcgggcccaagatgcttgttatgcatgtgtgcactggacgttgacgctgcagatagcgctacagctttcggtgctcagacctccagtaggctgtcccaaatgcagtcaccaattccacttaccgaaaccaggaccccgcctggcccatgctgcagccctggagtggggtgggctcaaaggtgcggtcagggcgcttgtagacgggaagacccacaggcatgcatcgaagagcagctctgctatagctgtcgggtaaatatgaaagatctgccatcattagatcctttaccaccctacatcctcgcagaggcacagttacgtacccagcgggcatggggactgcaggagattagggattgtctgatcgaagactccgacgacgaagcagggcagtcttag

SEQ ID NO: 29128 - DNA, 417 bp, synthetic construct
  source 1..417: mol_type = other DNA; note = Synthetic coding sequence
atgggagagcaagcagatggcaaggactctattgctagacaagtcgccccagagtcgcactggcccgaactccgcgtccttatcctagtggtgagcgcagaaaagaagctgactggatcaactgtcggaatgagagccagtgtggagacctctcccctcctgcgcttccgcgctgagagcgtggtccccgcacacggcggtgacggacccctacaccccggtgccaggttgccccagctccgacccgcagatcatgagggacagcagcccgtcccccgacacttaccaagacacttgcctccttcactgacttccatgccttcgcctggagcctcctcaacgtggtgtacagcgagtactcctactactggcacgccccgttggcgcacacctctaactagggctccaatgccctag

SEQ ID NO: 29129 - DNA, 597 bp, synthetic construct
  source 1..597: mol_type = other DNA; note = Synthetic coding sequence
atgagtaccgttgatttagcccgtgttggtgcatgtatcctcaagcacgccgtgacaggcgaggccgtggagttacgctcgctttggcgggaacatgcgtgtgtggtggctggactgaggaggttcggatgtgtggtttgtagatggatcgcacaggacctctccagcctcgcaggtctgctggaccagcacggagtgcgcctcgtgggggttggccctgaggccctagggttgcaggaattcctggatggagactattttgccggtgaactctacctggacgagagcaaacagttatataaagaattagggtttaaacggtataatagcctgtcaatcctgccggctgcactcggtaaacctgttcgggatgtcgctgctaaagccaaggcggtgggaatccagggtaacctgtctggcgacctgcttcaatctgggggtctgctcgtggtgagcaaaggaggtgacaaggttctactccactttgtccagaagagccccggagattacgtccccaaagaacatatactgcaggtgctgggtattagcgccgaggtctgtgcaagcgaccccccacaatgtgatcgggaagtttag

SEQ ID NO: 29130 - DNA, 642 bp, synthetic construct
  source 1..642: mol_type = other DNA; note = Synthetic coding sequence
tagtctcgtgaaagaggctctcgcagtgaagaaccaggcgcaggaaaccgcgaatccggcagccgtgaacctgggctggctgcggctgcaatgtctacagtcgacttggcgagagtaggggcatgcatcctgaaacatgctgttactggggaagcagtcgaacttagatccttgtggcgggagcatgcttgcgtggtggcagggctgaggcgtttcggctgcgtcgtctgtcggtggatcgcccaggatctgagttctctggctggattactggaccagcatggagttcggctggttggcgtaggaccggaggccttgggtcttcaggagttcctggatggcgattactttgcaggggagctctatctggacgagagtaagcagctgtacaaagagttaggatttaagcgttataacagcttatccatcctccccgcagccctgggcaagcctgtaagggacgtcgccgcaaaagcaaaggccgtggggattcagggaaatttatccggcgatctactgcaatctggaggtctgcttgtcgtttccaaggaggtgccaagacgcctgagaccccaaggcgcacacccagccggtccaggacatctgtgcgggggactgtgtcagagacctgcctcagtgtag

SEQ ID NO: 29131 - DNA, 2553 bp, synthetic construct
  source 1..2553: mol_type = other DNA; note = Synthetic coding sequence
atggcagaagtcgaagccgttcagcttaaagaggagggaaacaggcactttcagctgcaggactacaaggctgctaccaattcgtattctcaggcactcaaactcactaaggataaggccttgttggctaccctgtatcgtaatagggccgcttgcggcctcaaaacagaatcttatgtacaggccgcttcagacgccagtcgcgcaatcgatataaattcttcagatattaaggccctctacaggcgttgtcaggcactggaacacctgggcaagcttgaccaggcatttaaggatgtgcaaaggtgcgccactctcgagccaagaaatcaaaatttccaagagatgctgcgcaggttgaacacctccatccaggagaaactccgcgtccagttcagtacagactctagggtgcaaaaaatgtttgagattttactggatgagaatagcgaagcggacaaaagagaaaaggccgcaaacaatctgatcgtactgggtcgtgaggaagcaggcgcagagaagatctttcagaacaacggagtggccttacttctccagctgctggacacaaaaaaacccgaattggtcttggcagccgtgcggacgttatctggaatgtgcagtggacatcaggcaagggcgactgtgattctgcatgccgttcgaattgaccggatctgctcactgatggccgtggaaaacgaagaaatgagtttggcagtgtgcaatcttcttcaggccataattgactcgctttcaggcgaggacaagagggaacaccgcggaaaggaggaagctctcgttctcgacaccaagaaggatttaaagcagattactagtcacctgttagatatgctcgttagcaaaaaagtgtctggacagggcagagaccaggccctgaatctgcttaataagaatgtccctcgaaaggaccttgccattcatgataatagcaggaccatttacgtggttgataatggcttaaggaagatcctaaaggtggtaggacaggtcccggacctgccaagctgtctgccactgacggataatacccggatgctcgctagtatcctgattaacaaactgtacgatgacctgcggtgcgatccagagcgcgaccattttaggaagatctgcgaagagtatatcacaggaaagttcgacccccaggacatggataaaaatcttaacgccatacaaacggtgtcaggaattttgcaggggccttttgacctgggaaaccagctactggggctgaagggggtgatggaaatgatggtggccttgtgcgggagcgagcgggagacggaccagctcgtggcagtggaagcgctcattcatgcgagcacaaaactctcccgcgcaactttcatcattacgaatggcgtctctttactaaaacaaatttacaaaacgaccaaaaacgagaaaattaaaatcagaacactggtgaccagtgacaagacaatcctctatagcgtggctacaacattggttaattgtacaaattcttacgatgtgaaggaagtcataccagaactcgtgcagctggccaagttttcaaaacaacacgtgcctgaagaacatcctaaagataagaaggattttattgacatgcgcgtcaaacgcttgctcaaagccggtgtcataagtgctttggcgtgcatggtgaaagcggactcagctatactaaccgaccagaccaaggagctcttggccagagttttccttgctctgtgcgacaatcccaaagacagaggaaccatcgttgcgcaggggggaggcaaggctctcatacctctggctctggaaggcacggacgtagggaaggtgaaggccgcacacgccctagccaagattgctgcagtgagcaatccagacattgcattcccaggggagcgggtgtatgaagttgttagaccacttgtgagactactagatacccagcgtgatggactgcagaattacgaggctcttctgggccttactaatctgagtggccgttctgacaaactgaggcagaaaatctttaaagagcgggctctgcccgacattgaaaattacatgtttgaaaatcatgatcaacttcgacaggccgcaaccgaatgcatgtgtaatatggtcctgcacaaagaggtgcaggagcgctttctagcagacgggaacgataggctgaagctggtggtgttgctctgcggggaagatgacgataaggtacagaacgccgctgccggtgctcttgcaatgctgaccgcagctcataagaagctgtgtctgaagatgacacaggtaaccacccaatggctggagattctgcagcggctttgccttcatgatcagctgtctgtgcagcaccggggtcttgtgatcgcctacaacctactcgccgcagacgcggagcttgccaagaaactcgttgaatctgagctcctcgagatcctgaccgtggtgggcaaacaggaacctgatgaaaaaaaggcagaagtagtacagacggctcgcgagtgtctgatcaagtgcatggattacggtttcatcaaaccagtgagttag

SEQ ID NO: 29132 - DNA, 552 bp, synthetic construct
  source 1..552: mol_type = other DNA; note = Synthetic coding sequence
atgatgcagatttgtgacacctataaccaaaaacattctctgttcaatgcgatgaaccggttcatcggagctgtcaacaacatggatcagactgtcatggtgcctagcctactcagggacgtgcccctggctgacccgggtctcgataacgatgtaggcgttgaggtggggggtagcggcggttgcctggaggagcgaacgcctcccgtgcctgactccgggagcgccaatggaagctttttcgctccctctagagacatgtactcccattacgtgctcctcaaatcaatcaggaatgacatcgaatggggcgtgttacatcagcctcctccccctgctggtagtgaggaagggtctgcatggaagagcaaggacattctagtggacctgggacacctggagggtgctgatgccggagaggaagatctcgagcagcagttccactaccatctcaggggcctgcacaccgtcttatctaagctgacaaggaaggccaacattctgacgaatcgctataagcaagagatcgggttcgggaactggggccactag

SEQ ID NO: 29133 - DNA, 366 bp, synthetic construct
  source 1..366: mol_type = other DNA; note = Synthetic coding sequence
atgtttaacaaatgctcttttcactccagcatttacagaccggctgctgataactcagcctcatccttatgtgcaattatctgttttttaaacctggtcatcgaatgcgatctggagaccaacagtgagataaataagcttatcatttaccttttctcccagaacaacaggataaggttctctaaactgctcctgaagatcctgttttatatcagcatttttagctatcctgagttgatgtgtgaacaatatgtcacgtttattaagcccggtattcattacggacaggtgtctaaaaagcatatcatctacagcacgtttctcagcaaaaatttcaagtttcagcttctccgcgtgtgctggtag

SEQ ID NO: 29134 - DNA, 972 bp, synthetic construct
  source 1..972: mol_type = other DNA; note = Synthetic coding sequence
atggagagtagggtggccgacgccggaacgggcgagactgctcgtgcagccggagggtctccagccgtgggctgcactacacgcggtcctgtggtgtccgcgccattaggcgctgccaggtggaagctgcttcgccaagtgctaaagcagaaacatctagatgattgcctgcggcacgttagtgtgagaaggtttgaaagcttcaacttattcagcgtcactgagggcaaggagcgggagaccgaagaggaagtgggagcgtgggtgcaatacacgagcatattctgtcctgaatactcgatcagcctgagacacaattctggatcattgaatgttgaagatgtgctcacatcattcgataataccgggaatgtatgcatatggccctcagaggaggtgttggcatactattgcctgaaacataataatatcttccgcgcattagccgtgtgtgaacttggagggggtatgacttgcctcgcaggattgatggtcgcaatatctgcggacgtcaaggaagtgctcttgacagatgggaacgaaaaggcaataaggaacgtgcaggacatcatcacccgcaatcaaaaggccggtgtgtttaagacccagaaaatatctagttgcgtcttgcgctgggataatgaaacagatgtgagccagctggaaggccactttgatattgtcatgtgcgcagactgcctttttctggatcagtaccgagctagcctggtagacgcaattaagcgattgctccagcctcgaggtaaagctatggtgtttgcaccaaggcgcggtaataccctgaaccagttttgcaatctagctgagaaggccggattctgtatacagcggcacgagaattacgacgaacacattagtaatttccactctaagctcaaaaaggagaaccctgatatatacgaagaaaaccttcactatccgttgctgctgatcttaactaagcacggttag

SEQ ID NO: 29135 - DNA, 3120 bp, synthetic construct
  source 1..3120: mol_type = other DNA; note = Synthetic coding sequence
atggccgtacagctcgtgccagactctgctctgggtttgctcatgatgactgaagggaggagatgccaggtacatctactggacgatcgaaagctcgaacttctagttcagcctaagctgttggccaaagagttgttggatctcgttgcctcccattttaacttgaaggaaaaggagtacttcggcattgccttcaccgatgagactgggcatctgaattggctgcaactcgataggagagttctcgagcatgatttccccaagaagagtggacccgtggtgttatacttctgcgtgagattctacatagagagcatctcgtatctgaaggacaatgccaccatcgagttattttttctaaatgcaaagtcttgcatctacaaggaactgatcgatgtcgactctgaggtcgttttcgagctggcatcatacatcctgcaagaggccaaaggcgattttagcagcaatgaagtggttcgatctgatctgaaaaagctgcccgctctacccacacaggccctaaaggaacatccaagcctggcctattgcgaggaccgcgtcatagagcactacaaaaaactgaacggtcagacacggggacaggcaattgtcaactacatgtccatcgtggaatccctgcccacctatggcgtccactattatgcagttaaagataagcaggggattccgtggtggctgggcctcagttacaaggggatttttcagtacgactatcacgataaggtcaaaccaaggaagatttttcaatggcggcagcttgagaacctgtacttcagagagaagaagttcagtgtggaagtccatgaccccagacgtgcttcggtaaccagaaggaccttcggccattcaggcatcgctgtgcacacttggtacgcatgcccggcactgatcaaaagcatctgggccatggcaattagtcagcatcagttttatttggacagaaagcaatcaaagtccaagattcacgccgctaggtctttgtctgaaatagcgatcgatctcaccgaaactggtacactgaaaacatccaaactagcaaatatggggagtaagggcaagattattagcgggtcctcaggctctcttctgtcaagcgggagccaggaatccgatagttcccagtcagctaagaaggacatgctcgcagccctgaagagccgccaggaagctttagaggagacgctgcggcaacgattagaagagctgaaaaagctctgcctaagggaggccgagctcaccggtaagcttcctgttgagtatccgctggatcccggtgaggagccccctattgtgcgacgcagaattggcacagcgtttaaactagacgagcagaaaattctcccgaagggagaagaggctgaactggagcggcttgagcgcgaattcgccatccagtctcaaattaccgaagcagctcgtcgtttggcctcagaccccaacgtttccaaaaagctgaaaaaacagcggaagacatcatacctgaatgctctgaagaaacttcaggagatagagaatgctattaacgaaaacagaatcaagtcaggcaagaagcccacgcagcgtgcttccctgatcatcgacgacgggaatatcgcatctgaagattctagtctgagtgatgctttggtgttagaggacgaggactcacaggttaccagcaccattagtcctcttcactcacctcacaaagggctgccacctagacccccttcccacaaccgaccacctcccccacagagtctggaaggtcttcgccaaatgcactatcacaggaacgattacgacaagtctcctatcaaacctaagatgtggtcggagagttctttagatgagccatatgagaaagtcaagaaaagaagtagccactctcactccagctcccataagcgctttccttccacagggtcatgtgctgaggctggaggcggatcaaactcactgcagaacagccctattagagggctccctcattggaacagtcagtccagtatgccaagcactcccgacttgcgcgtgcgaagcccccattacgttcattcaacacgtagcgtggatatcagcccgactaggttacacagtctcgctcttcatttccggcacagatccagctcactggagagccaaggcaaactgttgggatccgaaaacgacacaggcagtcctgacttttacacccctagaaccaggagctcgaatggcagtgatcctatggacgactgcagttcgtgtacatctcattccagctccgaacactactatcccgcacagatgaatgctaattactctactctggctgaggactccccgagtaaggcaagacaaagacagagacaacgccaaagagcagctggcgcactcggttcagcctcatccgggtctatgccaaaccttgccgctcgaggaggcgcagggggtgcaggaggggctggtggcggagtctacctgcattctcagagtcagccatcttcacagtatcgtatcaaggaatacccgttatacatcgaaggaggtgccacgccagttgtggtacggtcactggagagcgatcaagaaggacactactcagtaaaggcccagtttaaaacctccaattcgtacactgccggtggcctcttcaaggagtcctggaggggtggcggaggtgacgagggggacactgggaggctaacacccagcaggagccagatcctcagaactccgtcccttggtcgagagggtgcgcatgataagggcgcaggacgggctgctgtttcagatgagttgaggcagtggtatcagcggtccacagcttctcacaaagaacactcccgcctgagccacacttccagcacctcatctgatagcggctcccagtacagcacatcctcccagtccaccttcgtggcacatagccgcgttacccggatgccacagatgtgtaaggccacctccgccgctttgccccagagccagcggtcctcaacgccttctagcgagatcggcgctacaccacccagttcaccacaccacattttaacttggcagacaggggaggccaccgagaattcccctatcctggatgggtccgaatcacccccacaccagagcactgacgagtag

SEQ ID NO: 29136 - DNA, 390 bp, synthetic construct
  source 1..390: mol_type = other DNA; note = Synthetic coding sequence
atgtacagacaacggttcctctattccctgtaccggcacacgcattgggtgagatgtgccaaattcagccccgatgggaggttgatcgtatcttgtagcgaagataaaacaatcaaaatatgggacacaactaataagcagtgcgtgaataacttctcagacagtgtcggggacctttccttactctttcatttccagaaggtggagagttacttacaccaggaggtgcaaacacacaggtcatactatggtgggttaacccttatgaactgtatagtgaaggtgctcccaaaggagatctccaaagattacatcctgatccatcaccacattttcctaatctcaacccaggaacaccacatccctatgagaaagaagctacgactgtag

SEQ ID NO: 29137 - DNA, 2178 bp, synthetic construct
  source 1..2178: mol_type = other DNA; note = Synthetic coding sequence
atgcaccccgaacccagcgaacccgctaccggcggagctgctgagctggattgtgctcaggagcctggcgtcgaggaatcagccggagaccatggtagcgccggaaggggcggttgtaaggaggagatcaatgatcccaaggagatctgcgtggggtcaagcgatacatcttaccactcccaacagaaacagtccggtgacaatggctctggcggacatttcgcacatccccgtgaggatagagaggaccggggtccccgaatgaccaagtcctcactccagaaactatgtaaacaacacaaactatatatcacgccagcgctgaacgacacgctctacttgcacttcaagggcttcgaccggatcgagaacctggaggagtacacaggactcagatgcctgtggctgcaatctaatggaatccagaaaatcgagaatctagaagctcaaaccgagttacgttgtctgttcttgcaaatgaatctgctccgcaagattgaaaacctggaaccgctgcagaagctggacgcccttaacctctcaaacaactacatcaagactatagagaacctctcttgtctgccagttcttaacactctgcagatggcccataaccacctggaaactgtagaggacatccagcatctacaagagtgtttgagactatgtgtgctcgacctttcgcacaacaagctgagcgatccagagatcctatcaatactggaatctatgcctgacctgagggtgctgaacttgatgggcaatcccgtaatccgccagataccgaactataggcgtaccgtcaccgttcggcttaagcacctgacctatctcgatgatcgccctgtgtttccgaaggatcgggcttgtgccgaggcctgggcccgtgggggttacgcagcagagaaggaggagcgccagcagtgggaatcgagagaacgtaagaagatcactgacagtattgaggcacttgctatgatcaagcagcgcgctgaagaaaggaagaggcagagggagtcccaggagcgtggggagatgaccagctcagacgatggagagaatgtgccagctagcgctgaggggaaggaagaaccgcctggagaccgcgaaacgcggcaaaagatggagctgtttgtaaaagaatccttcgaggccaaggacgaactgtgcccagaaaagccgagtggggaagaaccaccggtcgaggcgaagcgtgaagatggcggaccagagccagagggaaccctgcctgctgagacactgttgttgtctagccctgttgaggtaaaaggagaggacggcgatggggaacctgaggggacattacctgcagaagcaccgcctcctcctcccccagtcgaggtgaaaggtgaagacggtgatcaggagcctgaaggaacattaccggcagagaccctgctgctcagcccgcctgtgaaggtgaaaggggaggacggggaccgcgagcccgagggcactctccccgcagaggccccaccccctcctcctctgggtgctgcccgagaggagcccaccccacaagctgtagccaccgagggagtgtttgtcaccgagctggacgggacaagaaccgaagaccttgaaacaattcgccttgaaaccaaggagacattttgcatcgatgaccttccagacctcgaggacgatgacgaaaccggaaagagtctggaggaccagaacatgtgctttcctaaaattgaggttatttcatccctcagcgatgattcggacccggagttggactacacctctctccccgtcctggaaaacctgcctacagacactctgtccaatatcttcgccgtgagcaaggacaccagcaaagcagcgagggtaccgttcaccgacatcttcaagaaggaggcgaagcgggatctggagattagaaaacaggatacaaaaagtcccaggcctctgatccaggagttgtccgacgaagacccatccggccaacttttaatgcctccaacttgtcagcgcgatgccgctccactgacctcttccggcgaccgcgactccgactttctcgcggcaagttcacctgtcccaaccgaatctgctgctaccccccctgagacctgcgtgggcgtggcccagccttcccaggccttgccaacatgggacctgaccgctttcccagccccaaaggcctcttag

SEQ ID NO: 29138 - DNA, 957 bp, synthetic construct
  source 1..957: mol_type = other DNA; note = Synthetic coding sequence
taaggaatcaatggctcagaaggtgatggtgccgaaattgctgagaagtttgtcttttttatcgggtcgaagaatgggggaaagacaacaattatcttgcgctgcttggatcgggatgaacctcccaaacctacacttgcacttgaatatacttatggaaggcgggcaaaggggcacaatacaccgaaggatattgctcacttctgggaacttgggggtggaaccagtcttctggacctaatttccattccaattactggggacacgttgcgcaccttcagcctggtgctcgtattagatttatccaagcctaacgacctctggcctacaatggagaatttgcttcaggcaactaagagtcacgtggacaaggtgattatgaaacttggtaagacaaacgccaaggccgtgtcagagatgcggcagaagatttggaataatatgccaaaagatcaccctgatcatgagctcattgacccttttccggtgcctctagtcatcattgggtctaaatatgacgtttttcaggactttgagtcggagaaacgtaaggtaatatgtaaaaccctgcgctttgtggcccactactatggtgctagcctgatgttcacttctaaaagcgaagcccttctcttgaagatccgaggcgttatcaatcagctagccttcgggatcgataaatctaaatctatctgcgtcgaccagaataaacccctgtttatcactgctggcctcgacagtttcggacagattggtagtcctcccgtcccagagaatgacattggcaaactgcacgctcactcccctatggagctgtggaagaaggtgtatgaaaaactctttccgcctaagagcatcaacaccctaaaggacattaaagatcctgccagggatccgcagtacgcagagaacgaggtcgacgagatgcgaattcaaaaggacctagtcctcagctag

SEQ ID NO: 29139 - DNA, 2559 bp, synthetic construct
  source 1..2559: mol_type = other DNA; note = Synthetic coding sequence
atggaggccctgggaccgggaggcgatcgggcttcgcctgcttctagcacatcctcattggacctgtggcacctgtccatgcgtgccgactcagcatattcctcatttagcgccgcatctggagggcctgagcctagaacacagtctccaggcacagatctgctcccctatttggattgggattatgttagagtagtgtggggtggcccagggcctgccccacctgatgcagcactctgtacatctccccgaccccgaccagctgtagcagctaggtccgggcctcagcctacggaggtaccgggtacccctgggcctctcaaccggcaggctacgcccctactctatgccctcgctgccgaggcggaagcggcagcacaggcagcagaaccccctagcccaccagcctctcgcgctgcttatcgacagagactgcagggggctcagcgaagagtcttgcgggagaccagtttccagcggaaagaactgcgcatgagcctacctgcacggctacggccaaccgtccctgccaggcctcctgccactcatccccgtagtgcctctctctcacatcccggtggcgaaggtgagcctgctcggtcaagagctcccgctccaggtactgctggaagaggcccactggctaaccagcaacgaaagtggtgtttttccgagcccggtaagctagatcgtgtcgggaggggcggaggacccgcacgagaatgcttgggcgaggcctgtagcagttcaggcttaccaggcccagaacccctcgaattccagcatcctgccctcgctaaatttgaggaccacgaggtgggttggcttccagaaactcagcctcagggatccatgaacctggactccgggtcattgaaacttggcgacgcctttaggcccgcatccaggtcacgcagcgcaagcggtgaagtgctggggtcttggggaggaagtggcggtacaattcccattgtgcaagccgttcctcagggagctgaaacgccacgcccactcttccagaccaaacttagtagatttcttccacagaaggaagcagctgtgatgtaccccgcagagctcccacaatcatctccagcggatagcgagcagagagtttctgaaacttgcattgttccagcctggctcccaagccttccagacgaagtgttcctggaggaagccccactcgtgcggatgcgcagcccaccggacccacatgcctcacagggacctccggcatctgtgcacgcatctgaccagccatatggaacaggacttggacagagaacgggacaggttaccgtccctacagaatatcccctacatgagtgccctggcacagcgggagccgatgattgctggcagggggttaacggatccgtaggaatctcaaggccaacttcccatacacctactggaaccgctaatgacaacatcccaacgatcgatcctacaggcctgactaccaatccacccactgccgctgaatccgaccttctgaagcccgttccggcagacgctctggggctaagcggcaatgacaccccgggtcccagccataacacggccctggccaggggtacaggccagcctgggtcaaggcctacttggccatcacagtgcttagaggaactggtacaagaactcgcgcgactcgatccttcactctgcgaccccctggcttctcaaccaagccctgaacctcctttgggattgctagatggcttgatccctttggctgaggtgagagctgctatgcggccagcctgtggagaggcgggagaagaggccgcttcaacattcgagcctggttcttatcaatttagtttcacccagctgctgcctgcgcctagggaggaaacaagattggagaatccggctacacaccccgtgctggatcagccttgcggccagggtctccccgctcccaataactcaattcagggtaagaaggtggagctggctgcccgtctgcagaagatgctgcaagatctgcataccgagcaggagcgactgcagggagaggcacaggcatgggcaagacggcaggcggcactggaggctgccgtgcgacaggcctgtgcacctcaggaacttgagcgattcagcagatttatggccgatctggagcgcgtactgggcctgctgctgctgctgggaagtcggctggctagagttcgcagggccctcgctcgtgcagcgagcgactcagatcctgatgaacaagcaagcctgctccagaggctgaggttgctgcagcggcaagaggaggacgccaaggaactgaaggagcacgtagctaggagagagagggctgtccgtgaagtgcttgtacgtgctctgcccgtggaggaacttagggtttattgcgctcttctggctgggaaagcggcagttctggcacaacagcgtaatctcgatgagcggattagacttttgcaggaccagttggatgcaatacgcgatgacttaggacaccacgcccctagccctagccctgcacgtcctccagggacctgcccgccagttcaaccccctttcccccttcttttaacatag

SEQ ID NO: 29140 - DNA, 1776 bp, synthetic construct
  source 1..1776: mol_type = other DNA; note = Synthetic coding sequence
atggcacagggttccgtctctttcaacgacgtaacggtggacttcactcaggaagaatggcagcaccttgatcacgctcagaaaactctctatatggacgtgatgctcgagaactactgtcatctcatcagcgtcggttgccacatgacaaagcccgacgttatccttaaactcgagagaggggaggagccttggacttcttttgccggtcatacgtgccttgaagagaactggaaggccgaggacttcttggtgaagtttaaagaacaccaggagaagtactcccgctcagtcgttagcattaatcacaaaaagcttgtgaaggagaagtccaaaatttatgagaaaacattcacactggggaaaaacccagtgaatagcaagaaccttccgcctgaatacgatactcacggccgtatacttaagaatgtctctgagctcatcataagtaacctcaacccggctcgcaagagattgtcagaatataacgggtacggcaagtcactgctcagtaccaaacaagaaactactcatcctgaggtgaaatcacataatcaaagcgccagagcattctcacacaatgaagtgttgatgcagtaccagaaaactgaaacccccgcacagtcctttggatataatgattgtgaaaagagctttcttcagcgagggggactcatcacccatagcagaccttataagggcgagaatccctctgtatataacaagaagagacgagcaacaaatatcgagaagaaacatacatgcaatgagtgtggtaagagcttttgccgcaaatccgtcttaatacttcatcaaggcatccactctgaggagaaaccatatcaatgccaccagtgcggcaacgcattccggagaaaatcatatctaattgaccaccagcgaacgcatactggcgagaaaccttacgagtgtaacgattgcggcaagtccttccgacagaagaccacactgtcgctgcatcaacgcatccacactggtgagaagccctacatatgcaaagaatgcggcaaaagctttcaccaaaaagccaatctaactgtccaccagaggacacacactggggaaaaaccttacatttgcaacgaatgcggtaagtcattctcacagaagaccacactagccttacatgagaagacccacaacgaagagaagccatatatttgttccgagtgtggaaaatcctttagacagaagacgaccttggtggcacaccaacgaacccatacaggagaaaaatcttacgagtgccctcattgcggcaaggccttcagaatgaaatcgtacctcatcgatcaccaccggacccacacaggcgaaaagccttacgagtgcaacgaatgcgggaaatcattctcacagaagaccaatctcaacctccaccagcgaatacacaccggcgagaagccttacgtgtgcaacgaatgcggtaagagcttccgccaaaaagccaccctgactgtccaccaaaaaatccatactggacagaagagctatgagtgcccacaatgtggaaaggcattctcccgtaagtcatacctgatacaccatcagagaacacacacaggggagaaaccctacaagtgttcagagtgcggcaagtgctttcggcagaaaacgaacttgattgtacatcagcgcactcacactggggaaaagccatacgtgtgcaacgagtgtggaaaatcattcagctacaaaagaaatctcattgtgcaccagaggactcacaagggagaaaatatagagatgcaatag

SEQ ID NO: 29141 - DNA, 2934 bp, synthetic construct
  source 1..2934: mol_type = other DNA; note = Synthetic coding sequence
atgggttggaagccaagcgaagctagaggccaatcccagtcgtttcaggccagtggactccaaccacgctctctgaaagcagcccgtagagccaccggccgtcccgatcgctcaagggctgccagacctaccatggaccccagcgcacatcggagtcgggctgcacctcccaatatggatcccgatccgcaggctggtgtgcaggtgggcatgagagtcgttagaggtgtggactggaaatggggtcagcaggatggcggagagggaggtgttggcaccgtagttgagctaggtaggcacggtagcccctctactccagatcggaccgtagtcgtgcagtgggatcaggggacccggacaaactatagagctgggtaccagggcgcacatgatctgttattatatgacaatgcacagataggagtgaggcaccctaacataatttgtgattgctgcaagaagcatggcctccgaggtatgcggtggaagtgccgcgtctgcctcgactacgacttgtgcacccagtgttatatgcacaacaagcacgaactggcacacgccttcgatcggtacgagacagcacacagccggcctgttacgctgtcaccgaggcaggggctgccgagaatccctctgagaggaatttttcagggcgcaaaggtcgtgagaggtcccgattgggaatggggaagtcaggatggtggagaaggcaagcctgggagggtggtggacattcggggttgggacgtggagacgggccgatctgtagcatccgtgacatgggctgacggtaccaccaacgtatatcgggtggggcacaagggcaaggtagacctgaagtgtgttggagaggctgccggaggcttctactacaaagaccacctgccgcgactcggcaagccggcagaactccagagacgggtgagtgccgacagccagccattccagcatggagataaggtcaagtgcctgctcgatacagatgtcttacgagagatgcaggaaggccatggcggatggaatccacgcatggctgagcatcactcattttgggtgggagacgtggtgagggttataggcgatctggatactgtgaagcgcctgcaagcaggacatggagagtggacggacgatatggccccagctttgggtcgggttggtaaggtagtgaaggtgttcggggacggtaatctacgagtcgctgtggccggacagagatggactttctcaccctcctgtctggtcgcgtacagaccggaggaagacgcgaatttagacgtcgctgagagagcaagggagaataagtcctcactatccgtcgccctggataagctgcgggctcaaaagtctgacccagagcaccccggtcgccttgtggtcgaggtggctctgggcaacgccgctcgtgcacttgatctgcttaggagacgtcccgagcaggtggacaccaaaaaccagggtagaactgccctccaagtggctgcgtacttaggacaggtggagttaatcagattactactgcaagcgcgtgcgggtgttgacctcccagacgatgaaggaaatacagcgctgcactacgccgctctcggcaatcaaccagaagcaaccagagtgctcctgtctgcaggctgtagagcagatgcaatcaactcgacacaatctactgccctccacgtggctgtgcagagaggattcctcgaggtagttcgcgctctgtgtgagcgcggatgtgacgtgaatctgcccgatgcacatagcgacacgccactgcacagcgccatttcggccggaacaggcgcatccggaatcgtggaagttttaaccgaagttccaaatattgacgttaccgcaaccaattcccagggcttcaccttactccaccacgcttccctgaagggacatgcccttgcagtcagaaaaatactagctcgcgctcggcagctagtcgatgccaagaaagaagacggttttactgccctccacctcgccgcattaaataatcatcgtgaggttgcgcagatccttatccgtgaaggccgatgcgatgtgaacgtgaggaacaggaagcttcagagccccctacatttggctgtccagcaggctcacgtgggactggtgccactgctcgtggacgccggatgttcagtaaacgctgaagacgaggagggagacaccgctctccacgtagccctacagagacaccaactgttgccattggtcgccgatggcgcaggtggggaccccggacccttgcagctgctgtcccgtctgcaagcctcagggctcccagggtccgctgaattgaccgtcggtgccgcagttgcatgctttcttgccttagagggggctgatgtgtcgtatacaaaccatcgtggccgttcacctctggaccttgcagcagagggccgtgttctgaaggccttacagggctgtgcacagcgctttcgcgagcggcaggccggagggggtgccgctcccggacccaggcaaacactgggcactcccaacaccgtcaccaatctgcatgtgggagctgcccctggtcctgaggccgcagaatgtttggtttgttctgaattggctttactggtgttgttttcgccctgccagcatcgcacagtctgcgaagaatgcgccagaagaatgaaaaaatgcatcagatgtcaggtcgtggtgtctaagaaacttcgcccagatggaagtgaggttgcatcagccgcaccagccccaggaccacccagacagttggtcgaggaactgcagagtagatacagacaaatggaggagagaatcacttgtccgatctgcatcgatagccatatccggctcgtattccaatgcggacacggcgcatgtgccccttgcggatcagccctgagcgcctgtccaatttgccggcagccgatcagagataggatccaaattttcgtgtag

SEQ ID NO: 29142 - DNA, 2262 bp, synthetic construct
  source 1..2262: mol_type = other DNA; note = Synthetic coding sequence
atggatccggatccgcaggcaggagttcaggtcggcatgcgtgtggtaaggggggttgattggaaatgggggcagcaggatgggggtgagggaggtgttggcacggtggtggagttgggaagacacggttccccttccacacccgacagaaccgtggtggtgcagtgggatcagggcacaagaacaaattaccgggcaggctatcagggcgctcatgatctcctgctctacgacaatgcccagatcggcgtacgccatcccaacattatctgtgactgctgtaagaagcatggcctccgaggaatgaggtggaagtgcagggtttgccttgattacgacctatgtacgcagtgctacatgcacaataagcacgaactagcgcatgccttcgacaggtacgagaccgcacactcacgcccagttacgctcagtccaaggcagggtctccccagaatccccctgaggggcatcttccaaggcgcaaaggtggtcagaggacctgactgggaatgggggtctcaggacggcaagccagctgagctgcaacgacgggtgagtgctgacagtcagccgtttcagcacggggacaaagtgaaatgcttgctggatacagatgtgttaagggagatgcaggaaggccatggagggtggaacccgaggatggcagaattcataggacagacaggaacagtccatcgcataaccgatagaggagatgtgagagtgcagttcaaccatgaaactagatggacttttcaccccggtgcactgacgaaacatcactccttttgggttggcgatgttgtccgcgtgataggggacctggatacggtgaagcgccttcaagctggacacggggaatggaccgatgacatggccccagccctgggcagggtaggtaaagtggtgaaggtgttcggcgacggaaacttgcgcgtggccgtcgccggtcagaggtggacattctcaccaagttgcctcgtcgcctataggcccgaagaagatgcgaacctggacgtcgccgaaagagcacgggagaataaatcctctctgtctgtggcccttgacaaacttagagcgcagaagtccgatcccgagcatccgggacgacttgtggttgaagtcgctttgggtaacgctgctcgggctctggatctgctcagaagacggccagaacaagttgacacaaagaaccagggcagaacggccctgcaggttgcagcttacctagggcaggtggagctgatccggttgcttctacaggcccgagcaggagttgacctgcctgatgacgagggaaacaccgcattgcactacgcagccctaggcaaccagccagaggcaacaagggtcctcctctcagctggctgcagggctgatgccatcaattccacccagagtacggctttgcatgtcgctgtgcagcgcggtttcctggaagttgtacgcgcactttgcgaaaggggatgcgatgttaacctgcccgatgcccatagtgacacaccgctccactctgctatctctgccggtaccggcgcatctggaatcgttgaggtcctcacggaagtgccaaatatcgatgttacagctacaaactctcagggatttactcttctgcatcatgctagtctgaaaggacacgccttagccgtgcgcaaaatactggctcgagctaggcagttagtggatgccaagaaggaagatggttttaccgctcttcatctcgccgctctcaacaaccaccgtgaggtggcacagatacttattcgcgaagggagatgcgacgtgaatgtccggaaccgtaaactgcaaagtcctctccacctcgcagtgcagcaggcccacgtcggcctggtgcccttactggtcgatgcaggttgttccgtgaatgccgaggacgaagaaggcgacacggcccttcatgtcgcactgcagcggcaccagctgctcccgctggtcgctgatggcgcaggtggggacccgggtcctctgcagcttctgagccggctccaggccagtggcctccctggctcagcggaattaaccgtgggcgctgcggtagcttgctttttggccctggaaggtgccgatgtgtcttacactaaccatcgaggacggtcccccctggatctcgcggcagaaggccgagtactgaaggcgctccagggctgcgcccagagatttagagtgagggcacaagatgaggaagtacaccaggtgccagggggaaggcagcaagagactgctccaagacgtctctag

SEQ ID NO: 29143 - DNA, 1161 bp, synthetic construct
  source 1..1161: mol_type = other DNA; note = Synthetic coding sequence
atgggaaaggactattataaaatcctcggcatccccagcggcgcaaatgaagacgagataaagaaggcatatagaaagatggccctgaagtatcaccctgataagaataaggaacccaacgcagaggagaaatttaaagaaatcgctgaagcctacgacgtgttgtcagatccgaagaaacgcggactctacgatcagtatggcgaagaggggctcaagaccggaggtggtacctccggaggctcctcaggctcgttccactatacattccacggcgatccccacgcgacattcgccagcttttttggcggatctaacccttttgatatcttttttgcctcctcccgaagcacccggccattctctgggttcgaccctgatgatatggatgtggacgaggatgaagacccattcggagcgttcggcagatttggattcaatggacttagtcgcggacctcggagagctcccgagcctctctatccacgtcgaaaggtccaagacccaccagtggtgcatgagttgagggtgtctctggaggaaatctaccatgggtctacaaaacgaatgaagataacgagaagacggttgaatcccgacgggagaaccgttaggaccgaagataagatcctgcacattgtcataaagagaggttggaaggagggtaccaagattacttttccgaaggaaggagatgccaccccggataacattccagccgatatcgttttcgttcttaaagacaagcctcacgctcatttccggagagatggaaccaatgtattgtattctgcactgatctccctgaaagaggccctctgcggctgcaccgtgaacatccctactatcgatgggagggtgatcccacttccttgcaacgacgtgataaagcccggaacggttaagcgccttcggggtgagggactgcctttccctaaagttccgacccagcgcggagacctcatcgtggagtttaaggtacggtttccggaccgattgaccccacagactcgacaaatcttaaaacagcagtacccacaacacagtcttcactcgatgtgtacacagctggacgtgcactggactctagccactttctccaaaatgcagaagaaggccactggctttcaagaaaacgtgcccgtccccgaccctttctag

SEQ ID NO: 29144 - DNA, 1008 bp, synthetic construct
  source 1..1008: mol_type = other DNA; note = Synthetic coding sequence
atgcttggcagtgggttcaaagccgagcgactgcgagtcaacctccgattggtcatcaatagattgaagctcttagaaaaaaaaaagaccgaactggcccagaaagcacgaaaggagatcgcggactaccttgcggctgggaaggatgagcgggctaggatccgggtcgagcatatcatacgtgaggactaccttgtggaggccatggaaatcctggagctgtactgtgacctgttactggccagattcggtctaattcagagcatgaaggagctcgattctgggctcgcagaaagcgtttccaccctgatctgggccgctcctaggctgcagtcagaggtggccgagctgaaaattgtcgcagaccagctgtgtgccaagtattccaaagagtacggaaagttatgtcggaccaatcagatcgggacagtcaatgaccgcctgatgcataagctgtctgtggaagccccaccaaagattcttgtggagagataccttattgagattgctaaaaattataatgtgccctacgagcccgactcggtggttatggccgaggctccgcctggagtggagaccgacctgatcgatgttggctttactgacgatgtcaaaaaaggtggtcccggacgtggcggatccggcggattcacagctcctgtcggcggtcctgatggaacagtacccatgccaatgcccatgcccatgcctatgccttcagctaatacccccttctcataccctcttccgaagggcccagtcgatgacatcaatgctgataaaaacatctcttctgcccagattgtcgggcctgggccaaaacctgaggcctccgcaaaactgcctagccgacccgcagataactatgacaattttgtgctgccagagctgcctagcgtgccagacactctgccaaccgcttcggcaggcgctagcacatctgccagcgaagatattgattttgacgatctgagtaggagatttgaggaactcaaaaagaaaacctag

SEQ ID NO: 29145 - DNA, 1101 bp, synthetic construct
  source 1..1101: mol_type = other DNA; note = Synthetic coding sequence
atgctcggctctggttttaaagcagagagacttcgagtgaacctgcggctggtgataaacagacttaagctgttggagaagaagaagacagagttagcccaaaaagcacggaaagaaatcgccgattacctggctgccggtaaagacgagagggcaaggatacgcgtggagcacataatacgcgaggattacctggtcgaagccatggagatccttgagctctactgtgatttgcttctcgcccgattcggcttgatccagtccatgaaagaactggattcaggtctcgcagagtctgtgtctactctaatatgggccgctcctagactgcaaagcgaggttgccgagctgaaaattgtggccgatcaactctgtgccaagtacagcaaagaatacggtaaactctgcaggacaaatcagatcggaacggtaaacgacaggctgatgcacaagttgtcagtcgaagctcccccaaaaatactggtcgagaggtacttaatcgaaattgcaaagaactacaacgttccctacgagccggacagcgtcgtgatggccgaggccccaccaggggttgaaactgacctcattgatgtgggcttcaccgatgacgttaagaaggggggacccggacggggaggctcgggaggtttcaccgcccctgtgggcggacctgacggaacagtgcctatgcccatgcccatgcctatgccgatgccatcagccaacaccccattttcataccccctgcccaaaggcccaagtgactttaatggcctcccaatgggtacctaccaagcatttccaaacatccacccaccacaaatacccgctacgccaccgagttatgagagcgtggacgacataaatgccgataaaaacatcagtagtgcccagatcgtcggccctggccctaagcccgaggcttcggccaagctccctagccggccagcagataactacgataatttcgtcctcccggagttgccgtcagttcctgacacccttcctacagccagcgccggtgcctctacaagcgcttccgaggacattgattttgacgacttgtcaaggaggttcgaagagctcaaaaagaaaacctag

SEQ ID NO: 29146 - DNA, 948 bp, synthetic construct
  source 1..948: mol_type = other DNA; note = Synthetic coding sequence
atggagaagtatgaaaagcttgccaagaccggcgaaggatcgtacggggtggtctttaagtgtagaaataaaacatcaggtcaggtggtggctgtcaaaaaattcgtggaaagcgaagacgaccccgtggttaagaagatcgctctgcgtgagatccgcatgctcaagcagctcaagcatcccaatctcgtgaaccttattgaggtcttcaggaggaaacggaaaatgcacttagtctttgagtactgtgatcatacccttcttaatgagcttgagcgtaatcctaacggcgtcgccgatggtgtgattaagagcgtgctctggcagacactgcaggctctgaatttttgtcatatacacaactgtatacaccgggacatcaaaccggaaaatattcttattaccaagcaggggatcatcaagatctgtgacttcgggtttgcgcaaattcttatacctggagacgcctacacagattatgtggcaacgcgatggtacagagctcccgagctgctcgtgggtgacactcagtatggatcgagcgtggacatttgggcaattgggtgcgtctttgcggagctgcttacaggccagcccttatggcccggtaagagtgacgtggaccagctctacctgatcattcggactctgggcaaactaattccaagacaccaaagcatttttaagtcaaatgggtttttccacgggattagcattcccgaacctgaggatatggagacattagaagagaaattctcagatgtgcaccccgttgcattgaactttatgaaaggctgcttgaagatgaatcctgatgaccgcctgacatgtagccaacttttggagtcgagttatttcgattctttccaggaggcacagatcaagcggaaggccaggaacgaagggcgaaaccggcgtcgccagcaggtcctacctcttaaatcatag

SEQ ID NO: 29147 - DNA, 948 bp, synthetic construct
  source 1..948: mol_type = other DNA; note = Synthetic coding sequence
atggctaatgatccactggaagggtttcatgaggttaatctcgcctccccaaccagtcccgatctcttaggggtgtacgagagtggcacacaggaacagacgacttcccctagtgtgatctatcggccacatcctagcgcactatccagcgtgccgattcaagctaatgcccttgatgtgagcgagttgcccacacaaccagtctacagcagtccacggcgattgaactgtgcagaaatttccagtataagcttccacgtgactgaccccgctccatgctccacatccggtgtgaccgcaggccttacaaaattaacaacaagaaaggataactacaacgctgagcgggaatttttacagggagcaaccattacagaggcttgcgacggaagcgatgacattttcggtttgtccacagactccctcagccggttgcggtcccctagcgtgttagaagtgcgtgaaaagggatacgaacgactcaaggaagaactagccaaagcccagcgcgagttgaaacttaaagacgaagagtgcgaacggctgtcaaaggttcgcgatcagctggggcaagagttagaggagctcaccgcatccctgttcgaagaagcccacaaaatggtccgggaagccaacataaaacaagcaactgccgagaagcaattgaaagaagctcaagggaagatcgatgtgctgcaagcggaagttgctgcccttaagactctggttctgagttcatccccaacaagtccaacccaggaaccattgccgggaggaaaaactccctttaagaaggggcatacccgcaataagagcacatcctctgctatgtctggcagtcatcaggacctgagcgtcattcagccaatagtgaaggattgcaaggaagtgactcaccagggactgtccccactcactctacttatcctggttagcagccaccattag

SEQ ID NO: 29148 - DNA, 1074 bp, synthetic construct
  source 1..1074: mol_type = other DNA; note = Synthetic coding sequence
atggctagggagaatggcgagtctagtagctcctggaagaagcaggctgaagatattaaaaagatcttcgagttcaaagagaccctcggaacaggcgcattctccgaagtggtattagctgaggagaaggccacaggaaagctgttcgccgtgaaatgcatccccaagaaagcgctcaagggcaaagagtcctccatcgagaatgagatcgccgtccttcggaaaattaaacatgagaacattgtggccctagaagacatctacgagagcccaaaccatttgtaccttgtaatgcaactggtgtcaggcggtgaactttttgatcgaatcgttgagaagggtttctacacagagaaggatgccagcactctgatccggcaggttctagacgctgtttactaccttcaccgaatggggatcgttcatcgggatctgaagccagagaacctactgtattattctcaggacgaggagtctaagatcatgattagcgactttggtcttagcaagatggagggtaagggagacgtaatgagtaccgcgtgcggcacaccaggctacgtggctcctgaagtcctcgcccagaaaccttatagcaaagcggtggattgctggagcattggcgtgatcgcatatattttgctgtgcggctaccctccattttacgacgagaatgatagtaaactgtttgagcagatactgaaggccgaatacgaattcgactcgccttattgggatgacatcagcgacagcgcaaaagatttcatcagaaacctgatggagaaggaccctaacaaaagatacacttgtgagcaggcagccagacacccctggatcgctggcgacacagccctgaacaaaaacatccacgagtcagtgtcagcgcaaatacggaaaaatttcgccaagagtaaatggcggcaggcttttaacgcaactgccgtggtgagacacatgaggaaacttcatttaggatcgagtcttgacagctccaacgcaagcgtgagctcttccctttcactggcttctcagaaagactgcgcctatgtggctaagcccgagagcctatcttag

SEQ ID NO: 29149 - DNA, 1158 bp, synthetic construct
  source 1..1158: mol_type = other DNA; note = Synthetic coding sequence
atggcaagagaaaatggcgaatcatcaagtagctggaagaagcaggccgaagacatcaagaagatttttgagttcaaggaaacgcttgggaccggcgctttctcagaggtggtgctggccgaagaaaaagccaccggtaagctctttgctgtgaagtgtatccctaaaaaggctctgaaaggcaaggagagtagcattgaaaacgagattgcagtgcttagaaaaatcaagcacgagaacatcgtggcactggaggatatctacgaatccccaaatcacctttatctcgtaatgcaattagtgtcaggtggcgagctcttcgataggatcgtggaaaagggcttctacacggaaaaggacgccagtaccctgatacgccaggtgttggatgctgtctactacctgcataggatggggattgttcacagggatttgaagcccgaaaatcttctatactattcgcaggatgaggaaagcaaaattatgatcagcgactttggcctgtccaagatggaggggaagggagacgtgatgtccactgcgtgtgggaccccaggatacgtggcccctgaggtcttggcccagaaaccttactctaaagcggtcgattgctggagcataggcgtgattgcatacatcctcctgtgcgggtacccaccgttttatgacgaaaatgacagcaagctcttcgaacaaattctgaaggctgaatacgaatttgacagcccttattgggacgacatctctgacagtgcaaaagacttcataagaaacctgatggaaaaggatcctaacaaaagatacacttgtgaacaagctgccaggcatccttggatagcaggtgacacggcactgaacaagaacatccacgagtcggtgtctgcacagattcgtaagaacttcgcgaagtccaagtggcggcaggcattcaatgccacagccgtggtaaggcacatgcgcaaactgcacctgggcagctccctggactcctcaaatgcatctgtgagcagtagcctctccctggctagccaaaaggattgcttggcaccctccaccctatgcagctttatctccagcagcagcggtgtgtctggcgtcggcgctgaaaggcgccctagacccacgaccgtcacagccgttcacagcggatcaaaatag

SEQ ID NO: 29150 - DNA, 888 bp, synthetic construct
  source 1..888: mol_type = other DNA; note = Synthetic coding sequence
atgaaaaaagagcacgttctgcactgccaattcagtgcctggtaccctttcttccggggagtgaccatcaaatccgtaatcctcccactgcctcagaacgtgaaggactacttgcttgatgatggcacactggtagtgtcagggagggatgatcctcccacccactcccagcctgattccgatgacgaggctgaggaaatccagtggtctgacgatgagaacactgctaccctaacagctcccgagttcccagagtttgccactaaggtccaggaggctataaacagtctgggcggatcggtttttcccaagttaaattggagtgcccctagggatgcctactggattgctatgaacagttccttaaagtgcaagaccctgagcgacatttttctgctatttaaatccagtgacttcatcacaagggacttcacccaacctttcattcactgtactgacgattcaccggatccctgtatcgaatacgaactggtcctccggaagtggtgtgaactgatccctggggcagagttccgttgctttgtcaaggagaataaactgatcgtcgtgtttgacatttacagggactccaggggtaaggtctggctgatcgatttcaatcctttcggcgaggtgacagacagcctgttatttacttgggaagaattgatcagcgagaacaatttaaatggggacttctctgaagtggacgcccaggaacaggattcgccagcgtttcggtgcacaaatagcgaagtcactgttcagccttcaccctatctgtcttatcgcctgcctaaagactttgtagatctaagcaccggagaagacgctcacaaactgatcgacttcttgaagcttaagcggaatcagcaggaggatgactag

SEQ ID NO: 29151 - DNA, 3273 bp, synthetic construct
  source 1..3273: mol_type = other DNA; note = Synthetic coding sequence
atggaacaaccaaaaggcgtggactggacagtgatcatacttacgtgccagtataaagattctgtgcaggtgttccaacgggaactagaagtgcggcagaagagggagcagatcccagcaggaacgctcctgctggcggtggaagatcctgaaaagcgggtcggcagtggtggagccactctaaatgccttgctggtggctgccgagcacctgagcgctcgcgcaggctttacttggatttgtgtaggagtcagcttgtggatacgcggttgccacccaccgggtcgattaccagaagcttcggtgcatcgcgcttttcccctgctgcaagtcgttacctctgatgtgcttcatagtgcttggatacttatcctgcacatgggccgtgacttccccttcgacgactgcggacgagcgtttacctgtctaccagtggaaaaccctgaggccccagtagaggcactggtgtgtaaccttgactgcctcctcgacattatgacttatcgcttaggtccgggaagccccccaggggtctgggtgtgttccaccgacatgctgctgtccgtgccagccaatccgggtatttcttgggactcatttcggggtgcgagagtgatagccttgccaggaagccccgcttacgctcaaaaccacggcgtctacctgaccgacccccagggcctggtgttggacatatattatcagggaaccgaggccgagattcagcggtgtgtcagaccggatggtcgcgtgccactcgtgtccggagtggtttttttttctgtcgaaactgccgagaggcttctagctacccacgtgtcaccgcctctggacgcctgcacttacctgggccttgacagtggtgccagacctgtacagcttagccttttctttgacatactgcattgcatggctgaaaacgtcacccgggaggacttcctggtgggccgtccccctgagctgggtcaaggggacgccgatgtcgccggttacctgcaaagcgcacgggcacaactctggagggaactccgtgaccagcctcttacgatggcctacgtgagctctggctcgtactcgtacatgacctcctctgctagtgagtttctgttgagcctcactttacccggtgctcctggcgctcaaattgtccactcgcaggttgaggaacaacagctgctggccgctgggagctcagttgtgtcctgcttgctggaaggccctgtccaactcgggcctggttccgtccttcagcactgccacttacagggaccaatacatattggggcaggctgtctggtgacaggtctggataccgcacattcaaaggcgttgcacggcagggagttgagagatctcgtgctccaggggcatcacacgagactccatgggtcccccggtcatgcttttaccctggtagggagactagactcctgggagcggcagggcgcaggcacctatctgaacgtcccttggtcggagttcttcaagcgcaccggcgtccgggcttgggatttgtgggaccccgagacgcttccagccgaatattgcttacccagcgcaaggctctttcccgttttacacccatcaagagaactcggtccccaggatttgctgtggatgctggaccaccaggaagacggcggagaggcactgcgcgcttggcgggcttcctggcgcctgagctgggagcagctgcagccatgtctggacagagcagcaaccctggcttctaggagagatctgttttttcgtcaggccctgcataaagccagacacgtgctggaagcacgccaagatctgtcccttcgaccactgatctgggccgctgtgagggaaggctgtccgggacctctcttagcgaccttggaccaggtagccgcaggagcaggagaccctggagttgctgcccgagcgcttgcttgcgtcgcggatgtccttggctgcatggccgaggggcgtgggggactccgcagcggtcccgctgctaacccggagtggatgcggccattttcttatctggagtgcggcgatttggcagcaggagtagaggcacttgctcaagagcgggacaagtggctttcaagacctgccctcctagtgagggccgcacgccattatgagggggcagggcagatcctcattaggcaagcagtgatgtccgcacagcactttgtttctacggaacaagttgagctgccaggacctggccaatgggtggtggcagaatgtcccgcacgcgtggacttcagtggcggatggagtgacacacctcctctggcatacgagcttgggggtgcagttctcgggctggccgtgagagtcgatggaagacgcccaattggtgccagggcaaggcgtatccctgaacccgaactgtggcttgctgtgggccctaggcaggatgaaatgactgttaagatcgtctgcagatgcctcgcagatctgagggattactgtcagccccatgcccctggtgcattgctgaaggctgcattcatttgcgccggaattgtacatgtgcactccgaactgcagttgtccactagcagtattctagccggaacggctctagctgcactgcagagggcggctggacgggtcgttggtacggaagcactgatacatgccgtgttgcatctcgagcaggtgctgacaacagggggaggatggcaggatcaggtgggaggccttatgccgggaattaaagttggtcggtcccgggctcagctacccctcaaggttgaggtggaggaagtcacagtgccagagggctttgtgcagaaactaaatgaccatctgcttctggtgtacaccggcaaaactcgcctggcaaggaacctgttgcaggacgtgcttcgatcatggtacgctcgtctgccagccgttgtgcaaaatgcccattcgttggtcagacagaccgaggaatgcgcagagggatttcgtcaggggtcccttccgctgttagggcagtgtctcacctcctattgggagcaaaagaaactcatggctccaggatgtgagcctcttacggtgagacgaatgatggatgttctggctcctcacgttcacgggcagtctctggcaggagcgggagggggagggtttttgtacttgctcactaaagagccccagcaaaaagaggctcttgaagctgttctagccaagactgaaggcttagggaattactccattcatctagttgaggtagatactcaggggctctcactcaagttactgggcacagaggcttcgacttgctgcccatttccttag

SEQ ID NO: 29152 - DNA, 318 bp, synthetic construct
  source 1..318: mol_type = other DNA; note = Synthetic coding sequence
atgcttgagctcgcgcaggataggctgcagttcgagacggtagaagttagcgagccttctatgctgcaaaaaatcttaaccacgagaaggcgcgagacagggggaaatgaaccactgcctgtgccaactctgcaacaccatctcgctcctcctgccgaagcaaggaaggtccccagtgccagtcaggtgcaggcgatcaagtgttttctatctaagtgttggagtctgaacataagtacaaaggagtacgcatatcttaaaggaactgtgctatttaaccctgggaagggcaaggagaatgactgtaatcatcattag

SEQ ID NO: 29153 - DNA, 1413 bp, synthetic construct
  source 1..1413: mol_type = other DNA; note = Synthetic coding sequence
atggctggcgagaatcaccagtggcaggggtccatcctgtacaatatgttaatgagcgctaagcagacgcgcgctgccccagaagcccctgaaacccgactcgttgatcagtgttggggctgtagctgcggtgacgagcccggtgtaggccgtgagggcctgctggggggtcggaatgtggccctcctgtaccgttgctgtttctgcggtaaggaccacccacgccaggggtccatactgtacagcatgctgaccagtgccaagcagacttacgccgcaccaaaggcccctgaagccaccctgggcccttgttggggctgctcatgtgggtctgaccccggagtggggagagccggtcttccaggcggacgccctgtggccctactttatagatgttgcttttgcggggaagaccaccctcgacagggttcaatcctctactctcttctcacatccagtaagcagacgcacgtggcacccgcagctcctgaggcaagacctggcggtgcctggtgggatcgatcctacttcgctcagcggccaggtggaaaggaagctctgccgggaggacgcgcaaccgcattgctgtatcgctgctgcttctgcggagaagatcatccacagcaggggagcactctctactgcgttcccaccagcactaaccaagctcaggcagccccagaggaaagaccacgcgctccatggtgggacacctcctccggcgctttgaggccagtggctctgaagtctccccaggttgtatgtgaggccgcttctgctggattactcaagaccctgcgttttgtgaagtaccttccctgctttcaggtactgccgctagatcaacaacttgtgcttgtgcgcaactgctgggcaagccttctgatgttggagttggcccaggatagactgcagtttgaaacagtggaagtctctgagccgagcatgctgcagaaaatccttaccacaaggcgcagagagacagggggtaacgagcccttgccagtcccaacacttcagcatcatctggctcctccagccgaggcacgtaaggtgccgagcgcatcccaggtccaggccattaaatgcttcctgtccaagtgctggtcgctgaacataagcacaaaggaatacgcatacctgaagggaacagtccttttcaatccagatgttccaggtttgcaatgtgtgaaatacatccagggcctgcagtgggggacacagcagatcttgtctgaacatacaaggatgacacaccaggggccacacgatagattcattgagctgaacagtaccctattcttgctccgtttcataaacgctaatgtgattgccgaactgttcttcaggcctattataggcacagtgagtatggacgacatgatgttggagatgttgtgcaccaagatatag

SEQ ID NO: 29154 - DNA, 2028 bp, synthetic construct
  source 1..2028: mol_type = other DNA; note = Synthetic coding sequence
atgctccgggcaactgccccatgctggttcccccctggctatcccgaagcgaagaaagtggcggaagaggcggcactagaggctagccgacacttggggggagagcagagtcaggccggagcccctgaaggatccaagatgctccgcgcaaccgccccttgctggttcagaccaggctaccccgaggcaaaaaaggtggccaaggaggcagcccctgaggcttcacgccacctcggggctgagcagtcccccgctggtgcgcctgaggggagcaaaatgttaagagcaactgccccatgctggtttcctcccggttatccagaagccaagaaggtggctgaggaagccgcactggaagcaccagagtttcccctgccctctcatcagccggctcagtcttttggcctttgggtcccccagatgcataagcaagccagcgccttcgtcgacatccaggcagaaccgcaaaaccgaggaccggctgtcccccctgcatggccgaagatggtgacagagtcatgctatttccctgcacagcgtggttcagcgtgccggctaccagcagctcccagattgactgagagaccatcaggcgtccgcattagtgcccctaggaagcggaaaacaattgctcactccagttctccatgccttgttaccggctacaccgacgccaagcgcacaagggtcgcttcctccagtcagcggtcccgtgggagcaaggtaggcagacaacctggtaagacacgaaatcggagtggaatggcgtgtaaaaccaccgcgacgacgtcgagtaaaagaatagtccgccgtgcctccctacccagcttgtcattaaagaagcccatcattctgaggtcaagcggctgtcaagtcccgactgtactgagacgcggttatctgcagctctttaccgaagagtgtctcaagttttgcgcatccaagcaggaggccgaggaaaaagctctgaatgaggagaaggtggcctacgactgctcaccaaacaagaatcgttacttaaacgtggtactgaatacccttaagcgtctcaagggcctaactccctcctccatgcctggcctgtccagggcagccctttactcaagacttcaagagtttctgctgacacaggatcagttgaaggaaaacggttacccattccctcacccagaaagacccggtggtgcggtcctctttaccggacagggcaaaggccctggcgattcctcatgcagagtgtgctgtagatgcggcacggaatatctcgttagctcgagtggacgatgcgtccgcgatcagctgtgctactaccattgggggcgtgttagatcctctcaagtggccggaggcagggtttcccagtatacatgctgcgcggcagcccctggaagtgtgggatgtcaggtggcaaaacagcacgtgagagatggtaggaaggagtctcttgacgggttcgttgagacctttaaaaaagaactcagtagagacgcatatccaggcatctacgctcttgactgtgaaatgtgctatacgacccacggcttggagcttactcgcgttactgttgtggatgcagatatgcgcgttgtgtacgatacctttgtgaaaccagacaatgagattgttgattacaacactcggttctccggagtgacagaagctgatgtcgcaaagaccagcatcacactgccacaagtgcaggccattctcctgtctttcttctccgctcagactatccttatcggccatagtttagaatctgacctgctagccctaaagctgattcactcaactgttgtggatacagcggttctctttccacactacctgggttttccgtacaaacgtagcttacggaatcttgcagcggattatctggcccagatcattcaagactcgcaggatgggcacaattcctccgaagatgcctcagcgtgcctccaattagtgatgtggaaagtacgacaacgggctcagattcagccgaggcataggtctgcatccccagcagccctggcatgcccttag

SEQ ID NO: 29155 - DNA, 711 bp, synthetic construct
  source 1..711: mol_type = other DNA; note = Synthetic coding sequence
atgcacactacgcagaaggatactacctacaccaaaatattcgtaggtggtctgccttaccacacgaccgatgcttcccttcggaaatatttcgaagtcttcggagaaattgaggaggccgtcgtgataactgaccgccaaacagggaaaagtcgtggctatggtttcgtaaccatggcagaccgtgccgctgccgagagggcgtgtaaagacccaaatccgattatcgatggacgtaaggccaatgttaacctggcatacctgggagcaaagccacgcatcatgcaacccggttttgctttcggagtccaacagctccatcccgcactgatccagaggccctttggaatcccagctcactacgtctacccccaggcattcgtgcagccgggagtcgtcatcccccatgtgcaaccaacggccgctgcagcctcaacaacaccctatatagattacaccggagcagcatacgctcagtacagcgccgctgctgctgccgctgcggctgctgccgcttacgatcaatacccttatgcggcttctcctgctgccgcaggttatgtgacggcaggcggttacgggtatgccgtgcaacagccaatcacagcagccgctccagggactgctgccgctgccgctgccgctgctgccgctgccgcagcatttggccagtaccaaccgcagcagctgcagaccgataggatgcagtag

SEQ ID NO: 29156 - DNA, 4389 bp, synthetic construct
  source 1..4389: mol_type = other DNA; note = Synthetic coding sequence
atggccccagtccacggcgacgactctctgagtgattcgggcagctttgtctcctccagagcgcgacgcgaaaaaaaatcaaagaagggtcggcaggaggcactggagcgattgaaaaaagcaaaggccggagagaaatataagtatgaggtggaagactttacaggagtatatgaggaggtcgatgaagagcagtactcaaaactggtgcaggcgaggcaagatgatgattggatagttgacgatgacggaatcggctatgttgaggacggaagggagattttcgatgatgaccttgaggatgacgccctagatgctgacgagaagggaaaggacggaaaggcaagaaacaaggacaaaagaaatgttaaaaaactggcggtcaccaaaccaaataacattaaatcaatgtttatagcttgtgcaggaaagaaaacggcagataaggctgttgacttgtcgaaagatggcctgctgggggacatattgcaggacctcaatactgagacccctcaaattacccctccgcctgtcatgattcttaagaagaaacggagcattggtgcatcgcccaatcccttttcagtacacaccgcgaccgccgttccgtccggaaaaattgcctcccctgtatctcggaaagaacctccacttacccccgtgccattaaaacgggctgagttcgccggagacgatgtccaagtagaaagcacagaggaggagcaggagagtggagctatggagtttgaagacggagactttgatgagcctatggaggtggaagaagtggatctggaacccatggccgcaaaggcctgggataaagagagtgagccagcggaagaagtcaagcaggaagctgacagcgggaaaggtaccgtgtcttacctgggttcctttctaccagacgtgtcgtgttgggatatagatcaggagggggatagctcattctctgtccaggaagtgcaggtggactcatcgcaccttcctctcgtcaaaggggcagacgaggagcaggtgttccacttctattggcttgacgcatatgaggatcaatataatcaacctggagtggtttttctcttcggaaaggtctggattgagtccgctgaaacccacgtttcatgctgcgttatggtcaaaaatatcgagcggactctctatttcctgcctcgagagatgaaaattgacctaaatactgggaaggagacggggactcctatctctatgaaggatgtgtatgaggagttcgacgaaaaaatcgcgacgaagtacaagattatgaaattcaagtcaaagccagttgagaaaaactatgcatttgagatccccgatgtacctgagaaatccgagtatctggaggtgaaatactcagctgagatgcctcagttgccccaagatctcaagggagaaaccttcagtcacgttttcgggaccaacacctcatctctggagctttttttaatgaataggaaaattaagggaccgtgttggctggaggttaagagcccccaactgcttaaccagccggtatcttggtgtaaagtggaagccatggcactgaaaccagacctggttaacgtcatcaaagatgttagtccacctccgctcgttgttatggcattttccatgaagaccatgcagaatgccaaaaaccatcagaacgagatcattgctatggcggctctggtgcaccactcttttgcacttgataaggcggcaccaaaacctccttttcagagccatttttgcgtagtaagtaagccgaaggactgcatcttcccatacgccttcaaagaggtgattgagaagaagaacgtcaaagttgaagtagctgctaccgagcggactcttttgggctttttcctggccaaagtccacaagatagaccctgacatcatcgttgggcataatatctacggattcgagttggaagtcctcttgcagagaattaatgtctgcaaagcccctcattggagcaagatcggcagactgaaaagatctaacatgccaaaactcggaggtcgctcaggctttggagaacggaatgctacatgtggaaggatgatttgcgatgtagaaatttcagccaaagaactcatacggtgcaaaagctatcatttgtccgaactggtccagcagatactcaagactgagcgcgtcgtgatcccaatggagaacatccagaatatgtactctgaaagtagccaattgctgtacctgctggaacacacttggaaagacgctaagttcattctccagattatgtgcgaattaaacgttctccccctcgcactccagattaccaacatcgccggtaatataatgtcacggacgttgatgggtggccgttcagaacgtaacgaatttctgctgttgcacgccttctatgagaataattatatcgtgcctgacaaacagatttttcgaaaacctcagcagaaactgggagacgaggatgaagaaatcgacggcgatacgaacaaatacaaaaagggtcggaaaaaggctgcttacgccggagggttagtcctcgaccctaaagtgggtttctacgacaaatttattttgctgctggattttaatagcctctaccctagcatcatccaggaattcaacatctgtttcacaactgttcaacgcgttgcaagtgaagcccagaaagtgacagaggacggggagcaggagcagatccctgagctgccagaccccagcctggaaatgggcatcctgcctagggagataagaaaattggtcgagcgcaggaagcaggtgaaacagctcatgaagcaacaagacttaaaccccgacctcatactgcaatatgacatcagacaaaaagccctgaagctgaccgccaattctatgtacggatgtctgggtttcagctatagccggttttatgcaaagcccctcgctgcgctggtgacatacaaaggtagagagatactgatgcacactaaggaaatggtgcagaaaatgaaccttgaagtaatctacggtgataccgattctattatgattaacacaaacagtacaaacctagaggaggttttcaagctgggaaataaagtgaagtccgaggttaataagttgtacaaactgttagagattgacatcgatggggtgttcaaaagcttattactgctaaagaagaaaaagtatgctgctctggtggttgagccaacttccgacggcaattacgttactaaacaggagcttaaaggcctggatattgtgaggcgtgattggtgcgacttggcgaaagacacaggcaacttcgtgatcgggcagatcctgtcagaccagagccgggataccattgttgaaaatatccaaaaacggctgatagagataggggagaacgttctgaacgggtctgtccccgtgtcccagtttgaaatcaataaggccctcacaaaggatccccaagactatccagacaaaaaatctctgccacatgtgcatgttgccctgtggataaattctcagggtggtcgcaaggtcaaggcgggtgatacagtcagttacgtcatttgtcaagatgggtcaaacctgacagcctctcagcgggcatatgccccagaacagctgcagaagcaggataatttgactatcgacactcagtattacttagcacagcagatccatccggtggtcgctagaatctgcgagcccatcgatggcatagatgcagtgttgatagcgacctggctcggactggatcctacacaattccgggtgcaccattatcacaaagatgaagagaacgacgcgctcttagggggtccagctcagctgaccgatgaggagaaatatagagattgtgagagattcaaatgtccatgtcccacatgcggaacggagaatatctacgataacgttttcgacgggtctgggacagatatggagccttctctgtacaggtgtagcaatatagactgtaaggcgagccccctgacttttacagtgcagctttcaaataagttgattatggacattaggagatttattaaaaaatactacgatggctggctgatctgcgaggagcctacctgcagaaaccggacgagacatctccctctgcagtttagtcgaaccggaccattgtgccccgcatgcatgaaggctacgttacagcctgaatacagcgataagtctctttatacccagttatgcttttatcggtatattttcgatgccgagtgtgccttggagaaactcacgactgatcacgagaaggacaaactgaaaaaacagttcttcactccaaaagtgcttcaagattacagaaaacttaaaaatacagcggaacagtttcttagtagatccgggtacagtgaggtgaatctgagtaaactttttgctgggtgcgccgtcaagtcatag

SEQ ID NO: 29157 - DNA, 2673 bp, synthetic construct
  source 1..2673: mol_type = other DNA; note = Synthetic coding sequence
atgagtgccaacaactccccccctagcgcccagaagagcgtcttgccaaccgccattcccgctgtgcttcccgcagcgtctccatgcagctccccaaagaccggcctgtctgccaggctgtcaaacggatcattttccgcccctagcctgactaattcaaggggatccgtgcacactgtttcttttctcctccaaatcggtctgaccagagagagtgttacaatcgaagctcaagaactctcactgtcggccgtcaaagacctggtgtgcagcattgtgtaccagaagttccctgaatgtgggttttttggaatgtacgataaaatcctgctctttagacatgatatgaatagcgagaatattctccagcttattacctcggctgatgagattcacgaaggggacctggttgaagtagtgctgtccgctctcgcgacggtcgaagacttccagattcggcctcacacgctttatgtccacagctacaaagcgcctacattttgcgattactgtggagaaatgttatggggacttgtgcggcagggcctgaagtgtgaaggctgtggcctgaattaccataagaggtgcgcctttaagattcctaacaactgttctggagtcaggaaacggcgtctgagcaacgtgtcactgccgggacccggtctttccgtaccaaggccattacagcctgaatacgtcgcattgccctctgaggaaagccacgtgcatcaggaaccatctaagaggatcccgagctggagcggtaggccaatctggatggagaaaatggtgatgtgtagagttaaggtgccccatacattcgccgtgcactcctacacgcgtcccaccatttgtcagtattgcaagcgactcctaaaaggactcttccggcagggaatgcagtgcaaagactgtaaatttaattgccataagcggtgcgcctctaaggtgcctcgggactgcctgggagaagtaacttttaacggggagcccagctcccttgggaccgataccgacattcctatggatatagacaataacgatataaacagtgattcttcaaggggcctggacgacactgaggagccgagcccccctgaggataagatgtttttccttgatccctcagacctggatgtcgagagggacgaggaggcagtgaaaactatcagtccttctacctctaacaatatacctcttatgagagtggtccagagtattaaacacacaaaaagaaagagctctaccatggtgaaggaaggctggatggttcattacaccagtagggataacctccgtaagaggcactactggcggctagattcgaaatgcctgaccctattccagaacgaaagtggatctaagtactacaaggagatccctctgtctgagatactaaggatcagctcgcctcgcgactttacaaacattagccagggatctaatccccactgtttcgaaattataaccgacacaatggtgtatttcgtaggagagaacaacggcgattcttcacataaccctgtcctcgcagccaccggagtcggcctggatgtagcccagtcttgggagaaggcaatccgccaggcgctgatgcccgtgaccccccaggcttctgtgtgtacatcccctggccaaggcaaagaccataaggatctctctactagcattagcgtatcaaattgtcagatccaggagaatgtggacatatccacagtgtatcagatattcgcagacgaggttctggggtccggccagtttgggatcgtatacggaggtaagcaccgcaaaactggcagggatgtggctatcaaggtcatcgataagatgcgcttccccaccaaacaagagtcccagctgcgcaatgaggttgcaatcctccaaaatcttcaccaccctgggatcgtgaacttggagtgcatgtttgagaccccagaaagggttttcgtagtgatggagaagctgcacggtgacatgctcgaaatgattttgagcagcgaaaagtccagattgcccgaaagaatcacaaagtttatggtcacccagatcctcgtagcgctgagaaacctccattttaaaaatatcgtgcattgcgatctgaagccggaaaacgtgctgctcgcgagtgcagagccatttccacaagtgaagctgtgcgattttggctttgcgagaattattggcgaaaagagcttcaggaggtctgtggtaggcactcctgcttacctggcccctgaagtcctcaggagcaaagggtacaatcggagccttgacatgtggagcgtgggggtaataatctatgtcagtctgtctggcacgtttcccttcaatgaggacgaggacataaacgaccagatccagaatgctgccttcatgtaccccccaaatccatggcgggagatttccggcgaggccatcgatctgatcaataacctgctacaggttaaaatgcgaaaacgctactctgtggacaaaagcctgtcacatccttggttgcaggactaccagacctggctagacctgcgtgaatttgaaactaggataggtgagcgatacatcacgcacgaatccgacgacgctagatgggagattcacgcgtacacacacaatttggtgtatccaaaacacttcataatggcaccaaaccccgatgacatggaggaggacccatag

SEQ ID NO: 29158 - DNA, 4407 bp, synthetic construct
  source 1..4407: mol_type = other DNA; note = Synthetic coding sequence
atggctcctgtgcatggggacgattgtgagatcggcgctagcgcattgtctgattccgggtctttcgtgtcatcccgcgctcgcagagagaagaagagtaaaaagggcagacaggaggcgttggaacgacttaaaaaggccaaggccggtgaaaaatacaaatatgaggtggaagattttacaggtgtctatgaggaagtggatgaagaacagtactctaaactggtgcaagctcggcaggacgatgactggattgtcgacgatgatggaatcggctacgtggaggatgggcgtgagatcttcgacgacgacctcgaagatgacgcactggatgccgacgagaaaggaaaggacgggaaggcccgtaataaggacaaaaggaatgtgaagaagttggccgtgaccaaacccaataacatcaagtctatgttcatcgcttgtgcagggaagaaaacggccgataaggccgtggacctctctaaagacgggctccttggtgatatcctgcaagatctaaacactgaaacccctcagattacccctcccccagtgatgatcctgaaaaagaaacggtcaattggagcctcccctaacccctttagcgtgcacaccgctacagcggtcccctcaggcaagatcgcgtcacccgtcagcagaaaggagccccctctgactcctgtgcccctgaagagagccgagtttgccggagacgacgtacaagtggagtcaaccgaagaggagcaagagtccggcgctatggagttcgaggatggagattttgatgagcccatggaggtagaagaggttgacctcgagccaatggccgcaaaggcttgggataaggaatccgagcccgctgaggaggtcaaacaggaggcagattccggaaagggaacagtgtcatatcttggtagcttcctgcccgacgtgtcttgctgggatatagatcaggaaggggactcctctttttcagtccaggaggtgcaggtagacagctcccatctcccgctcgtgaagggggctgatgaggaacaagtgtttcatttctattggttagacgcatacgaggaccaatataaccagcctggcgtcgtttttctgttcggcaaggtgtggatcgaaagtgctgaaacccacgttagctgctgtgttatggtgaaaaatattgagcgtacactgtattttctgcccagagaaatgaaaattgatctcaataccgggaaagagactggcactccaattagcatgaaagatgtctacgaagagtttgacgagaagatcgccaccaagtataagatcatgaaattcaaatcaaaacccgttgaaaagaactacgcattcgagatccctgatgtaccggagaagtctgaatatctggaagtgaaatattccgccgagatgccacagctgcctcaggatcttaagggggaaaccttcagccacgtgttcgggacaaacacctcatctttggagttattcctgatgaacagaaaaatcaaaggtccctgctggctagaggtaaaatctccacagctgctaaaccagcccgtcagttggtgcaaggtcgaggccatggccttgaagcctgatcttgtcaacgttatcaaagatgtgtcaccacctcccctggtcgtgatggcgttttccatgaaaactatgcagaatgcaaagaaccatcagaacgagattattgctatggctgctcttgtgcaccatagttttgcattagacaaggccgcacctaagccaccgtttcagtctcacttttgcgtcgtatcaaaaccaaaagattgtatctttccttacgcattcaaggaagtgatcgaaaagaagaatgtcaaagtagaagtcgctgcaacagaacggaccttgcttggcttttttctggccaaagtacacaagattgatcctgatattattgtgggtcataatatatacggcttcgaacttgaagttctgctgcagagaatcaacgtgtgcaaagcccctcattggtctaaaatagggcgactcaaacgatcgaatatgccaaaattaggaggcaggagcggatttggcgagcggaacgcaacttgcggccgaatgatatgtgatgtggagattagcgccaaagagctgatcagatgtaagagttaccatctgtccgagctcgtgcagcagattctgaagaccgaaagagtggttatccccatggagaacatccaaaatatgtacagcgaaagcagccagctattatatctactggagcatacttggaaggatgcaaaatttatcctgcagattatgtgcgagctcaacgtgctgccattggccttgcagatcactaacatcgccggaaatattatgtcccgaaccctgatgggcggaaggagtgaacggaacgagtttctgctcctgcacgctttttacgaaaataattatatcgttcccgacaagcagatcttcaggaagccacagcagaagcttggagacgaggatgaggagatagatggtgacacaaacaagtataagaaaggacggaagaaggcggcatatgccggtggccttgtgctagaccccaaagtcggtttctacgacaagttcattctgctcctggattttaactccctgtacccaagcattatacaggagttcaacatttgttttaccactgtgcagcgtgttgcaagcgaggcccagaaggtaaccgaggacggcgaacaggagcaaataccagagttacctgaccccagcctggaaatgggcatcctccccagagaaattcgtaagctcgtcgaacgcagaaagcaagtgaaacaattaatgaagcagcaggacctgaaccctgaccttattttacaatacgatatcagacagaaggcacttaagctaacagcgaacagtatgtacgggtgcctcggattctcatatagccggttctacgccaagccactggctgcactagtcacttataaaggcagagagatcctgatgcacacgaaagagatggttcagaaaatgaacctcgaggttatctatggcgacacagactccatcatgattaacaccaattccacaaatctcgaggaagtgttcaaattaggaaataaggtgaagagcgaggttaacaaactctacaaactgcttgagatcgacatcgacggagttttcaaatccttactgctccttaaaaagaagaagtacgcagcactggttgtggaacccaccagtgacggcaactacgtgactaagcaggaattaaagggactggatatagtaagacgggactggtgcgacctggcaaaagatacaggaaatttcgtgatcggccagatcctttccgaccagtcacgcgacaccattgtggagaacatccaaaaacggctgatcgaaatcggtgagaacgtgctgaacggttccgtgcctgtgagccagtttgagattaacaaggccctcaccaaggatccgcaggattaccctgataagaaatctttgccacacgtacatgtcgccctgtggatcaactctcagggtgggagaaaagtcaaggccggtgataccgtaagctatgtcatttgtcaggacgggagcaatctgacagcatcccagagagcctacgcgcctgaacagctgcagaagcaagacaatctaaccattgatacacaatattacctggcgcaacagatacatccagtggtggccagaatctgtgagcctatagacggcattgacgcagttctaatcgccacgtggttggggctcgacccaacacaatttcgggtgcatcactatcataaagatgaagaaaatgatgctcttctcggtggaccagctcagttgacagacgaggaaaagtatcgcgattgcgaacgattcaaatgtccctgtcccacctgcggcactgaaaacatttatgacaatgtgttcgatggtagcggtactgacatggaaccaagcctttataggtgctctaacatcgattgtaaagcctcccctctgacattcaccgtgcagctcagtaataaattaataatggacatcaggcgcttcatcaagaagtactatgatggctggctgatttgtgaggaacccacctgtcggaaccgcactaggcacctaccactccagttttcacgcacaggacctctctgccccgcttgtatgaaggccacattgcagccagagtacagcgataagtcattgtatactcagctgtgtttttacaggtatatttttgatgctgagtgtgctcttgagaagctcaccacagaccacgaaaaggataaattgaaaaaacagttttttacccccaaggtgctccaggactaccgtaagctgaagaatacagccgaacagttcctgtcacgctcagggtattctgaggtgaatctgagtaaattattcgctggctgcgctgtgaagagctag

SEQ ID NO: 29159 - DNA, 399 bp, synthetic construct
  source 1..399: mol_type = other DNA; note = Synthetic coding sequence
atggtggaacctttcctggggacctggaaattagtgtcctcagagaattttgaagactatatgaaggagttaggagtcaactttgctgccagaaatatggctgggctagtcaagccaactgtgactatttccgtcgatggaaagatgatgaccatcaggacagaatcatcattccaggacactaagatatcgttcaaactcggcgaggagttcgacgaaactacagcggacaaccgcaaggtcaagtctacgattacattggaaaacggatccatgatccatgtccaaaagtggctcggaaaagagacgaccattaagcgaaagatcgttgacgagaaaatggtcgtcgagtgcaagatgaacaatatcgtgagcacgagaatatatgaaaaggtttag

SEQ ID NO: 29160 - DNA, 555 bp, synthetic construct
  source 1..555: mol_type = other DNA; note = Synthetic coding sequence
atggataggggagagcaggggttactgcgaacagaccctgtgccagaggaaggggaagatgtcgctgccaccatctccgccaccgagacgctgagcgaggaagagcaggaggagcttaggagagagttagccaaggtggaggaggagatccaaacactgtcccaggtactcgccgcaaaggaaaaacatctcgccgagatcaagcgcaaactggggataaattcactacaggagctgaaacaaaacatcgctaaaggctggcaagatgtgaccgccacctcggcctacaagaagactagcgaaaccttaagtcaggcagggcagaaggcgtccgccgcatttagcagtgtgggcagcgtgattactaagaagctggaggatgtgaagaattcccccacgtttaaaagctttgaggagaaagtagaaaatctcaaatcaaaggtgggcggtaccaaaccagcagggggagatttcggagaggtactgaattccgctgcaaatgcctccgccaccaccaccgaaccccttccagagaaaacccaggaatctctgtag

SEQ ID NO: 29161 - DNA, 675 bp, synthetic construct
  source 1..675: mol_type = other DNA; note = Synthetic coding sequence
atggattgtcgcgagatggacctttatgaggattatcaatcaccatttgattttgatgccggtgtcaacaaaagctacctttatctgagcccttcgggcaactcctcgccacccggatcccctacgctgcagaagttcgggctgctgagaacagatcccgtgcccgaggagggagaagacgtcgcagctactatatcagcaacagagacactgagtgaggaggaacaggaggagcttcgacgtgaactagctaaggtggaggaggagatccagactttatctcaggttctcgcggcaaaagaaaagcacctcgcagagatcaagcgcaagctcggaattaattccttgcaagaactgaaacagaacatcgccaagggctggcaggacgtgactgcgacctcagcttacaagaaaacatccgaaaccctaagtcaagcgggtcagaaggcatcagcagcattttcctcagtaggttcagtgattactaagaaactggaggacgtgaaaaacagtccaaccttcaaatcttttgaggaaaaggtggagaaccttaagagcaaggtaggcggaacgaagccagcagggggagatttcggtgaagtactcaacagcgctgcaaatgcctccgccactactaccgagccactgccagagaagacgcaggagagcctgtag

SEQ ID NO: 29162 - DNA, 285 bp, synthetic construct
  source 1..285: mol_type = other DNA; note = Synthetic coding sequence
cccagagccgcacggtctagaggtccagctgtgtctcgtccaagagctcctcggccagaacttaccaccgaagccggtgagcctgctcggcgatgcgtcccaccttacgaacatcggccaggcatgcagtgcgcggtgaccaccccacccccatcctattacccgtaccccaacttacggtgggatacaagccactttaagaagtccgggggacctcagaggaataattacgtgattcacccggagttcgtctccgagacctatccggattatagatgctggtag

SEQ ID NO: 29163 - DNA, 1110 bp, synthetic construct
  source 1..1110: mol_type = other DNA; note = Synthetic coding sequence
atgcccgtggttacgaccgatgccgagagtgagaccggaatacccaagagcctgagtaacgagcctccctctgagacaatggaggagatagaacacacatgcccacaaccgcgtctgacactgaccgctcccgctccgttcgctgacgagacaaactgccagtgtcaggcaccgcacgaaaagttaactattgcacaggctcgcctgggcacccctgcggatagaccagtgagagtttacgcagatgggattttcgatttgtttcactcggggcacgctagagccctgatgcaggctaagactctgttccctaattcttacctcctggtgggtgtctgctcagacgacctgacccacaaatttaaggggtttacagtgatgaatgaggccgagcggtacgaagctctgagacactgtaggtacgttgacgaagttatccgcgacgccccttggacactgacgccagagttcctggagaagcataaaatcgacttcgtcgcgcacgatgatattccttactctagtgccggatcagatgatgtctataagcatatcaaggaagccggaatgtttgtccctactcagcgaaccgagggaatctccactagtgacatcatcactaggatcgtgcgagattatgatgtttacgcacgaaggaacctacagaggggatatactgccaaggagctgaacgtgagcttcatcaacgagaaaaggtaccgatttcaaaatcaagtggacaagatgaaggaaaaggtcaagaacgtggaggagcgcagcaaagaatttgtcaacagggtggaggaaaagtctcacgacctaatccagaagtgggaagaaaaatccagagaatttatcggtaactttttagagctgttcggaccagacggcgcttggaagcagatgttccaagagaggtccagtcggatgctacaggccctgtcccctaagcagtcacctgtcagttccccgacacgtagcagatctccttcccgctctccctcgcctaccttttcttggctgccactgaagacgtcaccaccctcctccccaaaagcggcttccgcctccatctcctctatgtctgaaggagacgaagatgagaaatag

SEQ ID NO: 29164 - DNA, 1056 bp, synthetic construct
  source 1..1056: mol_type = other DNA; note = Synthetic coding sequence
atggttggacatcaggagtgtatcatggaagaagacaatcgcgctcctcagctatggcgaaagacactcaccgctcccgctcccttcgctgacgagactaactgtcagtgccaggcacctcacgagaaactcactattgctcaagcacgcctggggaccccagcggacaggccagtccgggtgtacgctgacggcatctttgatttatttcacagtgggcatgccagggccctcatgcaggctaaaactcttttcccaaatagttaccttcttgtgggggtctgctccgatgacctgacacacaagtttaaagggttcacagtaatgaacgaagccgaaaggtacgaggctctccgacactgcaggtacgtggatgaagtcatacgggacgccccttggactctgaccccagagtttctcgaaaaacataaaatcgactttgtggcccacgatgacatcccgtactcaagcgctggctcagatgacgtgtataagcatatcaaagaggcgggaatgtttgttcccacacaacggaccgaaggcatttcaacctccgacattatcactcggatagtgcgcgattatgacgtatacgctaggcgtaacctgcagcggggttatactgcaaaggaattgaatgtttcatttattaacgaaaaacggtatcgtttccagaaccaggtggacaaaatgaaggaaaaggtgaaaaacgtggaagaacgctctaaagagttcgtcaatcgtgtcgaggagaagagtcacgatctgattcagaaatgggaggagaagtccagagaatttatcgggaatttcctggagctgttcgggccagatggcgcttggaagcagatgttccaggagaggagcagcagaatgcttcaagccttgtctcctaagcagtccccggtcagttcacctacaagaagtagatctccaagtcggtcaccctctccaaccttctcctggctgcccttgaagacttcccccccatcttctcccaaagccgcaagtgcatccatctcttccatgtctgagggtgatgaggatgaaaaatag

SEQ ID NO: 29165 - DNA, 600 bp, synthetic construct
  source 1..600: mol_type = other DNA; note = Synthetic coding sequence
atggcagacaagtcaaaattcattgagtacattgacgaagcgctggagaagtcaaaggagacagctctttcacacctcttcttcacgtatcaaggaattccatatccgatcactatgtgcacctctgagacgtttcaagcgctggatactttcgaggcccgacacgatgacattgtgttggcctcataccccaagtgtgggagcaactggatactgcacatcgtaagtgaactgatttatgccgtgagcaagaagaaatataaatatccggaattccctgtactggagtgtggtgacagcgagaagtatcagaatttggctgcagggattaagcagattgctgagttcctaggcttcttcttaacgggagagcagatccaaacgatcagtgtacaaagcaccttccaggcaatgagagcaaaatcacaggatacgcacggtgctgtcggaccgttcctgttccggaagggagaggtaggagactggaagaacctcttttccgagatccagaatcaggagatggatgagaaatttaaagaatgtctggcagggacatctctgggagcaaaactcaagtacgaatcctactgccaggggtag

SEQ ID NO: 29166 - DNA, 1527 bp, synthetic construct
  source 1..1527: mol_type = other DNA; note = Synthetic coding sequence
atgaggtgcccaaagtcagcagtcactatgaggaacgaagagctcctgctctctaacggaacagctaataaaatgaatggcgctctggaccactccgatcagcccgatcctgatgccatcaagatgttcgtgggacagattccaagatcatggtccgaaaaagaactcaaagaactcttcgagccttacggggcagtgtaccagatcaacgtactccgggataggtcacaaaatccaccgcagtcgaagggctgctgttttgtaacgttctacaccagaaaggcagccctggaggcccagaatgccctgcataacattaaaaccctgcctggaatgcaccatcccatccagatgaaacccgctgattccgagaaatcgaacgccgtcgaggaccgcaagttattcatcggcatggtgagtaaaaagtgcaatgaaaacgatatcagagtgatgttctctccctttggacaaattgaagagtgtcgtatccttcgaggccctgacgggttaagccgtggctgtgccttcgtgaccttctctacacgtgcaatggctcaaaatgccattaaggcaatgcaccagagccagaccatggagggctgctccagtcctatcgtggtgaaattcgccgatacgcagaaagacaaagagcagcgcagactgcagcagcaactcgcacagcagatgcaacagctgaatactgcaacatggggaaatttaaccggtctggggggtctgaccccccagtacctcgccttactgcagcaagccacgagttcctcgaatttgggtgccttcagcgggatccagcagatggcaggcatgaatgccttgcaactccagaacctggcaacactggctgcagctgccgctgcagcccaaacctctgcaacttctactaacgctaacccattgtccaccacaagtagtgctttgggcgcactgacttcgccagtcgccgcttccacacctaattccacagctggcgctgctatgaactcgcttacttcattaggaactctgcagggcctagctggcgcaacagtcggccttaataacatcaatgcacttgccggaatggcagccttgaatggcggtttgggagccaccgggctgacaaacgggaccgccggaacaatggatgcgctcacacaggcgtactcgggaattcagcagtatgcagctgcagctttgcctaccctgtactcccagagtcttctgcagcaacaatcagctgccggatctcagaaggagggccctgaaggcgctaatctctttatttatcacctccctcaggaatttggcgaccaggacatcctgcagatgttcatgcctttcggcaatgtgatcagtgcgaaggtcttcatcgacaaacagacgaatttgtccaagtgctttggctttgtgtcctatgataatccggtatcggcacaggccgctattcaggctatgaatggcttccagatcggcatgaagcgattaaaagtgcagctgaaacggtcaaaaaacgactctaaaccctactag

SEQ ID NO: 29167 - DNA, 1215 bp, synthetic construct
  source 1..1215: mol_type = other DNA; note = Synthetic coding sequence
atgggaagcagccaggaggaaggcttacgatgtcagcccagtcaacccgatcacgatgccgacggccactgcgggcctgatctcgaaggcgcagaacgggcaagcgcaacaccagggcctccgggactgctaaattcccacaggccagctgatagcgacgatactaacgcggcaggcccatccgctgctcttttagaaggcctgctgctggggggaggcaagccaagcccccactccactcgccctgggccattcttttacattggaggaagcaatggcgcaacaatcatttccagctactgcaagtctaaaggatggcagcgtattcacgactcccggcgtgacgactacacgcttaaatggtgcgaagtgaaaagcagagatagctatggctccttccgcgaaggcgaacaactgctgtaccaactgccaaataataagctgttgacaaccaaaatcggcctgctatcaacactgcggggacgcgctagggcgatgtcgaaagcctcaaaggtccccggaggggtgcaagctcgcctggagaaggacgccgcagctcctgcgctggaagacttgccttggacctctcctggatatctgagaccgcagcgggttctcaggatggaagaattttttccagaaacatataggcttgatctcaagcacgaacgagaagcattcttcaccttgtttgacgaaacacagatttggatctgcaagccaacagcctcgaaccaggggaaaggtatttttctgctaagaaatcaggaggaagtggctgcattacaagcaaaaaccaggtccatggaagacgatccgattcaccacaaaacacccttccgaggccctcaggctcgggtcgtgcagcgatacattcagaatccactgttagtggatggcaggaaatttgacgtcagatcttatcttttgatcgcttgcacgacgccttacatgatattctttggacacgggtacgcacggctcacactcagcctgtatgacccccactcctcagacctgggcggacacttgaccaaccagttcatgcagaaaaaatccccactgtacatgcttctgaaagagcataccgtttggtctatggaacatctgaatagatacatcagcgacacattctggaaagccaggggcttggctaaagactgggtctttaccaccctgaaggtgcggccactgtgtcccccagtatgggaatag

SEQ ID NO: 29168 - DNA, 2022 bp, synthetic construct
  source 1..2022: mol_type = other DNA; note = Synthetic coding sequence
atggaccattcctgcacccggttcatacatagaagaggacccccaactcggacgagagctggctttaaaagagggaaacgccctagaattcagcaacgccctcgggcaagggtgagcggaaccatcccggctagtagactgcatcccgctccagccagccagccgggtccttgcccagctccaggccattgcccagttggtcccgcacacgaaagacctatgggaagtagccaggaagagggattacgttgccagccctcccaacctgatcatgacgcggacggacactgtgggcctgacctggagggtgccgagcgcgcatcagcaactcccggaccgcctggactgttgaatagccaccgcccagcagactctgacgacaccaacgctgcaggaccatctgcagcgctgttagaagggctgctgctgggcggaggaaagccctcccctcattcgactagacccggtccctttttttacatcggcggtagtaacggggctaccataattagttcatactgcaagtcaaaaggctggcaaaggatccacgatagcagacgtgatgactacaccttgaagtggtgcgaggtgaagagcagagacagttatgggtcctttagagagggggaacaattactataccagttgcctaacaataagttgctcacgacaaagattggcctcctgagcactctgcgcggtcgcgctcgcgcaatgtcaaaagctagcaaggtgcccggaggagtccaggcaagactggaaaaagacgctgccgctccagctctggaggaccttccctggactagcccaggctatctgcggcctcagagagtgttgcgaatggaggagttctttccagagacatacagactggacttaaaacatgagagagaggcctttttcactctgtttgatgagacacagatatggatctgtaagcctaccgccagtaatcaaggcaagggaatctttctgctgcgaaatcaggaagaagtggcggcacttcaggcaaaaacaagatccatggaggatgatcctatacaccataagactccattcaggggacctcaggcacgggttgtgcagcgttatattcaaaaccccttgctggtggacggacgtaaattcgacgttcgatcctatctgttaattgcctgcacaactccctatatgattttcttcggtcacggatacgctcggctgacgctctcactgtatgatccccatagctcagatctgggtgggcacttgacgaaccagtttatgcaaaagaagagcccactttatatgcttttgaaggaacacactgtctggtccatggagcatttgaatcgttatatctctgacacgttctggaaggcccgaggtttggccaaggattgggtattcacgactctgaagaaacgtatgcagcagataatggcacactgcttcctcgccgctaagcccaagttagattgcaaactcggctatttcgaccttattggatgtgatttcctgatagacgataactttaaagtgtggctcctggagatgaattccaacccagccctgcacaccaattgtgaggtcctcaaggaagtcatccccggtgtggtaattgagactctggacctagtgctcgagacattccggaagtctctccgcggtcagaagatgctgcccttactgtcccaaagaagatttgtgcttctgcacaatggagaagccgaccccagaccccatctaggaggctcctgttctctccggagatggcctcctctcccgacacgacaggcaaagtcctccggtcctcccatgccgcatgccccagatcaaccaggcgctaggagacccgcaccaccaccactagtccctcagcgaccccgtccccctggcccagatcttgattctgcacatgacggggaaccccaggcccctgggactgagcaatctggaaccggtaatcgccatcctgcccaggaaccctccccagggacggctaaagaggaaagggaagagcctgagaatgccaggccatag

SEQ ID NO: 29169 - DNA, 2022 bp, synthetic construct
  source 1..2022: mol_type = other DNA; note = Synthetic coding sequence
atggaccacagctgtaccagattcattcataggcgcggaccaccgacacgaacgagagctggtttcaagcgcggaaagcggcctaggatccagcaacgcccacgcgcaagggtatcaggcactattccagcttctcgacttcaccctgcccctgcatcgcaacccggtccctgtcctgcacctgggcattgtcctgttgggcctgcccacgaaagacctatgggatcttcccaagaagagggactccgctgtcagcccagccagccagatcatgatgcggatggacactgcggccctgatctggagggggctgagagggctagtgcgacgcccggacccccagggcttctgaacagccaccgccctgcagactcagacgacactaatgccgctggaccctctgcagccctgctcgaggggctgctgctaggaggtggtaagccttcaccccacagtacacgcccagggcctttcttttatatcgggggaagcaacggggcaacaataatatcctcatactgcaaaagcaaaggctggcagcgcattcatgattcacggagggacgactacactttaaaatggtgcgaagttaagagccgcgattcctatgggtccttccgagaaggggagcagttgctctatcaacttccaaacaataaactgctgaccacaaagatcggtctcctcagcacattgaggggcagagctagagccatgtcaaaggctagcaaggtgccaggcggagtgcaggcaaggcttgaaaaagacgccgcagctcccgctctcgaggacctgccctggacttctcccggatatttgcggccacagagggtgcttagaatggaagaattttttccagagacctatagactggacctgaagcatgagcgagaggcattttttacgttattcgatgagacccagatctggatctgcaaaccaaccgctagcaatcaaggaaaagggatttttctgctgagaaaccaggaggaagtggcagcactccaggcgaaaacaaggagcatggaggacgaccctatacaccataagaccccgtttcggggacctcaggccagggtggttcagcgatacattcaaaacccactcctggtcgatggcagaaaatttgacgtgagaagttacctgctgatcgcctgcacaactccctacatgatcttttttggtcatgggtatgcgagacttacacttagcctatatgatccccactcatccgatttggggggtcacctaacgaaccaatttatgcagaagaaatcgcccctgtatatgttacttaaggagcacacagtttggagcatggagcacctgaaccgctatatttcagacacattttggaaagctagaggtctggctaaggactgggtattcacgacgctgaaaaagcgcatgcagcaaatcatggcccattgctttctggctgcaaaacccaagttggactgtaagctcgggtatttcgacttaatcggttgcgatttcctgattgatgataattttaaggtgtggctactagagatgaatagcaaccctgccctgcatacaaactgcgaagtgttaaaggaggtcataccaggggttgtgattgaaaccctggacctggtgctggaaacattcagaaaatccttgcgcggtcagaaaatgttaccgctgctgagccagcgccgatttgtgctcctgcacaacggcgaagccgaccccagaccccatctcggtggcagctgctcattgcggagatggcccccactacccacacgccaggctaaatcttcaggtcccccaatgcctcatgcaccagaccagccgggagcgaggaggcctgcccctccacctttggtcccccagagacctcgcccacccggtcccgatttggacagcgcacatgatggcgaaccacaggcgccaggcacagagcaaagcggtacaggcaatcgccaccctgcccaggaaccctcccccggtaccgccaaggaagagagagaggaacccgagaatgcacgcccatag

SEQ ID NO: 29170 - DNA, 393 bp, synthetic construct
  source 1..393: mol_type = other DNA; note = Synthetic coding sequence
atgaccgaggattcgcagcgcaactttaggagcgtgtattacgaaaaagtgggttttcgtggtgtcgaggagaaaaagtcgttggagattctgctcaaggatgatcgattagataccgagaaactgtgtacctttagtcagaggtttccactcccaagtatgtatagagctctggtgtggaaagtacttctgggtatcttgccaccccatcacgaatcccacgctaaggtgatgatgtatcggaaagaacaatatttggatgtgctgcacgcccttaaggtggtcaggttcgtgagcgacgccactccccaggcagaagtttatctgaggatgtatcaactcgaatcagggaaattgcccagatcaccttccttcccattagagcccgattag

SEQ ID NO: 29171 - DNA, 882 bp, synthetic construct
  source 1..882: mol_type = other DNA; note = Synthetic coding sequence
atgactgaggactcacaacgaaatttccgaagcgtgtactacgagaaggttgggttcagaggggtggaggaaaaaaagtcactagagatccttttaaaagacgataggctggacaccgaaaagttatgcaccttctcgcagaggttccccctgccttcaatgtacagagccctcgtatggaaagtcctcctagggatcctgccgcctcatcacgaatcacatgccaaggtgatgatgtaccggaaggagcagtacctcgacgtgttgcatgcacttaaagttgtacgatttgttagtgatgccaccccccaggcagaagtataccttaggatgtatcaactggaatccggaaaactcccgaggagccctagctttccactcgaacctgacgatgaagtgtttctggccatcgccaaggccatggaggaaatggttgaggattcagtggattgttactggataacccgcagattcgtcaaccagctgaacactaagtatcgagattcactgccgcagctgcctaaggcctttgaacaatatctgaatctggaagatggccgactgctcacgcacttacgcatgtgtagcgctgcgccaaagctcccatacgatctctggttcaagcggtgcttcgccggatgcctaccagaatcatcactacaacgggtttgggacaaagtagtttctggcagctgcaaaattctagtgttcgtcgcagtcgagatcctcctgactttcaagattaaggttatggcacttaacagcgctgagaagatcacgaaatttctggagaacatcccgcaggactccagcgacgctatcgtatcaaaagcaattgatctatggcacaagcactgtgggacacccgtgcactcgtcgtag

SEQ ID NO: 29172 - DNA, 801 bp, synthetic construct
  source 1..801: mol_type = other DNA; note = Synthetic coding sequence
atgactgaggattcacagcggaacttcagaagcgtctactatgagaaggtgggtttcagaggagtggaggagaaaaaatccttagagatcctgcttaaagacgatcggctgggaattctgcctccacaccacgaatctcatgccaaagtgatgatgtatcgcaaggaacagtatctggatgttctgcatgccctgaaagtggttagatttgtgtcagatgcaaccccccaagctgaggtctatctgagaatgtaccaattggagagcggcaagctccccagatcaccttcgttcccactcgagcctgacgacgaggtgttcctcgctatcgccaaagcgatggaggagatggtggaagactccgttgattgctactggataacccgtcggttcgtgaatcagctgaatacgaagtatagggattccctgccacaactgcccaaagcctttgagcaatatttaaacctcgaagacggtagactgttgacacatctgcgcatgtgcagcgctgctccaaaactgccttatgacctatggtttaagcgctgcttcgctggctgtctccctgaaagcagcctgcaacgtgtgtgggacaaggtcgtgagcgggtcctgcaaaatcttggtgtttgtggcagttgagatccttctcaccttcaagatcaaggtgatggcgctaaattctgctgagaaaatcactaagttcttggaaaatatcccccaggactcttccgatgctatagtaagtaaggctatcgacctgtggcataagcactgcgggactcccgtgcacagctcctag

SEQ ID NO: 29173 - DNA, 3672 bp, synthetic construct
  source 1..3672: mol_type = other DNA; note = Synthetic coding sequence
atgatgagcttatctgtccgcccacagagaaggctgctcagtgctagggtgaataggtctcagtcttttgcaggagtacttgggagccacgagagaggaccgagtctgagcttccgcagctttccagtgttttcaccaccaggacctcctcgaaagcctcccgctctctcgcgggtgagccgaatgttttctgtagcccacccggctgccaaagtgccccagcctgagcggttggacctagtatacactgccttgaagagagggctaaccgcctatttggaggttcaccagcaggagcaagagaaactacaaggacaaatcagagagtccaaacggaacagtagattaggttttttgtacgatctagataagcaggtcaagagcattgaacgttttctccgccgtttggagtttcatgccagtaaaattgacgaactgtatgaggcgtattgtgtgcagcgccgactgcgcgacggagcatataacatggtacgcgcttatactaccggcagccccggttctagagaagctcgggattccttagcggaggctacaaggggccacagagagtatactgagagtatgtgcctgctcgaatctgaactggaggcccagctgggagaattccacctgcggatgaagggcctggcgggatttgcccgactttgcgtgggcgaccagtatgaaatctgcatgaagtacggacgacaaaggtggaagctaaggggacgaattgagggatctgggaagcaagtctgggattcagaggaaactattttcctgcctctattgacggaattcctctctatcaaagtcactgagctgaaggggctggcaaatcacgtcgtagttgggtccgtgagctgtgagactaaagatttgtttgcagccctgcctcaggtggttgccgtggacattaacgatcttggcacaattaagttatcactggaagtgacatggtctccattcgacaaggatgatcagccatcagcagcttcctcggtgaataaagcaagcacagtgacgaaacgcttctccacgtacagtcagtccccgccagatactccctccctgcgcgaacaggcattctataacatgctgagaagacaagaagagctggaaaacgggacagcctggagtctcagttctgagtctagtgatgacagctcttctccacaactgtccgggaccgctagacacagtcctgctccgagaccacttgtgcaacagcccgaacccctgcccattcaagttgctttcagaaggccagagacacccagctctggtccacttgacgaggagggagccgtagccccagtgttggcgaacggccacgctccatactcaaggaccctgtcacacatcagcgaagccagtgtcgatgccgctcttgcagaggcctcagtggaagccgttggaccagagagtcttgcttgggggccttccccgccaacccaccctgcgcctacacatggcgaacatccttcccccgtgcccccagcactggacccaggccactcagcaacgtcgtcgacactcggcaccacaggaagcgtgcctacttcaaccgatcctgcaccctccgctcacctggactctgtgcacaaatccacagattccggccctagtgaactgcccggacccacacatacgaccaccggctctacctactccgcaatcaccactactcactctgccccttcacccttgacccacacgacgacaggctcaacacataaacccattatcagtacgctgacgactaccggccctaccctgaatatcatcggaccagtgcagaccactacctctcccacacacactatgccatctccgacccatactaccgcgtccccaacccatacttccacatctccaacccatacaccgactagcccgacgcacaaaacatccatgtccccgccaacgaccacgtctcccactccgtccggaatgggtctcgttcaaacagctacttctcccactcaccccaccacttcaccaacccatccaacaactagccctattctaatcaacgtttccccctcaacctccctggaacttgctacgctgagcagcccttctaaacatagcgatcccaccctgccgggtacagactccctcccatgctccccccctgtttcaaatagctacacgcaggccgaccctatggcacctcggacaccgcatccttctcccgctcactcctcacggaaaccgttgaccagtccggcacccgacccctctgaaagtaccgtgcagtctctgtccccgacccctagcccaccaacccctgccccacagcactccgatctgtgtctcgcgatggctgtgcagacaccggtgcccacggcggcaggcggttcgggggataggagtctggaggaggcgctgggggcattaatggctgcactcgatgactacagagggcaatttccagagctgcagggactggaacaggaggtaacgagattggagagcctgctgatgcagagacagggcctcaccagatcacgcgctagcagtctaagcatcactgttgaacatgcgctggagtctttttcctttcttaacgaagacgaggatgaggataatgatgtccccggagataggcctcctagtagtccggaagccggagcagaagattctatcgacagtccgtccgcccgtccgctgtcgactggctgtccagccctcgatgccgctctcgttcggcacctgtaccactgttctcgtctgctgctaaaactgggtacattcgggccactacgctgccaggaggcctgggccttggagagactgctcagggaggcgagagtgttggaagccgtatgtgaattctctaggagatgggaaattcccgcaagctcagctcaggaggtggttcagttctcagcctccagacccggattcctgacattctgggaccaatgtacagagaggctgagttgcttcctatgccccgtggaaagagtcctgctcactttttgcaaccagtacggtgcgaggttgagcctgagacagcccggtcttgcggaagcagtttgtgtgaaatttctggaagacgctcttggacagaagctgcctaggcgacctcagcccggtccaggcgagcagctgacggtgttccaattttggtcttttgtggagacattggattcacccacgatggaggcctacgtcacggaaacggccgaagaagtcctgctggtgagaaatctgaatagcgatgatcaggcagtagttttaaaggccctgcgcctggctcctgagggcaggctgagacgcgatggcttacgggcactctcatccttacttgtgcacggcaacaacaaagtgatggccgcagtctctacacagctgcggtcattatcgctggggccaacgtttcgtgaacgcgcactgctctgctttctcgatcaactggaagacgaggatgtgcagactcgggttgcaggctgcctggcccttggatgcatcaaagcaccagaagggatcgagcctcttgtatacctttgtcagacagatacagaagctgttcgtgaagcagcaagacagagtctgcagcagtgcggggaggagggccagagcgctcatcgcaggctggaggagtccctcgatgccctcccacgcatttttgggccaggatccatggcttccacggcattctag

SEQ ID NO: 29174 - DNA, 123 bp, synthetic construct
  source 1..123: mol_type = other DNA; note = Synthetic coding sequence
atggctgatgaggaactcgaggcactgcgtagacagcgcctcgccgaattacaagccaagcatggcgatcccggagacgctgcccagcaggaagccaagcacagtagtaccgaagagaaatag

SEQ ID NO: 29175 - DNA, 414 bp, synthetic construct
  source 1..414: mol_type = other DNA; note = Synthetic coding sequence
atgaaaccgccagctgcccaagggtctcctgccgctgcagctgccgcagcgcctgccctggactctgcagctgccgaggacttatccgacgcactctgtgaattcgatgccgtgctggcagactttgctagcccctttcacgaaaggcacttccattatgaagagcatctggagcggatgaagaggcggtcctctgcctctgtgtccgatagttctggattcagcgacagcgagtccgccgactctctgtatcgaaattcattcagctttagcgacgagaagctgaattcccctacggattcaactcctgccctactttcggcgacggtgacgccacagaaagccaagctgggtgacacaaaggagctggaggcattcatcgctgacctggataaaaccctggcgtctatgtag

SEQ ID NO: 29176 - DNA, 1593 bp, synthetic construct
  source 1..1593: mol_type = other DNA; note = Synthetic coding sequence
atgcctaatgtgctgctccctccaaaagagtcgaacctgtttaaaagaatcttgaagtgctacgaacagaaacaatataagaatggccttaaattctgcaaaatgattttaagtaaccccaaatttgcagagcacggtgaaacgttagccatgaagggacttactctgaattgcttgggaaaaaaggaggaggcctacgaattcgtgagaaagggcctgcgtaatgacgtcaagagtcatgtctgctggcatgtgtatggattactgcagcgttcagataagaagtatgacgaggccattaagtgttatcgcaacgctttaaaactcgacaaggacaatctgcagatccttcgagatttaagtctcctacagatccaaatgcgggacctggagggctaccgcgagacccgctaccagcttttgcagctgcggccaacccagagggccagctggattggatatgccatcgcttatcacttgttgaaagactacgatatggcactgaaactgctggaggaattccggcaaactcagcaggttccccctaacaaaatagactatgaatacagtgagttgatcctgtatcaaaatcaggtcatgcgagaagctgatttgctacaagagtctttggagcacattgaaatgtacgagaagcagatttgcgacaagctgctcgtggaggaaatcaagggagagattctgctgaaactaggcaggttgaaggaagcctcagaggtgttcaaaaatttgattgataggaacgcggaaaactggtgttattatgagggacttgagaaggcattgcaaatttcaactctagaagagcgtctgcagatctacgaggagatttccaagcagcatcccaaggccattaccccacgtcgtttgcctctgacactagtgcccggtgaaagatttcgtgaactcatggacaagttcctgagagtgaacttctccaaggggtgtccacccctctttacaacgctgaagtcactgtactataacaccgagaaggtatcaatcattcaagagctggtgaccaactatgaggcctctttgaagacttgcgacttcttctctccttacgaaaacggggagaaagagccacccactaccctgctgtgggtgcagtactttctggcacagcatttcgacaagcttggccagtattcactggctctcgactacattaacgcagcaatcgccagtacgccaactctgattgaactcttttacatgaaagccaaaatctacaagcacatcggcaatctgaaggaggcagccaagtggatggacgaggcccagtctcttgataccgctgaccgcttcattaactcaaaatgtgctaaatacatgctccgtgctaatatgattaaagaagccgaggagatgtgcagcaagtttacaagagagggcacaagtgctatggagaacctgaacgaaatgcagtgcatgtggtttcagaccgaatgtatcagcgcctaccagaggctggggagatatggagatgctctaaagaagtgccatgaagttgaaaggcacagtccgtccacatggactactgggggtaaggagcctcaaatgcacccttag

SEQ ID NO: 29177 - DNA, 2595 bp, synthetic construct
  source 1..2595: mol_type = other DNA; note = Synthetic coding sequence
atgcccaacgtgctgcttcctccgaaagagtcaaacctgttcaagaggattctaaaatgctatgaacagaaacagtataagaatggcctgaagttctgtaagatgatcctgagtaaccctaaattcgcagagcacggggaaacattggccatgaagggactaacactcaattgtctgggaaaaaaagaagaagcctatgaatttgtgcgcaagggacttcggaatgatgtgaaatcgcacgtctgttggcacgtgtacgggctactgcagcgttccgacaagaaatacgacgaggccataaaatgctataggaatgctctcaaactcgataaagataacctgcagattcttcgcgacttatcgttgctacagattcagatgcgggacttggaggggtacagagagaccaggtaccagctactgcagttgcggccaacgcaaagagcaagttggattggatacgccattgcataccacctgttgaaggattacgacatggcccttaagctgcttgaagagttccgtcagacccagcaagtccctcctaataagattgactacgaatatagcgagttgatcctgtaccagaaccaggttatgcgggaggccgatctgctgcaggaaagcctcgagcacattgagatgtatgagaaacaaatctgtgacaagctgctagtggaggagatcaaaggggaaatcctcctgaagctgggacggctgaaggaggccagtgaggttttcaagaatctgattgatcgcaatgcggagaactggtgttattacgaaggccttgagaaggcattgcagatatcgacacttgaggaacgcctgcagatatatgaggaaatttccaaacagcaccctaaggccataacacccagaagactgccgctgacactggtcccaggcgaacgcttcagagagttgatggataagttcctccgagtcaacttctccaagggatgtcctcccctctttacaaccctgaagtccttgtactataatacagagaaagtatctatcattcaggaactggtcaccaattatgaagcttccctcaagacctgcgatttcttttccccatacgagaacggagagaaggaaccaccgactactttattgtgggttcaatactttctggcacagcatttcgacaaactggggcagtactctctggcactggactacatcaacgccgctatagcatccacaccgacactcatcgagcttttttatatgaaagcgaaaatctacaaacacatcggcaacttgaaagaggccgcaaaatggatggacgaggcacagtcccttgatacagccgacaggtttattaatagcaaatgcgccaagtacatgctccgggctaatatgataaaagaggccgaggaaatgtgctcaaagttcactcgggaaggcacgtcagccatggagaacttaaacgaaatgcagtgcatgtggtttcagaccgaatgtatcagtgcctatcaacgactgggaaggtatggtgatgctttaaaaaaatgccatgaggtggagagacactttttcgaaatcactgacgaccagtttgattttcacacctattgtatgagaaaaatgacccttcgggcttatgtagatctgctgagactcgaggacattctccgtcgccatgcattctatttcaaagccgctaggagcgcaatcgaaatctacctgaaactttacgacaacccacttacaaacgagagtaagcaacaggaaattaacagcgaaaacttgagcgcaaaggagctaaaaaaaatgctgtccaagcaaagacgtgcacagaagaaggctaagctggaggaggagagaaagcatgccgagcgcgagaggcagcagaagaaccagaagaagaagagggacgaggaagaggaagaagcatctggactgaaagaagaactcatccccgagaagctggaaagagtagagaatccgctggaggaggcagttaaatttctgattccacttaagaaccttgttgcggacaacatcgacacacacctcctcgcctttgaaatctatttccgcaagggcaaattcttgctgatgttgcaatccgtcaagagggcatttgccataaattccaacaacccctggttgcacgagtgcctaatcaggttcagcaaaagtgtctccaaccattcgaacctgcccgacatcgtaagtaaggtcttatcccaggaaatgcagaaaatatttgtgaagaaagacctggagagctttaacgaggattttttaaagcgcaacgccacttctttacaacatctgctgtccggcgctaaaatgatgtactttctggacaagtcgagacaagaaaaggctatcgccattgcgaccaggctcgatgaaactatcaaagataaggatgtgaagactcttatcaaggttagcgaggcacttctggacggaagctttggtaattgttctagccagtatgaggagtatagaatggcctgtcacaatctgctgccttttactagtgcatttctacctgcggtcaatgaggtggataaccccaacgtggctctgaaccataccgctaattacgacgtgctggctaacgaaatttag

SEQ ID NO: 29178 - DNA, 1668 bp, synthetic construct
  source 1..1668: mol_type = other DNA; note = Synthetic coding sequence
atgcaatcgtgcgaatctagcggggatagcgccgatgatcctctgagtagaggcctcaggaggcggggtcaaccccgagtcgtcgtcatcggagccggactggctggattagcagccgcaaaggcgttgctggagcaaggcttcaccgacgtcacggtcttagaagcgtcatcccacattggcggaagagtgcagtctgtgaaactggggcatgctacattcgaactgggggcaacctggatccatggatcccacggaaatcccatctaccacctggcagaagcaaatgggctgctggaggaaactacagatggggagaggtcagtcggccgtatcagcctgtattctaaaaacggcgtggcatgttacctcaccaatcatggcagacggatccctaaggacgtagtcgaagagtttagcgatctgtataatgaagtgtacaatctaacccaggaattcttccggcacgataagcctgtcaacgctgaaagccagaactcagttggcgtgtttaccagggaagaagtcagaaatcgtataaggaatgatcccgacgaccccgaggccacaaagaggctgaaacttgcaatgattcagcagtacctgaaagtagaaagctgcgaatccagctcccacagcatggacgaagtatccttaagtgccttcggggaatggaccgagatcccaggggcacatcacatcataccatctggctttatgcgggtggttgagctactggccgaaggaatacctgctcacgtgattcagctgggtaagcctgtcagatgcatacactgggaccaggcctcagccaggcccagaggacccgaaattgagccaagaggagaaggtgatcacaatcacgacactggagagggcggacaagggggagaggaacccaggggtgggagatgggacgaggacgaacagtggtccgttgttgtagagtgtgaagactgcgaactgatccccgctgaccatgtgattgtgaccgtctctctcggggtgctgaaaaggcagtacacctccttttttaggcccggtctgcccactgagaaggtggccgcaatacatagactgggtatagggaccaccgacaagatcttccttgagtttgaagaaccgttttgggggccagagtgcaacagtttgcaattcgtgtgggaagacgaggcagaaagccatacattgacttaccctccagaactgtggtaccgcaagatttgtggctttgacgtgctgtaccccccagaaaggtatggccacgtgctttccgggtggatctgtggagaggaggccctcgtcatggagaaatgcgatgacgaggccgtggctgaaatatgcactgagatgctaaggcaatttactgggaatcccaacattcctaagccaaggcggatactccggagtgcctggggttccaacccgtacttccggggatcttacagctacactcaggtggggtcaagtggcgctgatgtcgaaaagctggcaaagccccttccatacacggaatcttcaaagacagctcctatgcaagtgttgttctccggagaagctacccatcgtaaatactacagcactacacacggagcattgctctctggccagcgggaggccgcacggttgatcgaaatgtatcgggatctttttcagcaggggacgtag

SEQ ID NO: 29179 - DNA, 630 bp, synthetic construct
  source 1..630: mol_type = other DNA; note = Synthetic coding sequence
atggctcccgtgggcgttgagaaaaagctgctgctgggccctaatggtcctgcggtagcggctgcaggtgatttgacgtctgaggaggaggagggccagtccctgtggtcatcgatcctgtctgaggtcagtacccgggctcgcagcaaactccctagcggaaaaaacattcttgtgttcggcgaagacggatctggcaagactaccctcatgacaaagctgcaaggagctgaacacggcaagaagggtcggggtctggaatacctctaccttagcgtacacgacgaagaccgtgatgaccatactaggtgcaacgtgtggatcctggacggtgacctgtaccacaaagggctgctgaagttcgcggtcagcgcagaatctctgcccgaaacactggttatttttgtggctgacatgagccggccttggaccgtaatggaatcactgcaaaagtgggctagcgttctgcgcgaacacatcgacaagatgaagattccacctgagaaaatgagagagttggaacgtaagttcgtgaaagacttccaggactatatggaacccgaagaggggtgccaggaaggtcctctctctaacagggttgagcagatgaggcccaggaatcactggtag

SEQ ID NO: 29180 - DNA, 858 bp, synthetic construct
  source 1..858: mol_type = other DNA; note = Synthetic coding sequence
aactggaacctggcctcttggaacccaagcaatccagagtgcctgctgttagtcgtgaaggagttagtgcagcagtaccatcagtttcagtgtagccgtttgcgcgagagttctcgcttgatgttcgaataccagacactgctagaagagccgcaatatggcgagaatatggagatctatgccggaaagaaaaataattggaccggggaatttagcgcaaggtttctgctgaaattgccggtggactttagcaacatcccaacctacctccttaaggacgtcaatgaggatccaggagaagatgtggctttgctttcagtgtcctttgaagacaccgaagccactcaggtataccctaagctgtatctgtcacccagaattgaacacgcattgggcggttcctcagccttgcatatacccgcattccccggtgggggttgtctcatcgattatgtccctcaggtctgtcatctgttgacaaacaaagtgcagtacgttatccaaggctatcacaaaagacgagagtacattgctgcattcctttcccatttcgggacaggcgtggttgagtatgatgccgagggctttactaagctgaccttgctgctgatgtggaaagacttctgctttctggtgcacatcgacctgcctcttttcttccctagggatcaacctactttaactttccagtctgtgtatcactttacgaactcagggcagctttacagccaggcccaaaaaaattatccatactcacccagatgggacgggaatgagatggccaagcgcgctaaggcctattttaagacgtttgtgccacagttccaggaggctgcatttgcgaatggcaagctgtag

SEQ ID NO: 29181 - DNA, 1152 bp, synthetic construct
  source 1..1152: mol_type = other DNA; note = Synthetic coding sequence
atgagcccggaagtggcattgaaccggattagccccatgctaagcccgttcattagtagcgttgtccgtaatggcaaggtcggcctggatgcaacaaattgccttcgtattaccgacctcaagtcgggatgcaccagtctaacgcctggccctaattgcgacaggttcaagttgcacattccctatgccggtgagaccctgaaatgggatataatatttaatgcccaataccctgaactgccccctgacttcatattcggggaggatgccgagttcctgcccgaccccagcgccctgcagaacctggcctcatggaacccttctaatccagagtgtttactgctggtcgtgaaagagctggtgcagcagtatcaccaattccagtgctctcgtctgcgggagtccagtaggctgatgttcgaataccaaaccttgttggaggaaccacagtacggagagaacatggagatatacgcaggaaagaagaataactggaccggagagttttcagcccgatttctgctgaagttgcccgttgacttctccaacatacctacgtacctgctcaaggatgtgaacgaggatcctggagaagatgttgcgcttctctccgttagttttgaggacacagaggcaacccaggtgtatcccaaactgtatctcagccccaggatcgagcatgcactaggtgggagctcagcactgcacatccccgcattcccgggtggcggatgtctcattgattacgttccccaggtttgccacctcctgacaaacaaggtacagtacgtgatacagggctaccacaaaaggagagagtacatcgccgcttttctatcccacttcggtaccggagtggtggagtatgatgccgaggggttcacaaagctgaccctcttgttgatgtggaaggatttttgcttccttgtgcatatcgatctgccacttttcttcccacgcgaccagcctacacttacttttcagtctgtttatcattttactaactcgggtcagttgtactctcaggctcagaagaactacccctacagcccaaggtgggacggcaatgaaatggccaagagagctaaagcctactttaaaactttcgtaccccagtttcaggaggccgctttcgctaacggcaaattatag

SEQ ID NO: 29182 - DNA, 1131 bp, synthetic construct
  source 1..1131: mol_type = other DNA; note = Synthetic coding sequence
atgagccctgaagtcgctctcaacaggatatccccaatgctgagcccttttatttcttcagtggtccggaatggcaaggtgggcttagacgcaacaaactgcctcagaattacggatctgaagtctggatgtaccagccttacccccggaccaaattgcgacaggttcaagttgcacatcccttacgcaggagaaacgctgaaatgggatataatcttcaacgcccagtatcctgagcttccacctgatttcatcttcggagaagatgccgagtttctccctgacccttcggcattgcagaatctggcctcttggaatcctagcaaccccgagtgcctgctcctcgtcgtgaaagagctggtacaacagtatcatcagttccagtgcagcaggctgcgcgagtcaagcaggctcatgtttgagtatcagacgcttctggaagagccacagtacggtgaaaatatggaaatttacgcgggaaagaagaataattggacaggcgaatttagcgctcgctttcttctgaagctgcctgtagacttctccaacatcccgacttacttgttgaaagatgttaatgaagatcctggagaagacgtcgcactactctccgtcagcttcgaagatacagaggccacacaagtctatcccaagctgtacctgtcacccagaattgaacacgcactgggagggtcgtccgccctgcacattcctgccttccctggcggaggatgtctgatcgattatgtcccccaggtgtgtcatctattaaccaataaagtgcagtacgttattcagggttatcacaagcgccgtgagtacattgccgcttttctttctcactttggcactggagtagtggagtatgatgccgagggcttcacaaaactgaccctgctcctgatgtggaaggacttctgctttctggtccacattgatttaccattatttttcccccgagaccaaccaacactcacattccagtcggtttatcatttcacaaacagcggtcaactatattctcaggcgcagaaaaattacccctattcccccagatgggacggtaacgagatggctaagcgcgcaaagagagaatccaaccgagatggcgaggaaagctcaagcgcctag

SEQ ID NO: 29183 - DNA, 312 bp, synthetic construct
  source 1..312: mol_type = other DNA; note = Synthetic coding sequence
atgattagagccttccccactactaccccccgatccctccatctatttacctcatctaccttcctcgcgcgagcgctgcccggtgcttttccaactggggcatgcgaggagaggctgtcagtgcccgagagcaccccctttacagcggttctgaaattcgccgctgaagagttcaaggtcccggcagctacatccgccatcatcacaaacgacggaatcggcattaaccccgctcagaccgctggaaacgtgttccttaaacacggaagcgagttgagaatcatcccaagggaccgcgttgggagctgctag

SEQ ID NO: 29184 - DNA, 1968 bp, synthetic construct
  source 1..1968: mol_type = other DNA; note = Synthetic coding sequence
atggctacaccagtagtgacaaagactgcctggaaattgcaagagattgttgcccatgcctctaatgtgtcatctttagtgcttggcaaagccagcggcagactgctagcaaccggaggcgacgattgtagggtgaacctgtggtcaataaacaagcctaactgtattatgtctctgacaggacataccagcccagttgagtccgtgcgactgaacacccctgaagaactcatagtggcgggtagccaaagcggaagcattcgtgtgtgggatctcgaggctgctaaaatacttagaaccctgatgggccacaaggccaacatctgctccctggatttccacccctatggagaattcgtggccagtggaagccaggacaccaatattaaactgtgggacatcagaagaaagggatgcgtgtttagatatcggggacatagtcaggctgtccgctgcctgagatttagcccggacgggaaatggctggcttccgctgcagatgaccacacagtcaaattgtgggacctcacagccggaaagatgatgtccgaatttcccggtcacactgggccagtgaacgtggtggagtttcacccaaacgaatacttactcgcgtccggctcctctgacagaaccatccgattttgggacctggagaagttccaagtcgtcagttgcattgagggtgagcctggcccagtgagaagtgtattattcaaccccgatggttgttgtctgtatagcggatgccaggacagcctgcgggtctacggatgggagcccgagcgatgttttgacgtcgtgctggtgaattggggtaaggtagccgacctggccatctgcaatgatcaactgataggagtcgccttctctcagagtaatgtctcaagctatgtcgtggacttgacgagggtcactcgaacaggcaccgtggctcgcgaccctgtccaagaccacaggccactggcccagccattgcccaatccctctgcaccacttagacggatctatgaacggccaagtactacttgttcaaagccccagagagtgaagcagaactcagaatctgagcggaggtcaccgagtagtgaggatgaccgcgacgagcgtgagtcccgagcagagatccagaatgcagaagactacaatgagatatttcagccaaagaactccattagcaggactccaccccgacgctctgagcctttcccagcccctccagaggacgacgctgccacggctaaagaggccgcaaaacccagccccgcaatggatgtgcagttccctgttcccaacctagaggtactgccaagacctcctgtggtcgcctctacccccgcacctaaggcagaacctgctatcattcctgcaacacgcaatgagccgattggtcttaaggcttctgacttcttgcccgctgtgaagatccctcagcaagcggagctggtggatgaggacgctatgtctcaaatcagaaagggccatgataccatgtgtgtggtactaacctcccggcacaagaacctggacactgtgagagccgtttggaccatgggcgacatcaagactagcgtagacagtgcggtcgcaattaacgatctgtcagtggttgtggacctgctgaatatcgtgaatcaaaaagcttctctgtggaagcttgatttgtgcacgactgtcctgccccagattgaaaagctcctccagagtaaatatgaatcgtacgtgcaaacaggttgtacatcccttaaattgatcttgcagcggtttctgcccctgatcacagatatgctcgccgctccacccagtgtgggggtggatatctccagggaagagcgccttcacaagtgtcgactgtgctataagcagttgaaatcaataagcggattggtgaaatctaagtcaggcctgagtgggagacacggcagcacgttccgcgagctgcatctcttgatggcttccctggactag

SEQ ID NO: 29185 - DNA, 165 bp, synthetic construct
  source 1..165: mol_type = other DNA; note = Synthetic coding sequence
atgttcctgtctgccgtgttctttgctaaatcgaaaagcaacgagacaaaatcacccttgcggggtaaggaaaagaacactttaccattgaatggtggactaaagatgacattaatatataaagagaaaacagaaggcggtgatacagattccgagatactgtag

SEQ ID NO: 29186 - DNA, 2457 bp, synthetic construct
  source 1..2457: mol_type = other DNA; note = Synthetic coding sequence
atgaagaagcagtttaaccgtatgcgccagttggcaaatcaaacagttggcagagcagaaaaaacagaagtacttagcgaggatttactacaggttgaaaagcgacttgaactggtcaaacaggtgtcccattccacacataagaagctcacagcctgtttacaaggccagcaaggcgctgaggccgacaaacggagtaagaagctgccacttaccacattggcccagtgtttgatggagggatccgctatactgggtgacgatactctcctggggaagatgctgaaactgtgtggggaaacggaagataagctcgcccaggagctgattcactttgaacttcaggtcgagagggatgtaatcgagcccctctttctgctggcggaggtggagatccccaatatccagaagcagcgaaagcacttagccaagcttgtgctggatatggacagcagtaggactcgctggcagcagacatctaaaagcagcggtctctcatcttctcttcaacccgctggagctaaggccgatgccctgcgggaagagatggaggaagcagcaaaccgcgtcgaaatctgtagagaccagttgagtgcagacatgtacagcttcgttgccaaggagatcgattacgcaaattacttccaaacactgattgaggtacaggctgagtatcacaggaaatcacttacattactccaggctgtgctgcctcagatcaaggcacagcaggaagcatgggtagaaaaaccctccttcgggaagccgttagaagaacatctgaccatttctggcagggaaattgccttccccattgaagcatgcgtaactatgctgctggagtgcggaatgcaggaagagggattgtttcgggtggccccatccgcttcaaaactgaagaagcttaaggccgcactggactgctgcgtggtggacgtgcaagagtattcagccgacccccatgccatcgcaggtgctttaaagtcctatttaagagaactccctgaaccactaatgacctttgagttgtatgacgaatggatacaggctagcaacgtgcaggaacaggacaagaaattacaggccctgtggaacgcctgtgagaaactgcccaaagctaaccacaacaatatccgatatcttattaagttcctgagcaagctcagcgaataccaggacgtcaacaagatgactccttcaaacatggccatcgtgttgggaccaaacctgttgtggccacaagctgagggtaacatcactgagatgatgactactgtttcactgcagattgtcgggatcatcgaacccattatccagcacgcagactggttcttccccggagagatcgaatttaacattacgggtaattacggatctccagtgcacgttaatcataatgctaactactcaagcatgccgagcccggacatggatcccgctgacaggcgacagcctgagcaggcacgaagaccactttctgtcgccacggacaatatgatgctcgaattctacaaaaaggacggcctgcgcaagattcagtccatgggtgttagggtcatggacacaaattgggtcgccagacgaggatcatcagcaggtaggaaggtgagctgcgccccaccaagcatgcagcctccagctccaccggctgaactcgctgcacctttgccttccccactgccggagcagccactggatagccccgctgcccctgccctgagcccttccggcctgggtttacagcccggaccagagcgaacctccaccactaagagtaaagagttatcaccgggaagcgctcagaaggggagtcccggatccagtcaaggcacagcctgtgctggtactcagcccggagctcagccaggagctcagccaggagcctcgccgtctccgtcccagcccccagccgaccaaagccctcataccctgcgcaaagtctccaagaagttggctccaatcccgccaaaggttccattcgggcagccaggcgctatggccgaccagtctgccggtcagcctagccccgtgtcactttcacccaccccaccatcgacccccagcccttacgggctcagttacccacagggttacagcctcgctagcgggcagctatctcccgctgcggcacctcccctggcttcacctagcgtgttcacaagcaccctcagtaagtctaggcccaccccaaaacctagacagaggcccacactccccccaccacaacctccaactgttaatctttcggcaagttcccctcagagcactgaggccccaatgcttgacggaatgtctcccggtgaatcaatgagcaccgacttagtccactttgacattccttcaattcacattgaactgggttccacccttcgcctgagccctctggaacacatgcggaggcacagtgttactgacaagagagatagcgaggaagaatctgaaagcacagcactctag

SEQ ID NO: 29187 - DNA, 1014 bp, synthetic construct
  source 1..1014: mol_type = other DNA; note = Synthetic coding sequence
atgaccaataacagcggctccaaggctgagttagtcgtggggggaaagtacaagctggtgagaaaaatcggttcaggcagcttcggggacgtgtatctaggaatcaccaccacaaacggcgaggatgtcgcagtgaagctggagtcgcagaaggtcaagcacccccagttgctatatgagtccaagctatacacgattttgcagggcggagtcggaataccacacatgcattggtacgggcaggagaaggataacaacgtgctggtaatggatctcctcggacccagcctggaggacctattcaatttttgcagccggagattcaccatgaagacagtgttaatgctcgctgatcagatgatttcccgcattgaatacgttcacactaagaatttcctgcacagggacattaaaccagataacttcttgatgggaactggcagacattgcaataaactgtttttgattgattttggactggccaagaagtacagggacaataggacccgccagcacataccctatagggaggacaaacacctcatcggcaccgtccgttatgccagcataaatgcccatttagggatagagcagtctcggagggatgatatggagtcactcggatacgtttttatgtactttaatcgcacctcccttccctggcagggcctgagagccatgaccaaaaaacaaaagtacgagaaaatatccgaaaaaaagatgagcacccctgtcgaggtgctgtgcaagggatttcctgctgaattcgccatgtatctgaactactgtcggggtctgagatttgaggaggtacctgattatatgtatttacgccagttattccggattttgtttcgcacacttaatcaccagtacgattatacttttgattggactatgctaaaacagaaggcggctcagcaggccgcatcatctagtggtcaggggcagcaagctcagactcagaccggcaagcaaaccgaaaaaaataagaataacgtcaaggataattag

SEQ ID NO: 29188 - DNA, 1608 bp, synthetic construct
  source 1..1608: mol_type = other DNA; note = Synthetic coding sequence
atgagtgaaggggagtcccaaacagtgctgagtagcggtagcgatccaaaggtggagtccagcagctctgcccctggtttgacctccgtgtctcctccggtgacatctacaacctcagccgcatcacctgaagaagaagaagaaagcgaagacgagagtgaaatactggaagaatcaccctgcgggagatggcaaaagcgacgcgaggaggtgaatcagagaaatgtccccggaatcgactcggcatacttagcgatggacaccgaggaaggcgttgaggtggtatggaacgaggttcagttctctgaaaggaaaaattacaagctgcaggaagaaaaggtcagagccgtcttcgacaacctcattcagctcgaacaccttaatatagtgaagtttcacaagtactgggccgatattaaggaaaacaaggcaagggttatcttcataacagaatacatgagtagcgggagcctaaaacagttcctcaagaaaaccaagaagaatcacaagaccatgaacgagaaggcatggaaacggtggtgtacccagatactgtcagccctctcttacctgcacagttgcgaccctcccatcattcacggcaatctgacatgcgatactattttcatccagcacaacggcctgataaaaataggatctgtggctccggataccatcaacaatcacgtgaagacttgcagagaagagcagaaaaacctgcatttttttgcacccgagtatggcgaagtgactaacgtcaccaccgccgtcgatatttacagttttgggatgtgcgccctggagatggctgtgctggagatccagggcaacggggaatcttcctatgttccccaggaggcaatcagtagcgcaattcaactcttggaagatccgctccaacgagaatttatacagaaatgcctccagtccgaaccagctcgccgtcccaccgctagggaacttctgtttcatcctgctctgtttgaggttccaagtctgaagctattggccgcacactgcatagtggggcatcagcatatgatcccagaaaacgccctggaggagatcaccaagaatatggacaccagtgccgtactcgctgagattccagcaggcccagggagagaaccggtgcaaacgctatatagtcagtcccccgcactcgagctcgacaaattcctggaggacgtgcgaaacggcatctaccctctcactgccttcggacttccaagacctcagcagccgcagcaggaagaagtaacctcacctgtagttcctccctccgtgaagactcccaccccagagcctgccgaggtcgaaacgagaaaagtcgtactgatgcagtgcaatatcgagagtgtcgaagagggtgttaaacaccatttgactttactgctcaaactggaggacaaacttaacaggcacttatcctgcgacctgatgcctaatgaaaatatcccggaacttgccgcagagttggtacagctgggattcattagtgaggcagaccaatcgcgcctgacctcactgctggaggagacactcaataaatttaactttgcacgcaattctacacttaacagtgcagcagttacagtctcctcgtag

SEQ ID NO: 29189 - DNA, 2169 bp, synthetic construct
  source 1..2169: mol_type = other DNA; note = Synthetic coding sequence
atggaaacatccgatatccagatattctatcaggaagatcccgagtgtcagaatctctcagagaacagttgccccccatcagaggtctccgataccaacctgtatagtccttttaaaccccgaaactatcagctcgagctggccctgcccgcaatgaaaggcaagaatactattatatgcgcccctacaggctgcgggaaaactttcgtttcactgctgatctgcgagcatcacctgaagaagttcccccaaggtcagaaaggtaaggtagtctttttcgcaaaccaaattcctgtatatgaacagcagaagtctgtgttcagtaagtactttgagcggcacggttacagagtcacaggaattagcggtgcaactgccgaaaacgtgcctgttgagcagattgttgagaataatgatattatcatcctgacaccccagatcctggtgaacaatctgaagaaagggaccatccccagtctcagcatctttactctgatgatctttgatgagtgtcataacacctccaagcaacatccttataatatgattatgttcaactacttagatcagaagttgggtggctcttcaggacccttgccccaggtgattggactaacagcaagcgtaggcgtcggggatgcaaagaacaccgacgaggccctggactacatctgcaagctctgcgcttccctggatgcaagcgtaatagcaacagttaaacacaaccttgaggagttggaacaggtcgtgtacaagcctcagaagttttttcgcaaggtcgagtctaggattagcgacaagttcaagtatattattgcacagctcatgagagacacggagtctctggcaaaaagaatttgcaaggatcttgagaatttatcccagatccagaatcgcgagtttggcacacagaagtacgagcagtggatcgttactgtccagaaggcatgcatggtttttcagatgccagataaagacgaagagtcccgcatttgcaaggccctgtttctttatacttcacacttgcgtaagtacaacgacgctctcatcattagtgaacacgcaaggatgaaggacgcattagattaccttaaagactttttctctaacgttcgcgctgcaggttttgacgaaatcgaacaggacctgactcagcgcttcgaggaaaaactgcaggagcttgaatctgtgagccgcgaccctagtaacgagaacccgaaactggaagacctgtgttttatactgcaagaagagtaccacctgaacccagagacaatcactattctctttgttaaaacgcgagccctcgtggatgctttgaaaaattggatcgagggcaatcccaaactaagtttcctgaagccaggaatcctcaccggcaggggaaagactaatcaaaatacggggatgaccttgcccgctcaaaagtgcattctcgatgcattcaaggcgtcaggggaccataatatcctcatcgcaacgagtgtggccgatgagggaattgatattgcacagtgtaacctcgtgattctgtatgaatacgtcggtaacgtcatcaagatgatacagacccgcggaaggggtagagccaggggcagcaaatgtttcttactcacaagcaacgcaggagttatcgaaaaggagcagattaacatgtataaggaaaaaatgatgaacgatagcatcctgcggctgcagacttgggatgaagcggttttcagggagaagatactgcatatccagacacacgaaaaattcattcgcgactctcaggagaagcccaagcccgtacccgacaaagagaacaagaagttgctgtgtcggaagtgtaaggctctcgcatgttacaccgccgacgtccgcgtcatcgaggaatgccattacacagtgcttggggacgcctttaaagagtgcttcgtaagccgtccacatcctaaacctaaacagttctcgagttttgaaaagcgggcaaaaatcttttgtgcccgacagaactgtagccatgattgggggatccacgtgaagtataagacttttgagatccctgttatcaagatcgaatcttttgtggtggaggatatagccaccggcgtgcaaacgctgtatagtaagtggaaggacttccacttcgagaagattccgtttgaccctgccgagatgagtaagtag

SEQ ID NO: 29190 - DNA, 2643 bp, synthetic construct
  source 1..2643: mol_type = other DNA; note = Synthetic coding sequence
atgacaacagagcagagacgctccctgcaagcttttcaagattacatacggaaaactctcgatccaacatacatactgagctacatggcgccatggttcagagagggctacagtggactgtatgaggcgatcgagagctgggatttcaaaaagattgagaagctggaggagtaccgtctactcttgaaacggttgcagccagagtttaagacacggataatacccacggacatcatctcggacctctccgagtgcctgatcaatcaggagtgcgaggaaatcctccaaatctgttccaccaagggtatgatggctggcgctgagaagttggtggaatgcctgctaaggtcagacaaggagaattggcccaaaacactaaaactggcacttgaaaaggaacgcaataaattctcggagttatggatcgtggaaaagggcatcaaagatgtcgaaaccgaggatctggaggacaaaatggaaacatccgacatccagattttttatcaagaggatcctgagtgtcagaacctgtccgaaaattcctgccctccctcagaagtgtccgacaccaacctttatagcccatttaagcctaggaactatcagctagagcttgcgctgcctgccatgaaagggaaaaatacaatcatctgtgctccaaccgggtgcggcaagaccttcgtgagcctgttaatctgcgagcaccacctgaaaaagtttcctcagggtcaaaaaggtaaagtggtgttctttgccaaccaaattccagtatacgaacagcagaagtctgtgttcagtaagtactttgaacgccatggatatcgcgtcaccggtataagcggggcaaccgccgaaaacgtacccgtcgagcagatagtggagaataacgatatcatcatactcacaccgcagatattagtcaacaatttaaaaaagggcaccattcccagcctgtcgatatttacactaatgatctttgacgagtgtcacaatacttctaagcaacatccctacaatatgataatgttcaattacctggaccagaagttagggggaagtagtggccctcttccgcaggtgataggcctgacagctagcgtcggagtaggcgacgccaagaacacagatgaagccctggattacatatgtaaactttgcgccagtctcgacgcttccgtgattgccacagtaaagcataatctggaagaactggagcaagtagtatacaaaccacagaaattcttccggaaagtggaatctcgcatcagcgacaaatttaagtatatcatagcccagctgatgagggatacagagtctctcgcaaagcgaatctgcaaagatctggaaaatctgtcacaaatacagaatcgcgaatttggcacccaaaagtatgaacagtggatagtgaccgttcagaaggcctgcatggtattccaaatgccagacaaggacgaagagtcccggatttgcaaagctctcttcctgtatacctctcatttgcgcaaatacaacgatgcgctgatcatctccgaacacgctcggatgaaagacgcccttgactatttgaaagactttttttccaacgttcgggcagcgggattcgatgaaatcgaacaggatctcacacagaggtttgaggagaagctgcaagaactggaatctgtgtctcgtgatccaagcaacgaaaacccaaaactggaggatttgtgttttatactgcaagaagagtatcatcttaatcccgaaaccatcaccatcttgtttgtgaagacccgagcactcgtcgatgcactgaaaaattggattgagggaaatccaaagctgtccttcttgaaacccggaatcctaactggaagaggcaagaccaatcagaacactggcatgacccttcctgcccagaagtgcattcttgacgcgtttaaagctagcggcgatcataacatcctgatcgcaacgagcgtggcagacgaggggatagatattgcacagtgtaatctcgtcattctgtatgagtacgtaggcaacgtcattaagatgattcagacacggggacgcggtcgggcacgagggtctaaatgctttctgctcacgtcaaacgctggcgtaatagaaaaggaacagattaatatgtataaggaaaaaatgatgaacgatagcattctaagattacagacctgggatgaggctgtcttccgtgaaaagatacttcatattcaaacccacgagaagttcatacgcgactctcaagagaaacccaagccggtgcctgacaaagagaataaaaagttactgtgtcgcaaatgcaaggccctggcatgctatacagcagatgttcgagtgattgaagaatgccattatactgtcctgggagatgcatttaaagagtgcttcgtttctcgccctcatcctaaaccaaaacagttctctagtttcgaaaagagagcaaaaatcttttgcgcacggcagaattgctcacacgactgggggatccatgtgaagtataagacctttgagatccctgtaataaaaattgaatcatttgtggtggaggacatagccaccggggtccagaccctgtattccaaatggaaggactttcattttgaaaagattcctttcgaccctgccgaaatgtcaaagtag

SEQ ID NO: 29191 - DNA, 2778 bp, synthetic construct
  source 1..2778: mol_type = other DNA; note = Synthetic coding sequence
atgaccaccgagcagcgcagaagcctgcaagcgttccaagactatatccgcaagaccttggaccctacttacattctgtcatatatggccccttggttccgcgaggaggaggtccagtacattcaggctgagaaaaacaataagggcccaatggaagcggcaactctttttctgaagttccttttagaactgcaggaagagggctggttcagagggttccttgacgccctggaccatgccggttattctggattatacgaggctattgaatcatgggacttcaagaaaatcgaaaaactcgaagagtacagactcctgcttaaacgattgcagcccgaattcaagacaagaatcatacccactgatattatctcagacctgtcagagtgtttgattaaccaggagtgcgaagaaattctgcagatctgctcaacgaagggtatgatggctggggcagagaagctggtcgagtgccttctccgaagcgataaagagaattggccaaagaccctgaagctggccctagaaaaagaacggaacaaattttccgaactctggattgtcgaaaaaggtatcaaggatgtggagaccgaggatttggaggacaagatggagacatccgatatacaaattttttaccaggaggacccagaatgccagaacctttctgaaaacagttgccctccaagcgaggtgtccgacacaaatctgtacagtccattcaaaccaagaaactatcagctggagctggcccttcccgcaatgaaggggaagaatacaatcatctgcgcccctaccggatgtggaaagacattcgtgtctttactgatctgtgagcatcacctaaaaaaattccctcaggggcaaaaggggaaggtggtctttttcgccaatcagatcccagtctacgagcagcaaaaaagcgtgttctccaaatatttcgagcgccacggttatcgtgtgaccggcattagtggtgcaactgctgagaacgtgccagtggagcagatcgtcgaaaataacgatatcatcattcttaccccccagattctggttaacaatttgaagaagggcaccattcccagtcttagtatcttcactctgatgatcttcgacgagtgccacaatacttcaaaacagcatccttacaatatgattatgtttaattaccttgaccaaaagctcggtgggtcatccgggccactcccgcaggtgatcggattgactgctagcgtcggtgtcggagacgccaagaatacagacgaagccctcgactatatttgtaagctgtgcgcttctctggatgcctctgtcattgccacagtgaaacataacctggaagagttagaacaagtggtctacaagccgcagaaattttttcgtaaagtcgagtccaggatcagtgacaagttcaagtacatcatcgcacaactgatgcgtgataccgagagtctagcaaagcgcatctgcaaggatctggagaacctaagccagatccagaatagagaatttggcacacagaagtacgaacagtggattgtgactgtgcagaaagcgtgtatggtctttcagatgcccgacaaagacgaggagagccgcatttgtaaggcactctttctatacacctctcacctccgtaaatataacgatgcactgattatcagtgagcacgccaggatgaaggacgctctcgattatttaaaggactttttttctaatgtgcgggctgctgggttcgacgagatcgaacaggatctgacccagcgcttcgaggagaaactgcaggagcttgagtccgtcagtcgagatccatcaaacgaaaatcctaagttagaggatctatgcttcattctccaggaggaataccacttgaatccagagacgataaccattctcttcgtcaaaacgagagcactggtcgatgctctcaagaactggatcgagggcaatcccaaattgtcattcctgaagccgggaattctcaccggcagaggaaagacaaaccagaataccggcatgacactaccagcccagaaatgtatactcgatgcctttaaggcctctggcgatcacaacatacttatagctacaagcgtggctgatgaggggatcgatatcgcccaatgcaatcttgtgatcctgtatgagtatgtgggcaacgtgataaaaatgatccagacacgcggacggggaagagccaggggatccaaatgcttcctgctgactagtaatgccggagttatcgagaaggaacagatcaacatgtacaaggagaaaatgatgaatgacagcattttgagactccaaacatgggacgaggcagtgtttcgtgaaaagatactgcacatacaaactcacgaaaagttcatccgggactctcaggaaaagcctaagcctgtcccagataaggaaaataaaaagctgctctgcaggaaatgtaaagcactcgcgtgctacacagcggacgtcagagtgatcgaagagtgccattacactgttctgggagacgcctttaaggaatgcttcgtcagcagaccacatcccaaaccgaaacaattctctagcttcgaaaaaagggcgaaaatattctgcgcacgccagaactgcagccacgactggggcattcacgtgaaatacaagacattcgagatccccgtcatcaagatcgaatcctttgtggtcgaggacattgccactggggtacagaccttatactcgaagtggaaagactttcattttgagaaaatccctttcgaccctgctgagatgtctaaatag

SEQ ID NO: 29192 - DNA, 987 bp, synthetic construct
  source 1..987: mol_type = other DNA; note = Synthetic coding sequence
atggatggagaggatatccctgatttttcttcactaaaggaggagaccgcctactggaaggagctcagccttaagtacaaacaatcattccaggaggcacgggatgagctggtggaatttcaagagggatctagagagctggaagccgagttagaggcccaactcgtacaggccgaacagaggaacagagacttacaggccgacaatcagcggctgaaatatgaggtggaggctttgaaagaaaaacttgaacaccagtatgcccagtcctacaaacaggttagcgtgcttgaggatgatctgtcccagacacgagccatcaaggagcagctgcataaatacgtacgcgagctggaacaggccaatgatgatctggaacgggctaagagggcgaccatagtgagcctggaagactttgagcaacgtctgaaccaggcaatcgaacggaacgctttcctagaatccgaattagacgagaaagagtccttactggtttccgtccagcggctcaaagatgaggcacgcgatcttagacaggagttggccgttcgcgaaaggcagcaggaggtaaccaggaagtcagctccatcctcgcctaccttggattgtgagaagatggactccgcagttcaggcttccttgtccttacctgccacacctgtcggaaagggcacagagaacacattcccatcaccgaaggctattccaaatggttttggaacctctccattgacccccagcgctcgcatcagcgccctcaacatagtgggggacttactgaggaaagtgggcgcactcgagtcaaagttggcggcttgcagaaacttcgccaaggatcaggcctcccgtaagtcctatatctccggtaacgttaattgtggagttctgaatggaaacgggactaagtttagtaggtcagggcacacaagttttttcgacaaaggtcaggaaaaagtgattttccccacccttttcatgggccaatag

SEQ ID NO: 29193 - DNA, 2898 bp, synthetic construct
  source 1..2898: mol_type = other DNA; note = Synthetic coding sequence
atggcactgctgtgcggcctggggcaggtcactttgcgcatctgggttagtctgcccagccagagtgagaacggtatcgggttcctcgcagccagagcgtttttgcggtctggaggtatggaagccctgacgacccagctgggccctggcagagaaggctctagtagcccaaattcgaagcaagagctacagccttactctgggtcttcggccctcaagcccaatcaagtcggcgaaacttccctgtacggagtccctattgtgagtctggtgatcgacggacaggagaggttgtgcttggcgcagattagcaatacattgctgaagaactattcctataacgagatccacaaccgccgtgtggccttaggtattacatgcgtgcagtgcactcctgtacagctggaaatattgcggcgagccggagctatgcccatttcaagcaggagatgcggcatgatcacaaaaagggaggctgagaggctttgcaagagtttcctgggggagcataagccgccaaagttacccgaaaactttgcttttgacgtggtgcacgagtgtgcttggggcagccggggatcattcatacccgcacggtacaacagttcccgcgctaaatgcattaagtgcggttactgtagcatgtacttctctccaaacaagtttatctttcatagccataggactcctgacgcaaagtatacccagcctgatgcagcgaattttaatagctggcggaggcatcttaagctcagcgacaaatccgccactgacgaattatcacatgcgtgggaggacgtgaaggcaatgttcaacggagggacacggaagagaacgttctctttacaagggggaggcggtggaggcgcaaatggcggttctggaggacagggtaagggcggagcgggtggcggaggtgggggtggccctgggtgtggagcagaaatggcccctggcccacccccacacaaatccctgcggtgcggcgaggacgaagccgctggcccacctggacctccaccccctcatccacagcgagggctagggttggccacaggtgcgtcaggacccgctggacctggcggacctggaggcggtgcaggagtccggtcttatcccgtaattcccgtcccctctaaaggattcggcctcctgcaaaagctgccacctcccttgttcccccacccatacggcttccccacagccttcgggctgtgccctaagaaggatgacccagtgttgggtgctggcgagcccaagggtgggcctgggactggatcaggtgggggtggcgctggcacagggggaggggctggaggccctggcgcaagccacctcccacctggcgctggggcaggtccaggcggtggcgctatgttttggggccatcagccctccggcgcagccaaagatgccgctgcagtggccgcagctgcagctgcagccaccgtttatcccacgtttccaatgttctggccagccgctggatccctgcctgtgccaagctacccagcagcccagtcccaggccaaggcagtagctgctgccgtggcagccgcagcggcagcggcagctgctgcagcaggatctggcgctccagaaccactggatggagccgaacccgcaaaggagtctggactgggagccgaagaaagatgccccagcgcacttagccggggaccattggacgaggacggtactgacgaagctctaccaccaccgctggcccctctgccaccccctccaccaccacccgctaggaaggggagttatgtgagcgcttttagacccgttgtaaaagataccgagagtattgccaagttatatggatctgcgagggaagcttatggggcaggacctgcacgcggtcccggacccggagctggctcgggtgggtatgtctcccctgactttctctctgagggctccagttcctataacagcgcctcaccagatgtggatacagccgacgagccagaagttgacgttgagtctaacagatttccagacgatgaagacgcccaagaggagacagagcctagtgcgccttcggccggtggcggtccggatggtgaacagccgactggaccaccatctgctacttcctccggcgctgatgggcctgctaacagtccagacggcggatcacctaggccccgacggaggctgggaccccctccggcagggcgaccagctttcggcgacctggccgctgaggatctggtgaggaggccggaacgcagccccccaagcggagggggaggatacgaactgcgcgagccatgtggaccccttggcggtccagccccagccaaggtttttgctcccgagagagacgaacacgtgaagtcagcagccgtggccctaggacctgctgcgagttacgtttgcacgccggaggcccacgaacccgacaaagaagataatcattctcctgctgacgacctggaaactaggaagagctatccagaccagaggtccatatcacagccttcccctgcaaatactgaccgcggagaggatggactgacactagacgtgaccggtacacacctggtggaaaaggatatcgaaaatcttgcgcgtgaagagctgcaaaaacttctgttggagcagatggaactgaggaaaaagctcgaacgggagtttcagtctctgaaggacaactttcaggaccagatgaaacgcgagctcgcctacagagaagaaatggttcagcaattgcagattgttagggataccctgtgcaatgagctggatcaggagagaaaggctagatacgccattcagcagaagctgaaggaggctcacgacgcactgcatcacttctcatgtaagatgctaacccccaggcactgtacaggcaattgtagcttcaaaccacccctgcttccgtag

SEQ ID NO: 29194 - DNA, 1803 bp, synthetic construct
  source 1..1803: mol_type = other DNA; note = Synthetic coding sequence
atggcctccaatcacaagtccagtgcggctagacccgtgtcacgtggtggagtgggactgacaggtagacctccaagtggcattagacccctctctggcaatatccgggttgctaccgcaatgcctcccggaactgcgcgtcctggtagcagaggctgtcccatcggtactggaggcgtgctctccagtcaaatcaaagttgcccatcggccagtgactcaacagggccttaccggcatgaagaccgggactaagggcccacagagacaaattcttgataaatcctactatctaggcctgctgaggtcgaagatcagtgagctgaccacagaggtcaacaagcttcaaaagggaatcgagatgtataaccaggaaaatagcgtgtaccttagctacgagaaacgcgctgaaaccctagcggtcgagattaaagaactgcagggccaattggctgattacaatatgttggtagataaacttaatacgaacaccgagatggaagaagtaatgaatgattataacatgctgaaggctcagaatgacagggaaacccagtccctggatgtgatcttcacagaacgacaagccaaagagaaacaaataagatcagtggaggaggaaatagagcaagagaagcaggccacagacgacataattaagaatatgtcctttgagaatcaagtcaagtacctcgaaatgaaaaccacgaatgagaaacttctccaggaactcgatactcttcagcagcaattggattcacaaaatatgaagaaggagtccctggaggctgagatagcccattctcaagtcaaacaggaggccgtgttactgcatgagaagctgtatgagctagagtcccatagggaccagatgatagctgaggacaaatcaataggcagtcctatggaggagcgcgaaaagttgctaaagcagataaaagacgacaaccaggaaatcgcaagcatggagcgtcagcttactgatacgaaggagaagataaaccagtttatcgaggaaataagacagctggacatggaccttgaggagcaccaaggggagatgaatcagaagtacaaggagttaaagaaacgcgaagaacacatggacacttttattgagaccttcgaagaaacaaaaaaccaggagctcaagagaaaagcccagatcgaggccaacatagttgcccttttagaacattgctcacgtaacattaatcggattgagcaaatatcatcaatcaccaaccaggaattgaagatgatgcaggatgatcttaacttcaagtctacagaggtgcagaagagtcagtcaaccgcacagaacctgaccagtgatatccaacgactgcaattggacctgcagaagatggagctcctggagagcaaaatgactgaagaacagcatagcttgaaatctaagatcaaacagatgacaactgacttggagatctacaatgacctgcccgctcttaagtcttccggcgaagaaaagattaaaaagcttcatcaggagaggatgatcctgtcaactcacaggaacgcgttcaagaagattatggaaaagcagaatattgagtatgaagctttaaagactcagttgcaagagaacgagacccactcccagctcactaatctcgagcgcaagtggcagcacctggagcagaataatttcgcgatgaaggagttcatcgcaaccaagagtcaggaaagcgattaccagcctattaaaaagaacgttacaaaacagattgccgagtataacaagacaatcgtggatgctctgcattctacctcgggtaattag

SEQ ID NO: 29195 - DNA, 582 bp, synthetic construct
  source 1..582: mol_type = other DNA; note = Synthetic coding sequence
atgctggtggctggaaatgatagggtgcaagctgttatcacgcagatggaggaggtatgccaaacaatcgaggacaacagcaggagacagaaacagctcctgaaccaaagatttgagtctttgtgtgccgtcttggaagaaagaaagggggaacttctacaagcgcttgccagagagcaggaggaaaagctgcaacgcgtgaggggattgattaggcagtacggcgatcaccttgaagcgagttcaaaactggttgagtccgctattcagtccatggaagaaccacaaatggctctatatctgcaacaggctaaggagctgatcaataaggtgggggcaatgtcgaaggtcgaacttgccggacgacccgaacccggatatgaaagtatggagcagttcactgtgagagtggagcatgtagctgagatgctcaggaccatcgacttccagccaggagcctccggggaagaagaagaggtggcgcctgacggcgaagaagggagtgctggccctgaagaggagcgacctgatgggcctctcggaccctactctgcttacgtgtcgttgtgcggggctccatag

SEQ ID NO: 29196 - DNA, 1077 bp, synthetic construct
  source 1..1077: mol_type = other DNA; note = Synthetic coding sequence
atgaatttcaccgtgggctttaaaccgctcctgggcgatgcccactccatggataaccttgagaagcagctgatctgtcccatttgtctggaaatgttctccaaacctgttgtgattcttccgtgccagcacaatctgtgccgcaagtgtgctaatgatgttttccaggcttccaaccccctttggcagtcaaggggctcaacaaccgtatccagcggcggaagatttcggtgcccctcatgcagacatgaagttgttttggatcgtcacggcgtttacggtctacagcggaacctcctggtggagaatattatcgatatttacaagcaggaatcctcgcgccctctgcactctaaggcagaacagcatctcatgtgcgaagagcacgaggaagaaaaaattaatatttattgcttatcctgtgaggtgcctacttgttcgttgtgcaaggtgttcggcgcacataaagactgtgaagtagcaccgctacccaccatttacaagaggcaaaaatctgaattgagcgacggaatagctatgttggtggccggaaatgatcgggtgcaggccgtcattacacagatggaagaggtgtgccagactatcgaggataatagtcgtagacaaaagcagctgttaaatcagaggtttgaatccctgtgtgccgtgcttgaagaacgcaaaggggaattgttgcaggcattggctcgggaacaggaggaaaagctgcagagagttcggggtctaatcaggcagtacggagaccacctcgaggcctccagcaagctggtggagagtgctatccagagcatggaggaacctcagatggctttgtatctccagcaggctaaggaactcattaataaggtcggggctatgagcaaggtcgaattggcgggacgccctgagccaggatacgagagcatggagcagtttactgtgagggtggagcatgtggcggagatgctgcggacgatcgacttccagccaggagccagcggcgaggaggaggaagtggcacccgatggagaggagggatcagctggccctgaggaggagcgaccggacggcccttag

SEQ ID NO: 29197 - DNA, 756 bp, synthetic construct
  source 1..756: mol_type = other DNA; note = Synthetic coding sequence
atggctgcttcaaccatgtccatctgtagttctgcatgtaccgactcttggagagtggtggattgtcccgaaagctgctgtgaaccatgctgttgtgcccctgctccctccttgacactggtctgtacccccgtctcatgtgtgtctagcccttgttgtcagaccgcttgcgaaccttcagcttgtcagtccggttatacctcatcatgtacgaccccttgctatcagcaatcgtcttgccaacctgattgttgcacaagctccccgtgtcagcaggcttgttgcgttcccgtctgttgcgtgccagtttgttgtgtgccagtgtgtaacaaacctgtgtgtttcgtacctacatgctctgagtcctctccctcatgttgccaacagagctcctgtcagccaacatgctgtacttcctcaccctgccagcaggcctgttgcgtccccgtgtgtagtaaatccgtctgctacgtccctgtctgtagtggagctagcaccagctgttgccagcagtcgagttgccagccagcatgttgcactgcttcctgctgccgaccatcctcaagtgtgtctcttctgtgtcaccccgtgtgtaagtccacttgttgcgtccccgttccaagttgcggcgcaagtgcttccagttgccaacctagctgctgccggactgcgtcttgcgtttcgctgctctgcagaccagtatgttctagacccgcttgctactccctgtgttcggggcagaaatcctcctgctag

SEQ ID NO: 29198 - DNA, 1128 bp, synthetic construct
  source 1..1128: mol_type = other DNA; note = Synthetic coding sequence
atggccgctagtactatgagcgtctgctcctccgacctctcctacggatctcgtgtgtgtcttccaggttcatgtgattcatgttctgacagctggcaggttgatgactgcccggaaagctgttgcgagcccccatgttgcgccccaagctgttgcgcgccagcgccatgcctgtcactggtgtgcacacctgtctcccgcgtctcctccccgtgttgccctgttacatgcgaaccgtctccatgccaatctggatgcacaagcagttgtacacccagttgctgtcagcaatcaagctgtcagcttgcgtgctgtgcctcctcgccatgtcagcaggcatgttgcatgcccgtgtgttgcaagacggtgtgttgcaagcctgtttactgtgtgccagtgtgctcaggggatagctcctgctgccagcagtccagctgccaatccgcatgttgtacttcgtccccatgccaacaggcgtgttgtgtccctatttgttgtaagcccgtatgctcaggcattagcagttcatgctgccagcaatcatcctgcgtatcctgtgtctcttctccatgctgtcaagctgtgtgcgaaccgagtccgtgccagtccggctgtatttcatcatgcaccccttcttgctgtcagcagagttcgtgccagcccgcatgctgcacttcctctccttgtcagcaagcttgctgcgtgcccgtgtgttgtaaaccggtgtgctgtgtgcccacatgtagcgatgactccgggtcttgttgtcagcccgcttgttgcacttccagccagtcccaacagggctgttgtgtgcctgtatgctgtaagcccgtgtgttgcgtcccagtgtgttcaggcgcatcttcatcatgttgtcaacagtccagctgccaacccgcatgttgcaccactagctgttgccgaccaagctcatctgtgagtttactttgtcgccctgtgtgccgacccacctgctgtgtacccgtgccttcctgttgcgcccctacttccagctgtcaggcaagctgctgccgtccagccagttgcgtgagcctgttatgcagacccgcttgttccagacccgcttgctgcggcccaaccagcacgcagaaatcatcctgctag

SEQ ID NO: 29199 - DNA, 1587 bp, synthetic construct
  source 1..1587: mol_type = other DNA; note = Synthetic coding sequence
atggccacccgcgtggaggaggctgccaggggcagaggaggcggagctgaggaagccactgaggcaggcagagggggtcgtcggcgatcaccccgacagaagtttgagatagggacaatggaagaggctggcatctgtggtctgggcgtgaaggccgatatgctctgtaactctcaatccaacgacatcctgcagcatcaaggtagcaattgtggcggaacatctaacaaacattcactagaggaagatgaaggctcagactttattactgagaatcggaacttggtttctccggcttactgcactcaagagtctcgggaggagattcctgggggagaagccagaacggatcccccagatggccagcaggactccgagtgcaatcgcaacaaggagaagactctcgggaaggaggttctgctgcttatgcaagcacttaataccttaagtacccccgaggagaagctggctgccctttgcaaaaaatatgctgaccttttggaggagtctagaagtgtgcagaagcagatgaaaattctgcaaaagaaacaagctcaaattgtgaaggagaaggttcacctgcagagcgagcacagcaaggccatattggcacgcagcaagttggaatcactgtgccgcgaattgcaacgacataataaaacgctgaaggaagagaacatgcagcaggctagagaagaggaggagcgaaggaaggaagccactgcacattttcagatcaccctcaatgagattcaggcccagttggagcaacatgacatccataatgctaaactacggcaagagaatattgagctcggtgagaagttaaaaaagctgatcgaacagtacgctctgcgggaggaacacatcgacaaagtgttcaaacataaagagcttcagcagcagttagtcgatgccaagctgcagcagactactcagttgatcaaagaagccgatgaaaagcatcagagggagagggaattcctcctcaaagaggcgacggaatcccgccataagtacgagcaaatgaagcagcaagaggtgcagttaaaacaacagctgtcactatacatggacaaattcgaggagtttcagaccacaatggctaagtctaatgaactgtttaccacatttcgacaggagatggagaagatgaccaagaaaatcaagaagttggagaaagagaccattatctggcgaaccaaatgggagaataataacaaagctttgctccagatggcggaagaaaagaccgtgcgagataaagaatacaaggctctccagattaagctggagcggctggaaaaactgtgccgggcattacagactgaaaggaatgagcttaatgagaaggtggaagttctaaaagaacaggtttcaatcaaagctgccattaaggcagccaatagagacctcgccactccagtaatgcaaccctgcaccgctctggattcacacaaggagttaaacacctccagtaagagagctctgggagctcacctcgaggctgagcctaagtcgcagcgctctgcggtgcaaaaacctccgagcacagggtccgccccagccatcgagagcgtcgactag

SEQ ID NO: 29200 - DNA, 399 bp, synthetic construct
  source 1..399: mol_type = other DNA; note = Synthetic coding sequence
atgagggcctctccgtgcataagccagccagcagcctcctggcatccgcgaccatccgcactccggccaactgctggatcaggccctgacacccgcacacctggaactgtcgaggacggctcagcaccctgccccgcttttagaagccccgctgtaagcccctgcggcgaggagccatgctgtttccagatttcccctgctgaggagacacttgaactggggagacttgtgtccccgggtaattgtgatacactatccccgcgagctgctggcttctatgcctgccatgtccggtctctgatcccctgccgctctactaaaggcagatggccactgactgcctcagctgctggactgagcaggcacgcacagtgcggccctagcttaggtctcggatag

SEQ ID NO: 29201 - DNA, 1944 bp, synthetic construct
  source 1..1944: mol_type = other DNA; note = Synthetic coding sequence
atggccgaatttcgagtccgggtgagcaccggcgaagcatttggcgcaggaacctgggacaaagtctctgttagtattgtcggaaccaggggcgagtccccgccactgccattagataaccttggcaaagagttcacagccggagcagaagaggactttcaggtcacgttaccagaggacgtgggcagggttctgttgctgagggtccacaaggccccaccagttctccctctcttaggaccccttgctcctgacgcgtggttttgcagatggttccagctcactccacctaggggtggccatctgctgtttccctgttatcaatggttggaaggagctgggaccctagtactccaagagggaacagctaaggtctcttgggccgaccaccaccccgtgctgcagcagcagcggcaggaggagctgcaagccaggcaggagatgtatcaatggaaagcctacaatcccggttggcctcactgcctagatgagaagaccgtggaggatctcgagttgaatatcaaatattccacggcgaaaaacgcaaacttctatcttcaggcaggaagcgcttttgctgaaatgaagattaagggcctcctggaccgtaagggactgtggaggtctttgaacgaaatgaagcggatattcaattttcggcgaacaccagctgccgaacatgcctttgagcactggcaggaagatgcgtttttcgcttcccagttcctcaatgggctgaatccagtgttgatacgtagatgccattatctgccaaagaacttcccagtgacagacgccatggtggcgtcagtgcttggcccaggaacgagccttcaggctgagctggagaagggctcgctcttcctggtggaccacggaatcctttcaggcatccaaaccaacgtgatcaacgggaagcctcaattcagcgccgcacctatgactttgctctatcaatcccccggatgcgggcctctgttacccctggctatccaattatcgcagacccccggacccaatagccccattttcctgcccactgacgacaaatgggactggctgctcgccaagacatgggtcaggaatgccgagttcagtttccatgaagctctgacgcacctgcttcactcacatctgctacctgaggtgtttacactggccactcttagacagctcccgcattgccacccactatttaagtccacaggaatcggaattgaagggttctccgaacttattcagagaaatatgaagcagctcaattactccctcctctgcctgccagaggatatccgcacccgcggtgtcgaggacatcccagggtattattacagagacgatggaatgcaaatttggggagccgtagaacgttttgtgtcggagattatagggatctactatccaagtgacgagtctgttcaagacgacagggagctgcaggcatgggttcgcgagatcttctcgaaaggcttcctcaatcaagaatcctcaggaatcccctcaagtctcgagactagggaagccttggtgcagtatgtaacaatggtaatctttacatgttcggcaaagcacgccgcagtgtccgcagggcagtttgatagctgcgcatggatgcccaatttgcccccttcaatgcagctcccaccccctacttcaaaaggcttagctacatgtgagggcttcatcgcaactctgccccctgtgaatgctacatgcgacgtcatactggcactgtggctgctctccaaagagccaggcgatcagcgcccactggggacatacccggatgaacacttcacagaggaggctccacggcgatccatagctacttttcagagcaggcttgcgcagatctcccggggtatccaagaaaggaatcagggactggtcttgccgtatacctacttggaccctcccctgatcgaaaactcagtatctatatag

SEQ ID NO: 29202 - DNA, 2031 bp, synthetic construct
  source 1..2031: mol_type = other DNA; note = Synthetic coding sequence
atggctgagtttcgagtgcgcgtgtcaacaggcgaggcttttggcgctggtacatgggacaaggtgtccgtgtccatcgtgggcacgcggggagaaagccctccactgccactcgataacctaggaaaggaattcacagctggcgctgaggaggattttcaggtcaccctgcccgaagacgtgggaagggtcctgttactgcgagtgcacaaggcccctccggtcctgcccctgttaggcccattagcgcctgacgcttggttctgccgctggtttcagctaactcccccaaggggtggacacctcctgttcccgtgctaccagtggttagagggggcaggcaccttagtattacaggaaggtacagccaaagtgagttgggctgatcaccacccggtactacagcaacagcgtcaggaagagcttcaagcccgacaggagatgtaccagtggaaggcatacaatcccggatggccgcactgtctggacgaaaagaccgtggaagatctcgaactcaacatcaagtactctacagctaaaaacgccaacttttacctgcaggctgggagcgcgttcgcagagatgaagatcaagggcttgttggatagaaaaggcctttggcgaagtctcaatgagatgaagcggatatttaattttcggaggacccctgcggctgagcatgctttcgagcattggcaggaggacgccttcttcgcctcgcagttccttaacgggctgaaccccgtgcttattcgtcgctgccactacttgcccaagaacttcccagttaccgacgctatggtcgcctctgtattgggcccaggcacctcactgcaggctgaattggaaaaaggctctctgttcctggtagaccacggcatactcagcggcatccagaccaatgtgatcaatggaaagccacagtttagcgctgctcccatgacgctgctgtatcagtctcccggatgcggcccactgctcccactcgctatccagttatcacagaccccaggacccaattcccctatttttctcccaaccgatgataaatgggattggctactggcaaaaacgtgggttagaaatgctgagttctcgtttcacgaggcactcacccatctgttacactctcacttgcttcctgaagtatttacattagcgacgttacgccaacttccacactgtcaccctttgtttaaactcctcattccccacactcgctacactctgcacataaatacactcgctcgagaacttctgatcgtcccgggacaggtagtcgacagaagcactggcattggtatagaaggcttctcggaacttattcagcgtaacatgaagcagctgaactatagtctcctatgtttgcctgaggatatccggaccaggggcgtggaagacatcccagggtactactatcgagatgacggtatgcagatttggggagctgttgaaaggtttgtctcggagattattggtatttattaccccagcgacgagagtgttcaggacgacagagagcttcaggcctgggtgcgcgaaatattcagtaagggttttctaaaccaagaaagctcagggatcccctcttcccttgagacacgagaggcactggtccagtacgtgaccatggtaatcttcacttgctcagctaaacacgctgctgtttcagccggacaattcgattcgtgcgcttggatgccaaatctgccaccttccatgcaattaccccctccaacatcaaagggcctcgctacttgtgaagggtttattgccacgctccccccagtaaacgccacctgtgacgtcatacttgccctgtggctgctgagcaaggaaccaggagatcagcgacctttgggaacttaccctgacgaacacttcaccgaagaggccccaagacggtcaattgccactttccaaagtaggctggctcaaatttcaagaggcatccaggagcggaaccaagggctggtgttgccatatacctacctggatccccctctaatcgaaaattccgtgagcatatag

SEQ ID NO: 29203 - DNA, 1665 bp, synthetic construct
  source 1..1665: mol_type = other DNA; note = Synthetic coding sequence
atggctacaagcgccgacagtcccagcagcccactaggagccgaggacttgctatcagattctagtgagcctccaggacttaaccaggtctcgagcgaagtgacatcccaactctacgcttctcttcgattgagcagacaggctgaggccaccgcaagagcccaactgtaccttccctctacctcccccccacacgaaggcctggacggatttgcccaagagttaagccggtcgttgagcgtcggcctagaaaagaatctgaagaagaaagatgggagtaaacatatatttgagatggagtccgttcggggacaactgcaaacaatgctccaaactagccgggacacagcttatcgggacccgctgattcccggtgcaggctccgaacgtagggaagaggattcattcgacagcgacagcaccgcaactctcctgaatacacggccactccaagacctgagtcccagctcttcagcccaggcattagaagaattatttcctcgttatacttcactgcggcctgggccaccgctcaaccctccggatttccaaggcttaagagatgcattggactctgagcataccaggcgcaaacactgcgagcgacatatccagtctcttcagacccgtgtcctggaactgcagcagcaactggctgtagcagtggccgctgaccggaagaaagacaccatgatagagcagcttgataaaactctggctcgggtggtggaagggtggaaccgccacgaagccgagcgcaccgaagtgttgcgaggcctgcaggaagagcaccaggctgccgagctgacgcggagtaaacaacaggaaaccgtgaccagattggagcagtccctgtccgaggctatggaagccctcaacagagagcaggagtcagcacgactccagcagcgcgagcgggaaactctcgaagaggagcggcaggccttaaccctgaggttggaagcggagcagcagcgctgttgcgttctacaggaggagcgtgacgccgctcgtgctgggcagttgtcagagcaccgtgagcttgaaaccctgagagcagccctggaggaagagcgccagacctgggcccaacaggagcaccagttgaaggaacactaccaggctctgcaagaggaatcgcaagcccagctcgagcgcgaaaaagagaagtcacaacgcgaggcccaggctgcctgggaaacccagcaccagctagccctcgtgcagtcggaagtccgtcggcttgaaggcgaactggatacagcgagacgggagcgagatgccttgcagcttgagatgtccctcgttcaggcccgatacgaatctcagcgtatccagctcgagtctgaacttgctgttcagctggaacagcgcgtaaccgagcggctagctcaggctcaggagtcctcactgcgacaagccgcatcactgagggagcatcataggaaacaactgcaggatctcagtggccagcaccagcaagagctcgcatcacagctggctcagtttaaggtggagatggcagagcgcgaggagcggcagcaacaggtggcagaggactacgagctacgactgttgctgcttgaccccccagctcccggactgcgcagcccaaggaggcggcgtgggggaagcgggctctgtctgccttggccctggccctag

SEQ ID NO: 29204 - DNA, 2778 bp, synthetic construct
  source 1..2778: mol_type = other DNA; note = Synthetic coding sequence
atggcaacgagcgctgatagccctagttcacccctcggagcggaagatctgctgagtgacagctctgagccacctgggctgaaccaggtgtcctccgaggtcacatcacaactgtacgccagtctgcgcttatcccgccaagccgaagccacagctcgtgcacaactctatctccctagcacatcccccccacacgagggactagacggtttcgcacaggagctgtctcggagccttagtgtgggactcgaaaaaaacctaaagaaaaaggatggatccaaacatatttttgagatggagtcagttagagggcaactgcagacaatgcttcagacctctcgagacaccgcatacagagatcccttgatccctggtgcgggatcagagcggagagaggaggacagcttcgattctgacagcacagctaccctcctgaatacaaggccgctgcaagacctgagtcctagctcatccgcccaggcactggaggagctgttccccagatacacaagcctgcgccctgggccacccctcaaccctcccgactttcaggggctgagagacgcgctcgattccgaacatacacgtcgcaagcattgtgaacggcacatccaaagtttgcagacccgggtcctggagctccagcagcaattggccgtggccgttgctgctgacaggaagaaggacaccatgatagagcaactggataaaacactggctcgtgtagtcgaggggtggaacaggcatgaagcggagagaaccgaggtattacgcggtctccaggaggaacaccaagcagctgagcttacacggtctaagcagcaagagaccgtcacccgcttggaacagagcttaagtgaggcaatggaagcactcaaccgagagcaagagtcagcacgcctgcaacagcgcgagcgcgaaacccttgaggaggaacggcaagctctgacattgcgcctcgaggcggagcaacagagatgctgcgtgctgcaggaagagagagacgccgcaagggccggacagctgtccgagcatcgggagctcgagacacttagagcagctctggaggaggaacgccagacctgggcccagcaggaacatcaactcaaggagcattaccaggcccttcaggaagaatcccaggcccagcttgagagggagaaagagaagtctcagagggaagctcaggcggcttgggaaacacagcaccaacttgccttggtgcagagcgaggtgagacggcttgaaggtgagctggataccgcgcgacgcgagagagatgcactccaattagagatgagcctcgtgcaggcgaggtacgaatctcaacgcatccagctcgaatcggagttagcagtgcagttggagcagcgggtgactgagcgcctcgctcaggcacaggagagttctctccggcaagccgcatccctgagagagcaccatagaaagcagcttcaggacttgtcgggccagcatcaacaagaactcgcctctcagctcgcacagtttaaggttgagatggccgagcgggaggagcgccagcaacaagtggccgaagactatgagctaaggctagcccgtgagcaggcaagggtgtgtgagcttcagtctggcaaccagcagcttgaggaacagagggtggaactcgtagagcgcctgcaggccatgctgcaggcgcattgggatgaagccaatcagcttttaagtacgacgctcccaccccctaaccctccagccccaccagcaggaccatcttccccgggacctcaagaaccggaaaaggaggagcgacgggtgtggacaatgccccctatggctgtcgctttgaaacctgttctgcaacagtcacgggaggctagggacgaactacctggcgcacctcccgttctttgcagcagcagcagcgacctatccctgctcttggggccatcctttcagagtcagcattccttccagccgttagagcccaaacccgacctgacaagcagcaccgccggagctttctctgcactgggcgcatttcaccctgaccacagggcagagcggcctttcccagaagaggatcccggacctgacggagagggcctgttaaaacagggcctcccaccagctcagctggaaggcctgaagaactttcttcaccagctgcttgaaactgtgccacagaataatgagaaccccagcgttgacttgttacccccaaaatcaggtccactgacagtcccaagttgggaggaggctccgcaggttccacggataccaccccctgttcacaaaactaaggttcccctagcgatggcatccagcctttttagagttcctgaacctcccagtagtcatagtcagggcagtggacctagctccggaagtcctgagagaggaggggatggtctaacatttccgaggcagctgatggaagtttctcaactccttaggctataccaagctagagggtggggagccctcccggctgaggacctccttttatatctcaagcgactagaacactctggctataagcctggaagaaaagaagaagggttttctgggtggaaactcgattacggagagtggagtgggaccgatggaagaggcgacaacgtacccagaaggaataccgatagccggcttggcgagatccccaggaaggaaataccctcacaggccgtgcctcgaagactggccactgcacccaaaactgaaaaaccccctgcgcgaaaaaaatccggacacccggctccatcgagcatgcgttccagaggcggagtatggaggtag

SEQ ID NO: 29205 - DNA, 2961 bp, synthetic construct
  source 1..2961: mol_type = other DNA; note = Synthetic coding sequence
atgtatttttgctggggcgctgactctcgggagctccagcgtcgaagaaccgcaggctcacctggtgccgagctccttcaggccgcaagtggcgagagacactccctgttgctgctgacgaaccacagggtcctgtcctgcggagacaactcacgcggtcagctagggaggcgcggagctcaaaggggcgagctgcctgagcccattcaagctttggagacgcttattgtggacttggtgtcatgcgggaaggagcacagtctggctgtgtgtcataaggggagagtcttcgcttggggcgctggatctgagggccaactcgggatcggtgagttcaaagagatcagcttcacacctaaaaagatcatgactctgaatgacataaagattatccaggtttcctgtggccactaccactcacttgcattgtcgaaggatagccaggtatttagctgggggaagaattctcatggacaacttggtctggggaaggagtttccatctcaagcctcgccccagagggttagatctttggaggggatcccactagcacaggtcgccgctgggggagcccacagcttcgccctgtccctctgcggcacttctttcgggtgggggtccaactctgccggtcagcttgcactgtccggccgaaacgtgcccgtccagtctaacaagccattaagcgtaggcgcactaaaaaacctgggcgtggtgtatatctcctgcggggatgctcatacagccgtgctgacccaggatgggaaggttttcacctttggagataatcggagtggccagttaggctacagtcccacacctgagaagagaggccctcaactggtcgagcggattgatggtcttgtcagtcaaattgactgcgggtcataccacacgctggcctatgtacacacgaccgggcaggttgtaagttttgggcacggcccatctgatacctcaaagcccacgcaccctgaggctctgaccgaaaactttgacatttcttgcctaatcagcgccgaagattttgtcgacgtccaagtgaagcatatttttgctggaacgtacgccaatttcgtgactacacatcaggacacatcgagcacccgggctccgggtaaaaccctgcccgaaatcagccgcatctcacaatctatggcagaaaaatggatcgcggttaagaggagatccaccgagcatgagatggcaaaatctgagattaggatgatattctcttccccggcttgcctgacagccagctttttgaagaagcggggtaccggggagactacatccatcgacgtggaccttgaaatggcaagggatacctttaagaagctcacgaagaaggagtggatatcgagtatgataaccacatgcctagaggacgacttgcttagggcgctcccctgtcacagtcctcatcaagaagctctttccgtttttttactactacctgagtgtccagttatgcatgactctaagaactggaaaaaccttgtggtgccgttcgctaaggctgtgtgcgaaatgtctaagcagtccttgcaggttctcaagaagtgttgggcctttctgcaagaatcctcactcaaccctctaatccagatgctcaaagcagccattatcagccagctgctgcatcagacaaaaacagaacaagaccactgcaacgtgaaggctctgcttggcatgatgaaagaacttcacaaagtgaacaaagcgaactgccgtctaccagagaatacttttaacattaacgaactgtccaatttgttgaacttctacattgaccggggtagacaactgttccgtgataatcatttgatgtccgagaagaaggcttacatgcttatgcacgagaccatcttacagaaaaaagacgagtttcccccaagtccaagattcattctgcgcgttagacggtctcgacttgtgaaggatgctctacgacagcttagtcaggccgaagccacggatttctgtaaggtgcttgttgtcgaatttatcaacgaaatctgccctgagagcggcggtgtgtctagcgaattttttcattgtatgttcgaagaaatgacgaagcctgaatacggtatgttcatgtaccccgaaatgggatcctgtatgtggtttccagcgaaacctaaacctgagaagaaaaggtacttcttgttcggcatgctctgtggactgtctctatttaacctgaatgttgctaatctgcccttcccccttgctctgtataagaagctcctggaccagaagcccagtctggaggatttaaaagagctaagcccccgactggggaagtctctgcaggaggtcttggatgacgccgcagatgatatcggggacgcactctgtatccgcttttcgattcactgggaccaaaatgatgtggatcttatcccaaacggtatctccattcccgtggatcagacaaacaaacgcgactatgttagtaaatatattgactatatcttcaatgtgagcgtaaaggccgtatacgaggagtttcaacgaggcttctaccgcgtgtgcgagaaagagattcttcgacatttctaccctgaagagctgatgacagccattattggtaataccgattacgactggaaacaatttgagcagaattcaaaatacgagcagggataccagaaatctcatccgaccattcaattattttggaaggccttccataagctgactttggacgagaaaaagaaatttttatttttcctgacaggaagggatcgactccacgctagaggtatccaaaagatggagattgtgttccgatgtccggagaccttcagcgagcgcgatcaccccaccagcataacatgtcataacattctgtcccttccgaagtatagtaccatggagaggatggaggaagcgctccaggtagccattaacaataacagaggttttgttagtccaatgttgacccagagctag

SEQ ID NO: 29206 - DNA, 435 bp, synthetic construct
  source 1..435: mol_type = other DNA; note = Synthetic coding sequence
atgaccacaaggcaggctacaaaagatcctctgttgcgaggagtcagccccacaccatcaaaaatccctgttagaagtcagaaacgtactccgtttcccacagtgacttcgtgcgcagtcgaccaggaaaaccaggacccgcgtcgctgggtccagaaacctccactgaacatccagagacccctcgtggactcagccggaccacggccaaaagccagacaccaggcagagacctctcagaggctggtgggcattagccaaccaaggaacccgctggaagaactcaggccgagccccaggggacagaacgttggcccaggaccccctgcccaaaccgtactagttcctgcccctgggaagctattcgccctccgcaggagcccttttcctcctgcaaagtgccacctcgccaggtgccacgggctatacctgtag

SEQ ID NO: 29207 - DNA, 327 bp, synthetic construct
  source 1..327: mol_type = other DNA; note = Synthetic coding sequence
atggccgatcctagggtgagacagatcaagatcaaaaccggggtagtgaagcgcctagtaaaggaaaaggtgatgtacgagaaagaggctaaacaacaggaggaaaaaattgaaaagatgagggccgaagatggggaaaattacgacattaagaaacaggctgaaattctccaggagtcgcgaatgatgatccctgattgccagcgcagattggaggctgcctacctcgatcttcagcgtatcctggagaacgagaaggacctcgaggaagcggaggagtacaaagaggctcgtctcgtactcgattccgtgaagctcgaagcgtag

SEQ ID NO: 29208 - DNA, 1341 bp, synthetic construct
  source 1..1341: mol_type = other DNA; note = Synthetic coding sequence
atgcgggagtgtctttccatccacataggccaggcaggaatccagattggggacgcatgttgggaattgtactgtttggaacacggcattcagccaaatggtgtggttcttgacacacaacaggatcagctggaaaatgctaagatggaacacactaatgcatcattcgatacgttcttttgcgagacaagagcgggtaaacacgtgcccagagcattgtttgtggaccttgaacccacggttattgatggcattaggaccggccaacaccgttctttattccacccagaacagctgttgagcggcaaagaagacgccgcaaacaactacgcgagggggaggtatagtgtcggttcagaggtgattgacttggtccttgaaaggacacgcaagctagccgaacagtgcggcggtctgcagggctttctaatcttccggagctttggcggaggtactggatcaggcttcacctcactattaatggaacggctgacaggcgaatatagtcgcaagacaaaacttgagttctctgtgtatcctgccccacggatatcaacagcggtggtggagccatacaatagcgtgctgactacccatagcacaactgaacacactgactgtacattcatggttgataatgaggccgtctacgatatttgccatcggaagctgggtgtggagtgtccttcgcacgcctctatcaacaggttagtagtgcaagtggtgtcttctattacagcatcactccggttcgaggggccactaaacgtagatctcattgagtttcagacaaacctggttccgtaccccaggatccactttcccatgaccgctttcgcgccaattgtctctgccgataaagcttatcacgaacaatttagcgtctctgacattacaaccgcctgttttgaaagctcgaaccagctcgtgaagtgtgacccacggcttggaaagtacatggcttgttgcctgttgtacagaggcgacgtggtgccaaaggaggtgaatgccgctattgccgcaaccaagtcccgccatagtgtgcaatttgttgactggtgcccaacaggattcaaagtcggaattaataataggccaccaaccgtgatgcccggaggcgatctagctaaggttcaccgatctatttgcatgctatcaaacactacagctatcgtcgaagcctgggcgaggcttgaccacaagtttgacttaatgtacgccaaacgtgccttcctgcattggtatttaagagagggcatggaagaggccgagtttctggaagccagggaggatctagcagctttggagagagattatgaggaggtcgctcagtcattctag

SEQ ID NO: 29209 - DNA, 873 bp, synthetic construct
  source 1..873: mol_type = other DNA; note = Synthetic coding sequence
atgggatccagcaaaaaggtgacattatccgtactctctagagagcaatcagaaggcgttggagctcgggtgcgcaggagcatcggcaggcccgaactgaagaacctggacccattccttctatttgacgaattcaaaggtggtagacccggaggtttccctgaccaccctcatagggggttcgagacagtgtcctatctgctggaagggggttccatggctcatgaggacttctgtgggcatactgggaaaatgaaccctggagaccttcagtggatgacagccggtcggggaatattgcacgctgagatgccttgcagcgaggagcctgcacatggtttgcagctgtgggtgaaccttcgttcttccgagaaaatggtggaaccacaataccaggaacttaagtccgaggagatccctaagccatccaaggacggtgtaaccgtcgccgtgatttccggggaggccctcgggatcaagagtaaagtttacacccggacccccaccctctatctggactttaaactggatccaggcgctaagcactcccaaccgattcccaagggctggacttcttttatctacactatctccggggacgtatatattggaccagatgatgctcagcaaaaaatagaacctcatcacacggctgtgttgggcgaaggtgactctgtgcaggtggaaaacaaggatcctaagagaagccacttcgttcttatcgctggcgaaccccttcgcgagcctgtgattcagcacggtccttttgtaatgaatactaacgaggagatctctcaggcaatcctggactttcgtaacgctaaaaacggctttgagagggcgaaaacctggaaatctaagatcgggaattag

SEQ ID NO: 29210 - DNA, 873 bp, synthetic construct
  source 1..873: mol_type = other DNA; note = Synthetic coding sequence
atgggtagcagtaagaaagtgaccctgtctgtcctgagcagagaacagtcagaaggcgtgggtgccagggtgcggagatcgatcggcagaccagagctgaaaaaccttgatccattcttgcttttcgacgagttcaaaggaggccgtcccggtggcttcccagaccacccacatcgcggttttgaaacggttagttacctgctggaagggggaagcatggcacatgaggatttctgtggtcacactggtaaaatgaaccctggcgatctgcagtggatgacggctgggagaggcatactacacgcagaaatgccctgctcagaagagcccgctcatggacttcagctgtgggtgaacctgcgaagttctgagaagatggtcgagcctcagtaccaagagctgaagtctgaggaaatcccaaagccttccaaggatggcgttaccgtggctgtgatttccggtgaggcgctgggcatcaagagcaaagtgtatacccggacaccaacactgtacttagactttaagctggatcccggtgcaaaacatagccaacctatccctaaaggctggacgagcttcatctatactatttccggtgatgtttacatcgggccagatgacgctcaacagaagatcgagcctcaccataccgccgtactgggtgagggggattcggttcaggtagagaataaggaccccaaacggtcgcactttgttctcatcgctggcgaacccttgagggaacctgtgatccagcatggaccattcgtgatgaacaccaatgaagaaatctcccaggccatcttagatttccgaaacgccaagaacggctttgaaagggccaagacttggaagtcaaaaatcggcaattag

SEQ ID NO: 29211 - DNA, 1200 bp, synthetic construct
  source 1..1200: mol_type = other DNA; note = Synthetic coding sequence
atggacttctttagctctcaccttcttgccgattcttcctcgcctgccactaactcttcacacactgatgcccacgagattctcgtttccgactttttggtgtccgatgagaacctgcagaaaatggagaacgtgctggatttatggtctagcggactgaaaaccaatatcatcagcgagctaagcaagtggaggctgaactttatcgactggcatcggatggagatgagaaaggagaaggagaaacatgctgcccacctgaagcagctttgcaatcagattaatgagctcaaagagctacagaagacctttgaaatctccatcggcaggaaggacgaggtcatatcctctctctcccatgccataggtaaacagaaagaaaaaatcgagttaatgaggaccttttttcactggaggatcggtcatgtccgagcccgtcaggatgtctacgaaggcaagcttgccgatcagtactaccagaggacgctgctgaaaaaagtctggaaggtgtggagatcagttgttcagaagcagtggaaagacgtagttgagagggcttgtcaggccagggccgaagaggtatgcattcaaatctcaaatgattatgaggccaaagttgcgatgctgtccggggcactagagaacgctaaggctgagatccagcgcatgcaacacgagaaggagcacttcgaggatagtatgaaaaaggcctttatgagaggtgtttgtgccctcaacctcgaagccatgactatcttccagaacaggaacgacgccggtatcgactctactaacaacaagaaggaggagtacggtcctggggtacagggtaaggagcactctgctcatctcgacccaagcgctccgccaatgcccctaccggttactagccctctgttaccatcccctcccgctgccgtcggaggagcttccgctactgccgtgccatcagccgcttccatgacctcaactagagccgcttctgctagctctgttcatgtgcccgtgtccgccctgggtgcgggttctgctgccaccgcggcatcagaggagatgcagacaatcccacaggccaccgcggctaaataccccaggactatccacccggagtcttccaccagcgcctcacgctctctaggaaccagaagcgctcatacacagtcattgacaagtgtacacagtataaaagttgtggattag

SEQ ID NO: 29212 - DNA, 729 bp, synthetic construct
  source 1..729: mol_type = other DNA; note = Synthetic coding sequence
atggccgctgtaaaagcctcaacatcgaaagcgacacgcccatggtacagtcaccctgtgtacgctcgctattggcagcattatcaccaggccatggcatggatgcagtcccatcataacgcttataggaaggctgtggagtcatgtttcaatttgccatggtatttgccctcagccctcttaccgcagagtagctatgacaatgaggcagcctacccgcagagcttctacgatcaccatgtcgcttggcaggactatccttgctcctcatctcactttcgacgcagtggtcagcatcccagatactcctctcggatccaggcatcaaccaaggaagatcaggcactgtcaaaagaagaggaaatggaaaccgagtctgacgctgaggtggaatgtgatctgtctaacatggaaattaccgaagagctccggcagtacttcgctgagacagagaggcaccgtgaggagagaaggcggcaacagcaactggacgccgaacgactggactcctatgtgaatgccgaccatgatctgtactgcaacactagacgctcggtcgaggcccctactgagagaccaggggaaaggcggcaggccgagatgaaaaggctgtatggagacagtgctgccaaaattcaggccatggaggcagccgtgcagctctcctttgataagcattgcgaccggaaacagcctaaatattggccggtcattccgcttaagttttag

SEQ ID NO: 29213 - DNA, 1482 bp, synthetic construct
  source 1..1482: mol_type = other DNA; note = Synthetic coding sequence
atggaaaggagcccggacgtgtctcccggtccttcacggagttttaaggaagagctcctatgtgcagtgtgttatgatccctttcgggacgccgtcaccctaaggtgcggtcacaatttttgcagagggtgcgtgagcaggtgttgggaggtccaggtgagccctacttgcccagtctgtaaggaccgcgcatctccagccgacttaaggaccaaccacacactcaacaaccttgtggagaagctattgagggaagaagcagagggagcgcgttggacgagctacaggttctctagggtgtgtaggctccatagaggacaactaagcctgttttgcctggaggataaagaactcctgtgttgtagttgccaggcagacccccgtcaccaaggtcacagggtgcagccagttaaggatactgctcacgattttcgtgttagatcactgatcgccgaagaaaggaggaattttctgcctacacaccagtggattgtgaccaagacccgcttgcaaacaagttccccgaaccttcagtctcgtcggcagggacaggttcaggagcatggtgcttgtaccgctggtgaaggccaggggctgctgggacacgcagctttgctcgatgcaatggctgaagagacacgacaaaagcagctattggctgatgagaaaatgaagcagctgacagaagagacagaagtgctggcacacgagattgagaggctacagatggagatgaaggaagacgatgtgagcttcctgatgaagcataaatcacgcaagcgacgactgttctgtactatggagcccgagccagtccaacctggtatgctcatcgacgtgtgcaaatacctgggctctctacagtatcgggtctggaaaaagatgcttgcctcagtggagtctgtcccgttttctttcgatcccaataccgcagccggttggttgtccgtctccgatgacctgacctccgttactaatcatggttacagggtgcaggtggagaaccctgagagattttcatcggcaccctgcttgctaggctctcgcgtcttctcacagggatcacacgcttgggaagtggccttaggaggtttacagtcctggcgtgttggcgtcgtgagggtcagacaagattcaggggcagaagggcatagtcactcatgttaccatgacactagatcaggattctggtatgtatgcaggacacagggagttgagggtgatcattgcgtgacatcagaccccgctacatccccactagtgctggccattcccagacgtctgcgtgttgagcttgagtgcgaggagggcgaactgtccttctacgacgcggagagacactgtcacttgtatacctttcacgctagattcggcgaagtgcgaccttacttttacttaggaggcgctcggggtgcaggccctccggaacctcttagaatttgccccctccacatcagcgtcaaagaggaactggacggatag

SEQ ID NO: 29214 - DNA, 1473 bp, synthetic construct
  source 1..1473: mol_type = other DNA; note = Synthetic coding sequence
atgaatcttgcagaaatctgcgataacgccaaaaagggcagggaatacgccttactgggcaattacgactcgtctatggtgtattaccagggggtgatgcagcaaatccaaaggcattgccagagcgtgagagaccccgctattaaggggaagtggcagcaggtgcgtcaggagctactggaagagtacgaacaagtcaagagtatcgtgagcaccctcgagtcattcaaaatagacaagccacctgattttcctgtctcttgccaggacgagccatttagggatcccgctgtttggcctcctccagttccagcagaacatcgggcaccaccacagatcaggcggccaaatagagaggtgcgacccctacgcaaagagatggcaggtgtaggagcgagaggcccagtaggtcgcgctcatccaattagcaaatctgagaaaccttctacttccagggacaaagactatagggcaagaggccgagatgataagggcaggaaaaatatgcaggacggagcttcagacggagagatgcctaagttcgacggcgctggctacgacaaagacctagtggaggccctggagcgggacatcgtgagtcgcaacccttctatccactgggacgatattgccgatctcgaagaagccaagaaactgttgagagaggccgtcgtactccctatgtggatgcctgatttcttcaaggggatccggcgaccctggaaaggggtgctgatggtgggccctccaggcacgggcaagacaatgcttgctaaagcggtggctaccgagtgcgggacgaccttctttaatgtgagctcttctaccttaaccagcaagtacaggggcgagtccgagaaactcgtgaggctgctgttcgagatggcacgcttttacgcccctacaacgatcttcatcgatgagatcgattctatctgctctcggcgaggcaccagcgacgaacacgaagcatccaggcgcgtgaagtccgaacttctcattcagatggatggggttgggggagccctggaaaacgacgatccctctaagatggtgatggttcttgcagccaccaacttcccatgggacatagacgaggccctcaggcgacgattagagaaaaggatctatattcctctgccaactgcgaaaggcagggcggagctactgaagatcaatctcagggaggtagaactggatcctgatatccaattagaggacatcgccgaaaaaatagaaggctattccggggctgatattacgaacgtgtgtcgtgacgcgtctctaatggcaatgagacgcaggatcaacgggttgtcacctgaggaaattcgggcattgagtaaggaggagctgcagatgccggtgacaaagggtgatttcgaactggccttgaaaaagattgccaaatctgtctctgctgctgaccttgagaaatatgagaaatggatggtggaatttggcagcgcctag

SEQ ID NO: 29215 - DNA, 1473 bp, synthetic construct
  source 1..1473: mol_type = other DNA; note = Synthetic coding sequence
atgaaccttgctgagatctgtgataacgcaaaaaaagggcgagaatatgccctgctgggaaactacgattccagcatggtgtactaccagggcgtaatgcagcagattcagcgccactgccagtctgtaagagacccggctatcaaaggtaagtggcagcaggtccggcaggagttactggaggaatacgagcaggtaaaatccatcgttagcaccctcgaatcttttaagatcgacaaaccacccgacttcccagtcagctgccaggatgaaccttttcgtgaccctgccgtttggcccccacccgtgccggcagaacacagggctcctccccaaattcgtaggccaaatcgggaggtgagaccactcagaaaggagatggctggagttggcgcaagaggccctgttggtcgcgcacacccaataagtaagtctgagaaaccgtcgacctcccgcgataaagactacagagctcggggtagagatgataagggcaggaaaaacatgcaggacggcgcatcggatggcgagatgcctaagttcgacggtgcaggctacgataaggatctagtggaggctctggagcgcgacatagtctctcggaacccaagcatccactgggacgacattgctgatctggaggaggccaaaaagctgttgcgcgaggccgtagttctacccatgtggatgcccgacttttttaaggggattagacgtccttggaaaggggtcttgatggtaggtccccctggcaccggaaagactatgctggctaaggctgttgctacagaatgtggcacaaccttcttcaatgtgagctcaagcactttgaccagcaaatatagaggagagagcgagaaactggtgcggctgctgtttgagatggccaggttctacgcccctacaaccatcttcattgatgagattgattcaatttgcagccgacgaggaacgtctgacgaacatgaagcgagtcgtagggtgaaatccgaactgctgatacagatggatggcgtcggaggggcactggagaacgatgacccatcgaagatggtgatggtgttggctgccaccaacttcccgtgggatattgacgaagccctgagacgccgactggaaaaacggatttatattcctctgcctactgccaaaggcagagccgagctgctgaagatcaatctacgtgaagttgaactggaccctgatatccaactggaagatattgcggaaaaaatcgaggggtactcaggagcagacataacgaacgtgtgtcgggatgccagtctcatggccatgagaaggcggattaacggcctctctcccgaagaaatccgtgcgctgagcaaggaagagctccagatgccagtaacgaaaggagactttgagctggccttgaagaaaatcgccaaaagtgtctcagccgcagatctggagaagtatgagaagtggatggtggaattcggctctgcatag

SEQ ID NO: 29216 - DNA, 1068 bp, synthetic construct
  source 1..1068: mol_type = other DNA; note = Synthetic coding sequence
atggactttatctttcatgagaagcaggaggggttcctctgcgctcagcattgtcttaacaatctgttgcagggtgaatacttttcccccgtggagctggcttccatcgcacaccagctagatgaggaagaaaggatgcgcatggcagaagggggagtgacttctgaggagtatctggccttccttcagcagccgtctgagaatatggacgataccggcttcttttccattcaagtaatcagcaacgcactaaagttctggggattggaaatcatacactttaataatcccgaataccaaaagttagggatcgaccctatcaatgaaagatcgttcatatgtaattataagcagcactggttcactatcagaaagttcggcaaacattggttcaacttaaactctctccttgctggaccagagttgatttcagacacatgtttggctaacttccttgcacggctccaacaacaggcctatagcgtctttgttgtgaaaggcgaccttcctgactgcgaagcggatcagctgttgcagattatcagcgtagaagaaatggatactccaaagctcaatggcaaaaagctggtcaagcaaaaggaacatcgggtttacaagaccgtcctcgaaaaggtgagcgaagagagtgacgagagtgggacttccgaccaggacgaggaagacttccagagagccctcgagctaagcaggcaagagactaacagggaagatgagcacctcagaagcacaatcgaattatccatgcaggggtccagcggtaacacatcccaagacctgcccaaaacaagctgcgtaacaccagcttctgaacagccgaagaagatcaaggaggattactttgagaagcaccagcaagaacagaagcagcagcaacagcagagcgatctaccgggacactcatcttatctccacgaacgccctaccacgtcaagtcgggctatcgaatctgacctctctgacgacatctctgaaggcacagtccaggcagctgttgacaccatactggaaattatgaggaagaatcttaagatcaagggagagaagtag

SEQ ID NO: 29217 - DNA, 5909 bp, synthetic construct
  source 1..5909: mol_type = other DNA; note = Synthetic coding sequence
atggctgccagatccgccccttcctgtcatttacggcttgaatgggtttacggatatagggggcatcagtgtcgtaataacctctactatacagccgctaaagaaatagtctatttcgtagccggtgtcggcgtggtgtattctccgagggaacaccggcaaaagttttacaggggacacagtgacgacattatcagtctggcattacaccctgaaagagttctagtggccacagggcaggtcggaaaggaaccttatatctgcatttgggacagctatacagttcagaccataagtgtgctgaaagatgttcacacgcacggaattgcctgtcttgcctttgatctggacgggcaaagacttgtgtcagtgggattggacagtaagaacgccgtatgcgtttgggattggaagcgtggaaaaatgctgtcgatggcccctggacataccgaccgcatattcgatatctcctgggacctataccagccaaataagctggtcagctgcggagtgaaacacataaaattctggtccctgtgtgggaatgcactgactccgaagagaggcgtgttcggaaagacaggtgatttacagacaattctttgtctggcctgtgcgcgtgatgagcttacttatagcggcgcattaaatggcgatatttacgtgtggaaggggataaatctgataagaaccatccagggagcccacgctgccggtatatttagcatgaatgcgtgcgaggaagggtttgcaacaggtggtagggacgggtgtatccgcctttgggacctgaccttcaaacctatcactgtgattgatttacgagaaacagatcaaggctataagggcttgtccgtgcgcagtgtgtgctggcgcggtgaccacatactggtgggtactcaggatagtgaaatatttgagatcgtcgtacaggagaggaataaaccgttcttgattatgcagggccactgcgaaggagaactatgggccctcgccgtgcaccctactaaaccactggcagtgaccgggagcgacgatagatcagttcgaatttggtcccttgtagaccatgcactcatagcccgatgcaacatggaggaacccatccgatgtgcagctgtaaacgccgacggaattcacttagccttgggcatgaaagatggatcgttcactgtgctcagggttagggacatgacagaggtggttcacatcaaggaccgtaaggaggctatccacgaactgaaatactcaccggacggaacctacttagccgttgggtgtaatgattcaagcgtggatatttatggggttgctcagcggtacaagaaggtgggggagtgtttaggaagcctgtcctttatcacccacctggactggagcagtgacagccgctatttgcagacaaacgacggtaatggaaaaaggctgttttaccgaatgcctgggggaaaggaggtgacttccacggaagagatcaagggtgtccactgggcttcatggacatgcgtgagtggactagaagtcaatggaatttggcccaaatatagtgatatcaacgatatcaacagtgtcgatgggaattacatcgggcaggtgcttgtaactgcagacgactacggaattatcaagctgttccggtacccttgtctgcggaagggtgccaagttcagaaagtatatcggtcactctgcccacgtgactaatgtacgatggtcccatgactatcaatgggtaattagtattggcggagccgaccacagcgtgttccagtggaaatttattccagaaagaaaattgaaggacgccgtgcacatcgcaccacaggagagtctggctgactcccactccgatgaatctgacagcgacctgagcgacgtgccggagctagacagcgaaattgagcaggagacccagctgacctacagaagacaggtgtacaaggaggacctgccgcaactcaaggagcagtgcaaggaaaaacagaagtccgcgacgtctaaacgcagagagcgtgcccctggcaactccattagactacattttgtgcatggttatcggggttatgactgtcggtctaacctcttctacacacagataggggagatcgtgtatcatgtggccgcagttggggtgatctacaaccgccagcagaacacgcaaaggttctacctggggcacgacgatgatattctctgtttaacaattcatccactgaaggattacgtcgcaacagggcaggtgggaagggatcctagcatccatatttgggacacagaaaccatcaaacccctgtccattctcaagggccatcatcaatacggtgtaagcgccgtggacttttcagcagatggaaagcgtctcgcttcagtaggaattgacgattctcacaccgtagtgctgtgggattggaaaaaaggtgagaagctctcgatagcgcgtggaagcaaagataaaatcttcgttgtgaagatgaatccatacgttcctgataagctgatcacagctgggatcaaacatatgaagttttggagaaaggccggaggcggattaattggcaggaaaggctacattggcacactgggaaagaacgacacaatgatgtgcgcggtctacgggtggaccgaggaaatggcattttccggaactagcactggggatgtctgcatctggagggatatctttctggtgaaaacagtcaaggctcacgacgggcctgtgttttctatgcatgctctggaaaaaggatttgttacagggggtaaagacggtatcgtggccctatgggacgattccttcgaacggtgtctaaagacgtatgccattaaaagagcagctctagcaccgggttctaagggccttctgttagaagataatccctccatccgggcaatcagcttaggtcatggtcatattctggtggggactaaaaatggcgaaattttagaggtggacaagtctgggcctattacactcttggtccagggacacatggaaggagaagtttggggtttggcaacgcacccctacttgcctatttgcgctactgtttcagacgataagacgctccgcatttgggatctgtctccaagtcactgcatgcttgccgtgcgaaagctgaaaaaggggggtcggtgttgctgtttctccccagacggcaaggctctcgccgttggccttaacgacggttcgttcctaatggcgaacgccgataccctggaagatctagtatccttccaccataggaaagacatgattagtgacatacgttttagccccggttctgggaagtacctcgccgtggccagccacgatagcttcatagatatctacaatgttatgtctagcaagagagtcgggatctgtaaaggggctacttcatatattacacatatcgactgggacatcaggggaaaactgctgcaagttaatacaggcgctaaggagcagctctttttcgaagccccaaggggaaaaaaacagaccattcccagtgtggaagttgagaagattgcttgggcatcctggacctcggtgctgggcctctgctgtgaagggatctggcctgtgataggtgaggtaaccgacgtgaccgcctcttgcctcacttccgataaaatggtactcgcaacgggcgatgacttagggtttgtgaaactctttcgataccccacaaaagggaaattcgggaaatttaaacgttacgttgctcactctactcacgtgacaaatgtgaggtggacctatgatgattctatgttggtaacactaggaggaaccgatatgtccctgatggtctggactaacgaaatggaaggctatagagaaaaaagaccttgcgactccgaggagtcggacattgacagtgaagaagatggcggatatgatagtgacgtcacaagagagaacgaaattagttatacgataagagcactgtccacgaatatccggccaatgctcgggattaaacctcatctgcagcagaaagaaccatccattgatgaaagaccaccggtctctagagcaccgccacagcccgagaagcttcagacgaataacgtaggcaagaagaaacggcctatcgaggacctagtgctcgaactgatcttcgggtaccgcggaagggactgtcgcaacaatgtccattacctgaatgatggggatgatataatctatcacacagccagcgttggcatcctgcataacgttgcaaccggctcgcagtccttctaccaggagcacaatgacgacatcctgtgcctgactgtgaatcaacatcccaagtttataaatatcgtggcaaccggccaggtgggtgactcggcagacatgagtgctacagcaccaagcattcacatctgggacgccatgaataagcagaccctgtcaatcctccgatgttaccattcgaagggggtctgttccgtgtcctttagcgccaccggcaagctgttgctgtccgttggacttgatcccgaacacacaatcactatctggcggtggcaggagggggctaagattgcctcaagagctggtcacaaccagcggatttttgtggccgaattcaggcccgacagcgacacccagttcgtgagcgttggggtgaaacacgtcaaattttggacattggcagggagagccctgctgagcaaaaaaggattattaagcacactggaagatgcaagaatgcagaccatgttagcaatcgcattcggggcaaacaatctgacattcacaggcaccatttctggtgatgtttgcgtatggaaagaccatatcctgtgccggatcgtggccagggcccataatgggccagtgttcgcaatgtacaccacgcttagagatggactcatcgtgacagggggtaaagaacgcccatctaaagaagggggagcagtgaagttgtgggaccaagaactccgaagatgccgcgcatttaggttagaaacgggacaggccaccgactgcgtgagatctgtgtgcaggggtaagggaaagatccttgtgggcactagaaacgctgagataattgaagttggtgaaaagaatgcggcttgcaacattctggtgaacgggcatgttgatggacccatatggggactcgctactcacccgtcccgggatttcttcctgtctgccgctgaggatggcaccgtccgcctctgggatattgcagacaagaagatgttaaataaggtgaaccttggccacgctgctcggaccgtgtgttactccccggagggcgacatggtggccataggaatgaagaacggtgagttcattattctcctcgtgtctagcttgaagatttgggggaagaaaagggaccggagatgtgcaattcacgacatacggttcagcccagacagtcggtatttggctgtcggatcatccgaaaattctgtggacttttacgacctcaccttaggcccaactcttaaccggatctcctactgcaaagacatccccagtttcgtaattcagatggattttagcgccgattcatcttacctgcaggtgagctctggatgttacaagcggcacgtttacgaagtaccatctggcaagcacttaatggatcacgccgcaatcgaccgaataacctgggccacctggacctctatcctgggtgacgaagtgctcggtatctggagtcgtcacgccgaaaaggctgacgttaactgcgcatgtgtgtcccacagcggaatttccctcgtgacgggcgacgactttggcatggtaaaattattcgacttcccgtgtcctgagaaattcgcaaagcacaagcggtttttgggacactcgccccatgtgaccaacatcaggttcaccagtggcgataggcatgtcgtgtcagctgggggagacgactgctcactgtttgtgtggaagtgcgtccatacaccacacta

SEQ ID NO: 29218 - DNA, 1146 bp, synthetic construct
  source 1..1146: mol_type = other DNA; note = Synthetic coding sequence
atgcccttgcaggtctctgattacagttggcagcagacaaagacagccgtatttctctcattgcctcttaagggagtttgtgtccgcgacaccgacgtgttctgcacggagaattatctgaaggtcaacttccctccttttcttttcgaagcatttctttatgctcccatcgacgatgagtcctcaaaggctaaaatagggaacgatactatagtgtttaccttatacaagaaggaagctgctatgtgggaaacactgtcagtgaccggcgtggataaagagatgatgcagaggatccgggagaagtctatcctccaggcacaggagagggccaaggaagccaccgaggccaaagcggctgctaagagagaagatcaaaagtacgcccttagcgtgatgatgaagatcgaagaagaagagaggaaaaaaattgaggatatgaaagaaaatgagaggatcaaggccactaaagctctggaagcatggaaggagtatcagcggaaggctgaagaacagaagaagattcagcgggaggagaagctgtgccaaaaggaaaaacaaatcaaggaagagcgtaagaaaataaaatacaagagcctaacacggaatctggccagcagaaacctggcaccaaagggtagaaactcagagaatatttttacagagaagctgaaagaggattcgatcccggctcccagaagtgtgggttcaataaaaattaatttcacccccagggtctttcccaccgctctgcgggagtcccaggtggcagaagaagaggagtggctgcataagcaggctgaagcgaggcgtgctatgaacaccgatatcgccgaattatgcgatctcaaagaggaggagaagaaccccgagtggttaaaagacaaaggcaacaagctgtttgctacggaaaattacctggcggctattaatgcctacaaccttgcaattagactcaacaacaaaatgcctctcctctacctcaatagagctgcctgccaccttaagctcaaaaatctgcataaggctatcgaggactctagtaaagaattttgctcgcttgaaggcatagaatgtcaggctagcgagccgaaactcagccaccacatcccttctgatttgcatgtatacattcagatggcctag

SEQ ID NO: 29219 - DNA, 1344 bp, synthetic construct
  source 1..1344: mol_type = other DNA; note = Synthetic coding sequence
atggcgggtgccggagggggaaatgacatacagtggtgcttctcccaggtgaagggggctgttgacgacgatgttgccgaagcagacataatttcgactgtagagttcaatcacagcggcgaactcctggctacgggcgacaaaggcggacgtgttgtgatcttccaacaagagcaggagaataaaatccagtcacattcgcggggagaatataacgtgtactctacttttcagtcgcacgaaccagaattcgactacctaaagagccttgagattgaggaaaagattaataagattcgttggctgcctcagaaaaatgcggcacagtttcttttaagtacaaacgataaaacgatcaaactgtggaagatatctgaaagggacaagagacccgaggggtacaacctaaaggaagaagacggacggtatagggatccaaccaccgtgaccaccctccgcgttcctgtgtttcgcccaatggatctcatggtggaggcatctcccaggcggatcttcgcgaatgcccacacataccacataaactcaatctcgatcaactctgattacgagacatatctgagtgctgatgacctgcggataaacttatggcatttagaaatcaccgataggtctttcaacatagttgacatcaaacccgctaacatggaagagctgaccgaagtgataactgccgcagagtttcaccccaattcatgcaatacgttcgtttacagcagctccaaggggaccatccgtctttgtgacatgcgcgctagcgcgctatgcgatcgccatagtaaactgttcgaggaaccagaggatcctagcaataggtcttttttttctgaaatcatcagcagtatctctgacgtcaaattttcacacagcggacgctatatgatgaccagagattatttaagcgtaaaaatatgggatctgaatatggagaatagaccagttgagacgtatcaagttcacgagtacctgaggtctaagctgtgctccctctacgagaacgactgtatcttcgacaagtttgagtgctgttggaacggctctgactccgtcgtaatgactggctcctacaacaattttttcagaatgtttgaccgcaataccaagcgagatattacattggaagccagtagagagaataacaagccacggaccgtgctgaaaccgagaaaagtgtgtgcctctggcaagaggaaaaaggatgagatctccgttgactccctcgattttaacaagaagattttgcataccgcctggcaccctaaggagaatattatcgctgtcgccactaccaataatctgtacatcttccaggataaggtgaattag

SEQ ID NO: 29220 - DNA, 1413 bp, synthetic construct
  source 1..1413: mol_type = other DNA; note = Synthetic coding sequence
atggacctgagggaccaggagttagtcaagattgtcggcattcgatacgaggttggacccccaacgctgtgctgtctgaaactcgcattcatcgacccggctactggcaagctaatggataagagtttctccattcggtaccacgatatgccagatgtgatcgatttcctcgtcttgcggcaattctatgacgaggcaaggcagcggaactggcagagttgcgatcgatttcgctccattatagacgacgcttggtggttcggcaccgtgttgagccaggagccgtatcagccacagtaccctgactcccatttccaatgctacatcgtgcgctgggataatactgagatcgaaaaactgtcgccctgggacatggagcctatcccagacaatgttgatccacctgaggaactgggcgcatccatttcagtcacaacagatgagttagagaagctcctctacaagccccaggctggggagtggggccagaagtcccgagatgaggagtgtgaccgtatcatcagtggaatcgaccagttgcttaacctcgatattgctgccgcatttgctggccctgttgacctctgcacttatcctaagtattgtaccgtcgtcgcgtatccaactgacttatataccatcagaatgagactggtgaatcgattctacagaagactaagcgccttagtgtgggaggtgcgttatatcgagcacaacgctcgtacttttaatgaacccgagagtgtcattgctcgctcagccaaaaaaatcaccgaccagctgctgaaatttatcaagaaccaacactgcacgaacatcagcgagctcagtaacaccagcgaaaacgatgaacagaatgccgaggaccttgatgactcagacttgccgaagacttcgagcggcagacgcagagactacagggatattattgacacacccatggactttggtacagtgcgggagacgctggacgcaggcaactatgattctccactcgagttttgtaaagacatccgacttatattttcaaacgccaaggcatatacccctaacaaaagatctaagatttacagcatgacattgcgcctgagtgcgttgtttgaggagaaaatgaagaaaatcagttcggatttcaagattggacagaaattcaatgagaaactgagacgatctcagaggtttaagcagaggcagaattgcaagggggattcccagccaaacaaaagcatcagaaacctaaaaccaaagcgacttaaatcacaaactaagataattccagagttggtcggcagcccaacccagagtaccagcagcaggaccgcatacctggggacacacaagacctctgctgggatctcgagcggggtgacctctggcctgttccggtttagcagaatcattcgaaaggaatag

SEQ ID NO: 29221 - DNA, 516 bp, synthetic construct
  source 1..516: mol_type = other DNA; note = Synthetic coding sequence
atgtgcggtcgagccccaccccctgaaataaccggccgtgagccaggttaccacttagtagagcagagttgctggctgaagcctctaccaagaaatttgggccacagtctattctggacagtgtggaaaccaagaccggtgtcacagttggttgcacaacaggttacacagcagtttgtccctcccacccagtcgaagaaagaaaaaaaggacaaagtggaaaaggagaagagcgaaaaggagacgaccagcaagaaaaatagccacaagaagaccaggcccagactgaagaacgtggaccgctctagcgcacagcacctggaagtaacagtaggtgacttaactgtgattattaccgacttcaaagaaaaaactaaaagcccaccggcttcctccgctgccagcgccgaccaacactctcagtcaggtagcagctctgataataccgagagaggcatgtcccgctctagttctcccaggggagaggctagttccctgaatggcgagtctcactag

SEQ ID NO: 29222 - DNA, 417 bp, synthetic construct
  source 1..417: mol_type = other DNA; note = Synthetic coding sequence
atgggcgacaagaaatcacctacaaggaagcctcgcccagtgtcgcagctagtggcacagcaggtaacccagcagtttgtcccaccaacccagtccaagaaagagaaaaaggacaaggtcgaaaaagaaaagagcgaaaaagaaactacatccaaaaaaaactcacacaagaaaacgcggcctaggctgaaaaatgtggaccggagcagtgctcagcacttggaagtgactgtgggagacctcacagttatcattacagacttcaaagagaaaactaaatcacctccagcatccagcgctgcttcagccgatcaacacagccaatctgggagcagcagcgataacaccgagcgcggtatgtctcgcagcagctccccacgcggagaagccagcagcctgaacggggagagccactag

SEQ ID NO: 29223 - DNA, 1047 bp, synthetic construct
  source 1..1047: mol_type = other DNA; note = Synthetic coding sequence
atggggcattgctgctgtaaaccctacaattgcctccaatgtctggataagactaacgagtcagctcttgtcaaggaaaaggagctcagcattgagctggccaatattcgggacgaggttgcattccataccgcgaagtgtgaaaaacttcagaaagagaaagaagaactggagcgtaggttcgaggacgaagttaaaagactgggctggcagcagcaggcagagctccaggagctggaggagaggttgcagctccaattcgaggctgagatggctagactgcaggaagaacatggggaccagctgctctctattcgatgtcagcaccaggagcaggtagaagatctgactgcctctcacgacgcagcactcctagaaatggagaataaccacaccgtggctataaccatactgcaggacgaccacgatcacaaagtgcaagaacttatgtcgacacatgaacttgaaaaaaaggaactggaagagaattttgagaaattgagactgtctttgcaagaccaagtggacacactgacctttcaatcacaatccttgcgtgaccgagccaggagatttgaggaggcgctgcggaagaatactgaagagcaactggagatcgccctggccccttatcagcatctggaggaggatatgaagtctctcaaacaagtgcttgagatgaagaaccaacagatacacgaacaggaaaagaagatcctggagctggagaaattagctgagaaaaacatcatcctggaagaaaagatccaggttcttcagcagcagaatgaggatcttaaggcccgaatcgaccagaatactgtagtcaccagacagctttccgaggaaaacgccaatcttcaggaatacgtcgaaaaagaaacacaagaaaagaaaaggctgagcaggaccaatgaggagctgctgtggaagctgcagacaggcgatcctacgtctcccatcaagctaagcccaacaagccccgtttaccgagggtcaagctcagggcctagctctccagctcgtgtgagtacaactcctcgatag

SEQ ID NO: 29224 - DNA, 2664 bp, synthetic construct
  source 1..2664: mol_type = other DNA; note = Synthetic coding sequence
atgaacagcggaggcggtctgccaccaccgagcgctgccgcaagcccatcttcatctagcctggccgctgccgtagcagtggtagctcctcctggggtcggcggtgttcccggaggcgcagctgtgggtgtgaagctaaaatactgccggtactacgcaaaggataagacttgtttttatggagaagagtgccagttcctgcatgaggaccccgctgccggtgcagctcccggtctgggtctgcactcgaactcagtgcccctggccttggccggtgcacctgttgccggatttcctccgggtgctgtcgccggtggaggcgctggtccccctccaggcccaaagaaaccagacttaggtgacccaggtactggcgcagcagctggcggtggtggcagttctggtggcctggacggcccacgattggcgattcccggaatggacggcggagccctgaccgacacatcactgaccgactcctacttctctaccagtttcatcggcgtaaatggttttggcagtcccgtagagacaaagtaccctcttatgcagcgaatgaccaattcgtcttctagcccatcgctcctgaacgactcggctaagccatatagtgctcacgaccccctgacttcccctgccagttctctgtttaatgacttcggagctttaaacatttcacagcgacggaaaccacgtaaatacagactcggaatgctggaagaacgcctcgtcccgatgggctccaaagcacgcaaggcaaagaatcctatcggttgcctcgctgatcgctgcaagtctggggtccccatcaacatggtgtggtggaaccgcgtgaccgaaaacaatctccagacccccaaccccaccgcatctgaattcatccccaagggcggaagcacatctcggctgtctaacgtaagccagagtaacatgagcgctttttcgcaggttttctcccacccaagcatgggtagccctgctaccgccggtttagctcccggtatgagtctgtctgccggttcaagccctctgcattcacccaaaataaccccccatacctcccctgcccctagaagaaggagtcacacacccaatcccgcttcctacatggtaccaagcagtgcctccactagcgtgaacaatccagttagccaaacaccaagtagcggccaggtgatccaaaaggaaacggtgggcggtacgacatatttctacacggatactacacctgcgcctttgactggaatggtcttccccaactaccatatctatccgccaaccgcaccacatgtcgcttatatgcagcctaaagccaatgcccctagcttctttatggctgatgagctgcggcaggaacttataaaccggcacctcattacgatggcccagatagaccaggcggacatgccagccgtgccgaccgaggttgactcgtaccattcactgttccccctcgaacccctgccgcctcccaacaggattcagaaaagctcaaatttcggatacattacaagctgctataaagccgttaatagcaaagacgacctgccgtattgcctacggcgtatccatgggttccggttggtgaacacgaaatgtatggtacttgtggatatgtggaagaaaattcagcattccaatatcgtgacattaagagaggtgttcaccacgaaggcttttgcagaaccctccctggtttttgcttacgattttcacgccggaggagagactatgatgagccggcattttaacgatccaaatgcagacgcgtactttaccaaaagaaaatgggggcagcatgaaggcccactgcctaggcagcacgccggattactccccgagagtctgatatgggcatacattgttcagctgtctagcgccttgcggactatccacactgccggacttgcctgtcgagtaatggacccaaccaagatcctgatcactggcaaaacccggctgagggttaattgtgtaggcgtatttgacgtgttgactttcgataacagtcagaacaataatcccctggctcttatggctcagtatcagcaagccgaccttatctctctgggcaaagtcgtgctcgcacttgcctgcaacagcctagccggtattcagagggagaatctgcagaaagccatggaattagtgacaattaactactcatccgatctgaagaacctgattctctacctgctgaccgatcaaaaccgcatgagaagtgtgaatgacatcatgcccatgatcggcgctcgattctatacccagttggacgccgctcaaatgcggaacgatgtgattgaagaagaccttgcaaaggaagtgcagaacggacggttgtttagactccttgccaaactgggtacgatcaatgagaggcctgagttccagaaagaccctacttggagcgagaccggagatcgctaccttttaaaacttttccgcgatcatcttttccatcaggtaacagaagctggcgctccatggatcgatctgagccatataatatcctgtctgaataaactcgacgctggggttcccgagaaaattagtttgatttctcgtgatgagaagtccgtcttggtggtgacttatagcgatctgaaaagatgctttgagaacacattccaggagctgatagcagccgctaatggtcaactgtag

SEQ ID NO: 29225 - DNA, 1710 bp, synthetic construct
  source 1..1710: mol_type = other DNA; note = Synthetic coding sequence
atggccaccctagtcgttaacaagctcggcgcaggcgtggatagcggaaggcaaggctctcgagggaccgctgtggtgaaagttctggaatgcggggtatgcgaagacgttttcagcctccaaggcgacaaagttcctcgcctgttactctgtggtcacaccgtgtgccacgactgcctgacccgcctccctctgcacgggagagctatccggtgccctttcgatcgccaggtgactgatcttggcgatagcggggtgtggggcctgaaaaaaaacttcgctctgctggaactgctggaacggctccagaatggtcctatcgggcaatacggcgcagcagaggagagcatcggaatctctggcgagtccatcattcgatgcgacgaggacgaggcccacctcgctagcgtgtactgtaccgtgtgcgccacccacctctgctccgagtgtagccaagttactcactcaaccaagactctggcaaagcaccggagggtaccacttgccgacaagcctcacgagaaaaccatgtgcagccagcaccaggtgcacgcaatagaatttgtgtgcctggaggagggttgccagaccagtccactaatgtgttgcgtttgcaaagagtacggcaagcaccagggccacaagcacagcgtactggagcctgaggcaaaccaaatccgtgcctctatcctggacatggcccattgtattcgcacttttaccgaggagatttcagattattcccggaaactggtaggcatcgtgcagcatatagaaggaggggaacaaattgtcgaggacgggattgggatggctcacactgagcacgtgcccggaacggccgaaaatgctagatcatgcattcgcgcatatttttacgacctgcacgagaccctttgtagacaggaagaaatggcactctcggtagtggacgcccacgtgagggaaaaactcatctggctgcggcaacagcaggaggatatgactattttgctgtccgaagtgtctgctgcatgccttcattgcgagaagactctccagcaagatgattgcagggtggttctagccaaacaggagattacgcgcttgctggaaacccttcagaagcagcagcaacaattcacagaggttgccgaccacatccagctggacgcctctattcctgtgacgtttaccaaagacaatcgcgtccacatcgggcctaaaatggagatccgggtggtcacactgggccttgatggggctggcaaaacaactattctatttaagcttaagcaggacgagttcatgcagcccatcccaacaataggttttaatgtcgagactgtcgaatacaaaaatcttaagttcactatctgggatgttggaggaaaacataagctgcggcctttatggaaacactactatcttaatacgcaggcggttgtcttcgtggtcgactccagtcatcgcgacaggatttcggaggcccactctgaattggcaaaactcctcactgaaaaggagctcagagatgcactgttgctgattttcgctaataagcaggacgtggctggcgcactttccgtcgaggagatcacggaacttctcagtttgcacaagctctgttgcggtagaagctggtatattcaggggtgcgacgcacgaagcgtttttcagatcatttgtgatcagtatacaggtaaagaagtggtgaccgagaagggctag

SEQ ID NO: 29226 - DNA, 2061 bp, synthetic construct
  source 1..2061: mol_type = other DNA; note = Synthetic coding sequence
atgggaagaattcaccaggccatggtgaccagccttaacgaagataatgagagcgtgaccgtagaatggattgagaacggggataccaaaggaaaagaaattgaccttgagagtatttttagcttgaacccggacttggtgccagacgaagaaatcgagccctctcctgagacgcccccacccccagccagttctgccaaggtcaataaaatcgtaaagaaccggaggaccgttgcctctattaaaaacgacccaccatcgagagacaacagagtcgtcgggtctgctcgtgcacgacccagccagtttccagagcagagctccagcgcccaacaaaatggaagcgtctccgacatcagccctgttcaggccgcaaagaaagagtttgggcctccatcccgcagaaagtccaactgtgtgaaggaggtggagaaactgcaggagaagcgcgaaaagagaaggctgcagcagcaggagttgcgggagaaacgcgctcaggatgtagacgctaccaaccccaactatgaaatcatgtgcatgatccgtgattttcgaggctcgttagattaccgacctctgactactgccgatcctattgatgaacataggatctgtgtgtgtgtacgaaagcgcccactgaataaaaaggagacacaaatgaaagacctggatgtcattaccatcccctcgaaggatgttgttatggtgcacgaacctaaacagaaggttgacctgacccgatacctggaaaatcagactttccgctttgactatgccttcgatgattctgctcctaacgaaatggtgtataggtttaccgctcggcctctggtcgaaaccattttcgaaaggggtatggcaacctgcttcgcgtacggccagaccggaagtggcaagacccacacgatgggcggagatttctctggcaaaaatcaggactgctcaaaagggatctatgcactagccgcaagagacgtttttctcatgttaaaaaagcctaactataaaaagctggagctgcaagtgtatgctacgttttttgagatatacagcgggaaggtgtttgatcttctgaaccgtaaaaccaagttgcgagtgttagaggacggcaagcaacaagttcaggtggtcgggcttcaggaacgggaggttaaatgcgtggaggatgtgctcaagctaattgacattgggaactcctgcagaaccagcggacaaacatccgctaatgcacattcctcccgctctcatgccgtgtttcagatcatccttagacgcaaaggtaaacttcacggtaaattttctctgatcgatctggctggcaacgaaagaggtgctgacacttcttctgctgacagacagacccgcctcgagggagctgagattaacaaaagcttgcttgctctcaaagagtgtataagggccctaggcagaaataagcctcatactccctttcgcgctagcaaactaacccaagtgcttcgggactcctttattggcgaaaactctaggacgtgtatgatcgcgacaatttctcccggtatggcctcttgcgaaaacactctcaatacattaagatatgcaaacagagtgaaagagctcaccgtggatccaacggcggcaggagatgttagacctattatgcaccatcccccaaaccagattgacgatttggagacgcaatggggcgtcggtagttctcctcagcgggacgatctcaaactcctttgcgagcagaacgaagaggaggtgagcccccagctctttacattccacgaagcagtgtcccagatggtagagatggaagagcaggtggtggaggaccaccgggcagtgttccaagagtcaatccgctggctggaagatgaaaaagcactgctcgagatgaccgaagaagttgactatgatgttgacagttatgctacccagctggaggccatcctcgaacagaaaatcgatatcttgacagaactaagggacaaggtgaagtcattccgcgcagcgttgcaggaggaggagcaggctagcaaacagataaatccaaagagacccagagccctgtag

SEQ ID NO: 29227 - DNA, 618 bp, synthetic construct
  source 1..618: mol_type = other DNA; note = Synthetic coding sequence
atgtctgtggacccaatgacgtatgaggcacagttcttcggtttcactccgcagacctgcatgctccgcatatatatcgcattccaggactacctgtttgaggtaatgcaggccgtagaacaggtgatccttaaaaagctggacgggatccccgactgcgacatttccccagttcagattaggaagtgcacagagaagtttctgtgctttatgaaagggcactttgacaacctgttttccaagatggagcagttgtttctgcaattgattctgaggatcccttcaaacattctgctccctgaggacaagtgcaaagaaaccccctattctgaagaagactttcagcatcttcaaaaggaaattgagcagctgcaggagaaatacaagaccgaactgtgtaccaaacaggctctcctcgcagaacttgaggaacagaagattgtccaggcgaagcttaagcagaccttgacctttttcgacgaactgcacaacgtcggacgcgatcatggcacttcagacttcagggagtccctcgtgagcttagtgcagaattccaggaagctgcaaaacatacgtgacaatgtggaaaaggagtccaaacgcttaaagataagctag

SEQ ID NO: 29228 - DNA, 1866 bp, synthetic construct
  source 1..1866: mol_type = other DNA; note = Synthetic coding sequence
atggtcttatgtcccgtcattggcaagctgctacacaaacgggtggtgttggccagcgcttctccgcgtagacaggagattctgagcaatgcgggactcaggttcgaagttgtgccatcaaagtttaaggaaaaactagataaagccagcttcgccaccccctatggctatgcgatggagacagctaagcaaaaagcacttgaagttgccaataggctgtatcagaaggatctcagagctccagacgtcgtgatcggcgctgacacaatcgtgaccgttgggggacttatccttgaaaaaccagttgacaagcaggatgcctatagaatgctgtcccgtctgagtgggagagagcacagcgtgtttactggggtggccatcgtgcactgttctagcaaagatcatcagcttgatacgcgcgtttccgaattttacgaggaaacgaaggtcaagtttagcgagctctcggaggaattgctgtgggaatatgtccattctggtgagcccatggataaggccggtggctatgggatacaagcgctgggaggcatgttggtggaatccgtccatggagactttctgaacgttgtgggtttccccctcaaccacttttgcaagcagctggttaagctctattaccccccacgccctgaggatctccgaagatctgtaaagcacgacagtattccagccgctgacacttttgaggacctgtctgacgtggagggcggaggttcagagcctactcagcgcgatgcgggtagtagagatgaaaaagccgaggccggtgaggcaggtcaggctactgctgaggctgaatgtcaccgtactagagagaccctcccccctttccccactcgactcctcgagctgatcgagggcttcatgttgagtaagggactcctgactgcttgcaaactaaaagtcttcgatcttcttaaagatgaagccccacaaaaggccgctgacatcgcttcgaaggtggacgctagcgcgtgcggcatggagcgccttctcgatatctgtgctgcaatgggactcctggaaaaaaccgaacagggctacagcaatactgaaactgcgaacgtgtatctggcctcagatggcgagtattcactgcatggcttcataatgcataataatgatcttacatggaacttgttcacttacctggaattcgcaatccgggaagggacaaatcagcaccaccgagcacttggcaaaaaggctgaggacctgttccaagatgcttattaccagtctcccgaaacacggttgcgttttatgcgcgcaatgcacgggatgaccaagcttacagcctgccaggttgccaccgcctttaatctgtcccgtttctctagcgcatgcgatgtgggcggttgtacgggcgctctggcccgagaactcgcaagggaatatcccaggatgcaagtgactgttttcgaccttccagacatcatcgagttggccgctcattttcaacctccaggccctcaggcagtccagatccacttcgccgcaggtgattttttccgggatcctctgccctccgctgagctgtatgtcctgtgcaggatcctccacgactggccagacgataaggtccacaagctgctgtctcgtgtggccgaaagctgcaagccaggagctgggctgctcctggtggagaccctcctcgacgaggaaaaaagagtggctcaaagagccctcatgcaatccctgaacatgctggtccagacagaaggtaaagaacgttctctgggtgagtatcagtgtttacttgaacttcatggtttccatcaggtgcaggtcgtccatctgggcggagtactggacgccatactggcaaccaaagtggcgccatag

SEQ ID NO: 29229 - DNA, 2541 bp, synthetic construct
  source 1..2541: mol_type = other DNA; note = Synthetic coding sequence
atgcttttcactgtctcctgctccaaaatgagctcaattgtagacagggatgattcttctatattcgatggactggtggaagaagacgacaaagacaaagctaagcgcgtatccagaaacaaaagcgaaaagaaaaggcgtgaccaattcaacgtgctgattaaggagctgggcagtatgctgccagggaatgcacgcaagatggacaaatccacagtactgcaaaaatctatagactttctgcggaagcacaaagaaatcaccgcccagagcgatgcctctgagatcaggcaggattggaaaccaacctttctcagcaatgaagagttcacgcaattaatgctggaagccttagatgggttctttttggcaatcatgacagatggatccatcatttacgtgtcggaaagcgtaacgtcgctgcttgaacatctcccatccgatttagttgaccaaagcatcttcaattttattcccgagggcgaacattcagaggtgtacaaaatcctaagcacgcacctattggaatccgacagcctgactccggaatatctgaaaagtaagaatcagttggaattctgctgccatatgctgagaggcactattgatcctaaggaaccaagtacttacgaatatgttaagtttataggcaattttaagagtttaaacagtgtctcttcaagcgctcataacgggttcgaagggacgattcagcggactcatagaccatcttatgaggaccgggtttgtttcgttgcgaccgtgaggctggctaccccacagtttatcaaggaaatgtgcacggtggaggagccaaatgaagagtttacatccaggcacagtttagagtggaaattcctgtttctggaccaccgtgcccctcccatcattggctacctgccattcgaggtgttgggcacatccgggtatgattactaccacgtcgacgatttggagaatttggccaagtgtcatgaacacctgatgcagtatggcaaaggtaagagctgttattataggtttcttacgaaaggccagcagtggatttggcttcaaacacattattacataacgtatcaccagtggaacagcagacctgagtttatcgtgtgcacccataccgtggtgagttatgccgaggtgagagccgagcggagacgcgagctggggattgaagaatctttgccggaaactgcagccgataaatcccaagacagcggctccgacaaccggattaatactgttagtctaaaagaggccctggagcgttttgatcattcgccgaccccctctgcaagcagcaggtcgtcgcgaaagtcgagtcacactgcagtgtccgatccctcaagtacacctactaagattcctaccgatacgagcaccccccctagacagcatctgcctgctcacgagaaaatggtgcagcggcgatcaagtttcagttcccaatccattaacagccagagtgtgggtagtagcctgacccagcctgttatgagccaggcgacaaacctgccaattccacaggggatgtcccagttccagttttccgcccaactgggggctatgcagcaccttaaggatcagctggagcaaaggacgcggatgattgaggctaacattcacaggcagcaagaagaactgcggaaaatccaagaacagctccagatggttcacggtcagggactacaaatgttcctccagcaaagcaacccaggcctaaactttggcagcgtgcagctgtcaagcgggaactcatccaacatccagcaattggcacctatcaatatgcaggggcaggtggtgccgaccaaccaaatccagagcggcatgaacacaggtcacatcggcactacccagcacatgatccagcaacagacactgcagtctaccagcacgcagagtcaacagaatgtgctctccggacactctcagcaaacttccttgccctcacagacccagtcaactcttactgcgccactttacaacaccatggttatttcccagcccgcagcaggcagtatggtgcagatacccagctccatgccccagaatagcacacaaagcgcggcagtaacaaccttcacacaggaccggcagatccgcttttcccaggggcagcaactcgtgacgaagctcgttactgcacctgtagcttgtggagcggttatggtacccagcacaatgctcatggggcaggttgttacagcctaccccaccttcgcgacccagcagcagcaatcccagactctgtccgtcacccaacagcagcaacagcagtcctcacaggaacagcagctgacatccgtgcaacaacccagccaggcccaactcactcagccgccacagcagtttctccaaaccagcagacttttgcatgggaaccccagcacacagttgattctgagtgcggcttttccactgcaacaatcaacgttcccccagagtcaccaccagcagcaccaaagccagcagcagcaacaactgtctcgtcacaggactgattctctgcccgatccaagcaaagttcagccgcagtag

SEQ ID NO: 29230 - DNA, 1818 bp, synthetic construct
  source 1..1818: mol_type = other DNA; note = Synthetic coding sequence
atggtgttgtgtcccgtgattggtaaattgctgcacaagagagtggtgctggcaagcgcctctccccgaagacaggagatcctgagcaacgcaggcctgagattcgaggtggtccccagcaaatttaaggagaagctcgataaggcctcattcgccacaccatacggctacgccatggagaccgcgaaacaaaaggctctggaggtcgctaatcgcctgtaccagaccgtgggcggtttaatactggagaaacctgtggacaagcaggatgcctacaggatgctttcccggctctccgggagggagcacagcgtctttaccggagtcgccattgtgcattgttcctccaaagaccatcagctggatactagggtctcagagttctatgaggagaccaaggtcaagttttccgaactctccgaggagctcctctgggagtacgtgcactctggtgagccgatggacaaggccggaggatatggcatccaggccctggggggaatgctggtcgaaagtgtgcacggcgatttcctgaatgtggtcggctttcccctgaatcacttctgtaagcaactggttaagttatattatccccctaggcctgaggacctccgcaggagtgttaagcacgacagtattcccgcagccgatacattcgaagatctctctgacgtggaagggggaggcagcgagccaactcagcgcgatgctggatcccgggatgaaaaggcggaggcaggcgaggctggccaggcaactgcagaagcagagtgtcatcggactcgggaaacgctgccgccatttcctactcgcctcctcgaattaatcgaaggcttcatgctcagcaagggactccttaccgcttgcaagctaaaggtgttcgaccttctaaaggatgaagccccacagaaagccgcagacatcgcatccaaagtcgacgccagcgcctgcggcatggaacgattgctggacatttgtgcagctatgggcctccttgagaagacagaacagggatactcgaatacagaaactgctaacgtgtacttagcaagcgacggagagtatagtcttcatggatttatcatgcataacaacgatctcacctggaacctttttacttacctggaatttgccatcagagagggaacaaaccagcaccatcgcgctttaggaaaaaaggcggaggatctttttcaagacgcgtactaccagtctcccgagacacgtctacgatttatgcgggcaatgcacggaatgacaaaactgactgcctgccaagtcgccacagcgttcaatttatctcgcttttcttctgcatgcgacgtagggggatgcaccggcgcactcgccagagagctcgcccgagaataccctaggatgcaggttacggtatttgacttgcccgacattattgagttagccgctcacttccagccccctggccctcaagctgttcagattcattttgccgcaggcgatttctttcgcgatccactgccatctgctgaactttatgtgctctgtaggatattgcatgattggcccgacgataaagtacataagctcctttccagagtcgcggaatcttgtaaacccggtgctggcctgttactcgtcgagacacttctggatgaagagaaaagggtagctcagcgtgctctgatgcagtctctgaacatgctggtccagacagaaggaaaggaacggtcccttggcgaatatcaatgtctattagagttacacggttttcaccaggtgcaagtggtgcatcttggcggagtgctcgacgctatattggcaacgaaggtggcaccttag

SEQ ID NO: 29231 - DNA, 696 bp, synthetic construct
  source 1..696: mol_type = other DNA; note = Synthetic coding sequence
atgaccgtggggaagagcagcaagatgctgcagcatattgattatcgcatgcgatgtattctccaggacggcagaatcttcataggaacgttcaaggcgttcgataagcatatgaacctgattctgtgtgactgcgacgaattcagaaagattaagcccaaaaattctaagcaggctgaaagagaagaaaaacgagtgctcggcctggtcctcctgcggggagagaatcttgtttcgatgacagtggagggccctcctcctaaagataccgggatagccagagtacctctggccggagctgctggcggtcctgggatcgggagagctgccggtcgcggtataccggcaggagtgccaatgccgcaggcccctgccggacttgccggtcctgtgcgcggagtggggggtccctcccaacaggtcatgacgccccagggacggggaactgtcgccgctgccgcagcagccgctacggcatctatcgcaggtgcgccaacccaatatccaccaggacgtggcggaccaccacctcccatggggcgaggagctccacctcccggtatgatgggcccacccccagggatgcggccaccaatgggacccccaatgggaatccctcctggcagaggcacacctatgggaatgcctcctccgggaatgaggccccctccgcctggcatgaggggacttctgtag

SEQ ID NO: 29232 - DNA, 855 bp, synthetic construct
  source 1..855: mol_type = other DNA; note = Synthetic coding sequence
atgtggcggggactggctttagcccgtgccattggctgtgctgccaggggaagaggacagtgggctgtgcgggctgctgattgcgcacaatcagggagacaccctggacctgcggtggtatgcggtcgccgactaatctccgttttggaacaaatcagacatttcgttatgatgcctgagattaacacgaaccaccttgacaaacaacaggtccagcttctcgctgagatgtgcatcttgattgacgaaaatgacaacaagatcggagctgaaacaaaaaaaaattgccatttaaatgagaatatagagaaagggctgttacatcgggcattttccgtgttcttgtttaataccgagaacaagcttctgttacagcagaggagtgatgccaaaatcaccttccctgggtgcttcacgaacacctgttgcagtcatccactgtcaaaccccgctgaactggaagaaagcgatgctctcggcgtccggcgtgccgcacagagacgtctgaaagccgagctgggcatccccctggaggaggtaccccctgaagaaatcaactatctgacacggatacattacaaagctcaatctgacgggatttggggcgagcacgaaatcgattatatactcctagtccgtaagaacgtgaccctcaaccctgatccaaatgagattaagtcatactgctacgtcagcaaagaggagcttaaggaattgctcaagaaggccgctagcggggagataaagatcacaccttggtttaaaattatcgcagccacattcctgttcaaatggtgggataacttaaatcacctgaaccagttcgtcgatcacgagaagatctaccgtatgtag

SEQ ID NO: 29233 - DNA, 180 bp, synthetic construct
  source 1..180: mol_type = other DNA; note = Synthetic coding sequence
atgacacgcggaaaccagagggagctggccaggcaaaaaaatatgaaaaagcagagcgattccgttaagggcaagcggcgtgatgatggtctctccgctgcagcaagaaagcagcgggattccgaaatcatgcagcagaaacagaaaaaggcaaatgagaaaaaagaggaacctaaatag

SEQ ID NO: 29234 - DNA, 3039 bp, synthetic construct
  source 1..3039: mol_type = other DNA; note = Synthetic coding sequence
atggaagaatatgaaaagttctgcgagaagtccctggcgaggatccaggaggcctccctgagtaccgagagctttctccccgcacagtccgagtccatctctctcatccgcttccacggagttgcaatcctctcccctctgttaaacatcgaaaaaagaaaggagatgcagcaggagaagcagaaagcactggatgtggaggctcggaagcaggtaaatcggaagaaagctctcctaacgagggtccaggagattctagataacgtccaggttaggaaggctcctaatgcatctgattttgatcaatgggagatggagacagtgtactcaaacagcgaagtgcgcaatttaaacgtgcccgctacttttccaaactccttcccgtcgcacactgagcacagtactgccgcaaaacttgacaaaattgccggaatcctgcctctagacaacgaagaccaatgtaagaccgatgggattgatttagcgcgagattccgaaggatttaactcgccgaaacagtgcgattccagcaatatatctcacgtggaaaatgaggcttttcctaaaacctcgagcgcgactccacaggaaaccctaatcagcgatgggccattctccgttaatgagcagcaggatctaccattgctagcagaggtgatacctgacccgtatgtgatgagcctgcagaacttgatgaaaaagtctaaggaatacattgagcgggaacagtccagacgatctctgaggggaagtattaacagaatcgttaatgaatcccacctggacaaagagcacgacgcagtggaagtggctgactgcgtgaaagagaagggccagctaaccggcaagcattgcgtatcggtgattcccgataaaccttcactcaacaagtcaaatgtgcttcttcagggcgctagcacccaggctagctccatgagcatgcctgtgctcgcgtctttcagcaaggttgatatacctattagaacaggacatcccaccgtgctggaaagcaactccgactttaaggtcatcccaacattcgtgaccgaaaacaatgtgattaagagtctgactggaagttatgcaaagctgccgagccctgagcccagtatgtcacccaaaatgcacaggcgtaggtccaggacctctagtgcctgtcacatattaattaacaatcccataaatgcttgcgagttatcccctaagggtaaggaacaggcgatggacttaattatccaggacactgatgaaaataccaacgttccggaaattatgccgaagttaccaacagatctggctggggtgtgtagctcaaaagtttatgtgggaaagaacacgagtgaggtgaaggaagacgtggtactggggaagtcaaatcaagtctgccaaagctcaggcaatcatttggagaataaggtgacacacggcctagtcactgtggagggtcaactcacatcggacgaaaggggtgctcatattatgaattcaacttgcgctgctatgcctaaacttcatgaaccatacgctagttcccagtgtattgcctccccaaacttcggcacagtgtccggattaaagccagcatccatgctagagaagaattgtagtctgcaaactgagctgaataagtcttatgacgtgaagaaccctagccctcttcttatgcagaatcaaaacacaagacaacagatggatacgcctatggttagctgcgggaacgaacagttcttggataatagcttcgagaaggtgaaaaggcgattggatttggacattgatgggcttcagaaggagaattgtccttacgtcattaccagcggcatcaccgagcaggaaagacaacacctgccagagaaaagataccctaagggatctggttttgtgaacaaaaataagatgctcggcacttcatcaaaagaatccgaggagctcctgaagtcaaagatgcttgcttttgaggagatgagaaagagacttgaggagcaacacgcgcagcagttatccttgttgatagcagaacaagaacgcgaacaggagaggctgcagaaagagatcgaagagcaggaaaagatgctgaaagagaagaaagccatgaccgcagaggcttctgagctggacataaacaacgcagtggagctcgagtggcgtaagatcagcgattcaagtctgctcgagactatgctgagccaggccgacagtctccacacttctaactccaacagtagcggctttactaactctgctatgcagtatagttttgtaagtgctaacgaagcccctttttacctgtggggatcttcgaccagtggacttacaaaactgagcgtcacgcgtccgttcgggagggcgaaaactagatggagccaggtcttcagcctggaaatccaggccaaattcaacaagatcactgctgtagcaaaagggtttcttacgagacggctgatgcagaccgataaactcaaacaacttcgccagaccgttaaagacactatggagttcatacggtcatttcaatcagaggccccacttaaaagaggtattgtgtccgcacaggacgcttccctgcaggagcgagtcttggcccagctgcgtgccgcactgtacggaattcacgacatcttctttgtgatggacgctgcagagcggatgtctatcctgcaccacgatagggaggtaagaaaagagaagatgttaaggcaaatggataagatgaagtctccgcgagtggcattgagcgcggctacccagaagagcctggatcggaaaaaatacatgaaggccgctgaaatgggcatgcccaataaaaaattcttagttaagcagaacccaagtgaaactcgggtgttacagcctaaccagggtcagaacgccccagtccacagactgttatcccgacaggggactcccaaaacctccgtgaaaggagtggtgcagaatcggcagaaacctagccagtcaagagtgcccaatagggtccctgtatctggcgtctacgcagggaagattcagaggaaacggccaaacgtcgcaactatctag

SEQ ID NO: 29235 - DNA, 267 bp, synthetic construct
  source 1..267: mol_type = other DNA; note = Synthetic coding sequence
atggcaagcgcctccgcacgaggcaatcaggacaaggatgcgcattttccccctccgagcaagcagtctctccttttttgtcccaagtccaagctgcacatccaccgcgcagagatttctaagattatgagagaatgccaagaggaatctttttggaaacgtgccctacccttctccttggtgtcgatgttggtgactcaggggttggtttatcagggctatttggcggctaacagccggtttggcagtttgccaaaggtcgcctag

SEQ ID NO: 29236 - DNA, 738 bp, synthetic construct
  source 1..738: mol_type = other DNA; note = Synthetic coding sequence
atgaacggtagggccgactttagggagcctaatgcagaggtgcccagacccattccgcacattgggcctgactacattcctacagaagaagagaggagagttttcgccgagtgtaacgatgagagcttctggttccggtcagtccccctggcagcaacaagtatgctgattacacagggcctcataagtaaaggaattctcagttcccatccgaagtacggctctataccaaagctgatcctcgcgtgtataatggggtacttcgccggaaagttgtcatatgtgaaaacgtgccaggagaagttcaaaaagctagagaacagtcccctcggtgaggccctacgcagcggacaggctcgaaggtcgtctccaccaggacactattaccagaaaagcaagtacgatagtagcgtatctggccagtcctcttttgtaacgagcccagccgctgacaatattgaaatgcttccgcattacgagcctattccatttagttcgtctatgaatgagtccgctccaaccggaattactgatcatattgtgcagggcccagatcccaacctggaggagagcccaaagcggaagaatattacctacgaagagctgagaaacaaaaatcgggaatcctatgaagttagcctcacacaaaagactgatccatccgtcagaccgatgcacgaacgagttcctaaaaaggaggtgaaagtgaacaagtacggggatacatgggatgagtag

SEQ ID NO: 29237 - DNA, 1551 bp, synthetic construct
  source 1..1551: mol_type = other DNA; note = Synthetic coding sequence
atgagctaccccgctgacgattatgagtcggaagctgcctacgacccatacgcctacccatcagactacgatatgcacactggggacccaaagcaggaccttgcctatgagaggcagtatgagcagcaaacctaccaggtaatccccgaggtgatcaagaacttcattcagtattttcacaagacagtgagtgatctgatcgaccagaaagtgtatgagttacaagcgtctagagtctcctcagacgtcatagatcagaaggtgtacgagatccaagacatctacgagaacagttggaccaagctcacagagaggttctttaagaacacaccctggcctgaagccgaggccattgctcctcaggtcggaaatgatgcagtattccttatcctgtacaaggagctgtactaccgccatatttacgccaaggtgtctttccaatcttttagccagtacagatgcaaaaccgccaaaaaaagtgaggaggaaatcgatttccttagatccaatcccaagatctggaacgtccattccgtactcaatgtgctgcactcactagttgataagtctaatattaaccgccagctcgaggtatacacttccggtggggacccagagagcgtagccggagagtacggcaggcactcactttataagatgctcggatactttagcctggttggcctgttgcgccttcactcccttctgggggactattaccaggccatcaaagtgctggagaatatagagctgaacaaaaaaagtatgtacagcagagtccccgagtgccaagtaacgacgtattattacgtgggattcgcgtacttaatgatgcggagataccaggatgccataagagtattcgcaaatatactgctgtacatccagcgaacgaagtcaatgttccaacgaacaacatacaagtatgaaatgattaacaaacagaacgagcaaatgcacgcattacttgcaatcgctttgacaatgtatccaatgcgtatcgacgagagtattcatcttcagctcagagaaaagtacggtgacaagatgttaaggatgcaaaagggcgatccccaagtgtatgaagaactgttttcatattcctgccctaagttcttgagtcccgttgtccccaattatgataacgtgcatccaaattatcacaaggaacccttcctccagcagctgaaggtcttctctgacgaggtgcagcaacaagcccagttgagtaccatccgatcttttcttaaactgtacacaactatgcctgtggctaaattagccggattcctcgacttgaccgagcaggaattccgcatccagcttttggtgtttaagcacaagatgaaaaacctagtctggacatccggaatctccgcccttgatggggagttccagtccgccagtgaagttgatttctacatcgacaaggatatgatacacatagccgataccaaagtcgcccgacggtacggagatttcttcatcagacagatacataaatttgaggaattaaaccggaccctcaaaaagatgggccagcgaccgtag

SEQ ID NO: 29238 - DNA, 2502 bp, synthetic construct
  source 1..2502: mol_type = other DNA; note = Synthetic coding sequence
ctttctagaagagtaccatgtgtgcgcagagggtgtaggccgcctctgcctcccttgcccggatcacagagtcgggcttggtcgcgcgatagagaagcacctctcgatccaggaagacccgcacagtctgggcgaagaccaaccagtagaagtgtgtcacacgcctgttcatggaatgggggtagtctagaccctctggaaggcactccagcccttctgcgcagcgcggagcgcctcatgaggaaagtgaagaagctacgtctggataaagaaaataccggatcctggagatccttttctctgaactctgaaggggctgaacgaattacatcttacgatttccactcagagtccgggttgtttttgtttcaagcaagtaatagtctcttccactgcagagacggaggaaagaacggatttatggttagtcctatgaagccacttgaaatcaagacacaatgcagtggcccacgcatggaccctaaaatctgccctgcagatcctgcctttttctcattcatcaacaattcagatctgtgggtggctaatattgagacaggggaagaaaggcgactgacattttgtcaccagggcctgtctaatgttctcgacgacccgaaatccgccggagtggcaacattcgtaattcaagaggaatttgataggtttacaggctactggtggtgccccacggcctcctgggaagggagtgagggattgaaaacactcaggatactgtacgaggaagtggatgagagcgaagtggaggtcatccacgtgccaagcccggcactggaggagaggaaaacggactcctacaggtacccacggacaggatcaaaaaacccaaaaatcgcccttaaactcgccgagttccagaccgatagccagggaaaaattgtctctactcaggagaaggaactagtgcagccattcagttcccttttccccaaggtggaatacattgcacgcgctggctggacccgagacgggaagtatgcgtgggcgatgttcttagaccgcccacaacagtggcttcagttagtactgcttccacccgcactctttattcctagtaccgagaacgaggagcagaggctggcaagcgcaagggcagtgcccaggaacgtgcagccttacgttgtttacgaggaggtcacgaacgtgtggataaatgtgcacgacatcttttatcccttcccccaaagtgagggtgaagacgaactttgcttcttacgcgcaaacgagtgcaaaaccggtttttgtcacctgtataaggtcaccgccgtgttgaagtctcaaggatacgattggtccgagcccttcagcccgggagaggatgagtttaaatgcccaatcaaggaagagattgctctgacatccggcgaatgggaagttcttgccaggcatggatctaaaatatgggtgaatgaggagactaaattggtgtacttccagggaactaaagacacacccctggaacatcatctatacgtggtctcttatgaggctgccggtgagatcgtgagattaaccacacccggattcagtcattcttgttcaatgtcccagaacttcgatatgttcgtcagtcactactctagcgtgagcacacccccatgcgttcacgtttacaagctcagcggccctgacgacgaccccctccataagcagccccgattttgggcttcaatgatggaggcagctagctgtcctcccgactatgttccccctgaaatctttcatttccacaccagaagcgacgtgaggctttacggtatgatctacaaacctcacgctttgcaaccgggaaaaaaacaccccactgtcctgtttgtatatggtggccctcaggttcagttggtcaacaattcatttaagggaatcaagtacctgaggctaaacacactggcaagtctggggtacgccgtcgtggtgattgacggacggggatcctgccaacgtggcctaagatttgagggagcccttaaaaaccagatgggacaggtggaaatcgaggaccaagtggaagggttgcaattcgtagccgagaagtacggcttcatcgacctctccagagtagccattcatggatggtcgtacggaggatttttgtctttaatgggcctgattcacaagccccaggtcttcaaggtggccatagcaggggctcccgtaactgtgtggatggcttacgacaccggttacaccgaacggtatatggatgtaccagagaacaatcagcacggctacgaagccggttcggtggcactgcacgttgagaagctgccgaatgaaccaaatcgcctgctgattttgcacggcttccttgacgagaacgtgcacttctttcatactaattttctggtatcccagctaattcgtgccggaaagccctaccagttgcagatttaccccaacgagcgccactcaatcagatgtccagaatcaggggagcattatgaggtcaccctgctgcactttctgcaggagtatttgtag

SEQ ID NO: 29239 - DNA, 5072 bp, synthetic construct
  source 1..5072: mol_type = other DNA; note = Synthetic coding sequence
atggactgtttattggaactaagcgcaaccgacacaaagatcgaggagagctccagccaaagttttgtggctagtgagaaccaggtcggcgcagccgaaagtaagatcatggaaaagagacccgaggaggaatcagaggatagcaaaatggattctttcctagacatgcagctgactgaggatcttgatagcctgatccagaatgcgtttgagaaactgaacagttctcccgacgaccaggtgtactcttttctgcctagtcaggatgtgaatagcttcaacgactcgtcagaattcatcaatccagatagctcaaacatgacccccatattcagcactcaaaacatgaatctgaacggcgaaaatcttgagaacagcggttcgacactgtcacttaatccactcccatcccattccgtactcaatgagagtaagtgctttatcaaagataatacactggccctcgaaagtaattatccagaggattcgctcctctccagctcacttaatgtggcgtcagattctatcgcaggttgttcctcattaaatcagaagcagaaggagctcctcgagagcgagtgcgttgaagctcagttcagtgaggcgccagtcgacttggatgcctccgaacctcaggcgtgcttgaacttgcccggactagacctgccgggtacggggggtgaccagaaatccacaagagtgagtgacgtgtttcttccatctgaagggttcaatttcaagccccacaagcaccccgagctgcctaccaaggggaaggacgtgtcttattgcccagtgctggccccattaccacttctactacccccacctcctcctccgcctatgtggaaccccatgattcccgcattcgacctgttccagggaaaccatggttttgtggcccctgtggtgacaaccgctgctcactggcgttctgtgaactatacattcccccctagcgtgatctcacacaccagtcctacgaaagtctggcgaaacaaagatggcaccagcgcctaccaggttcaggagacacccgtcagccaagtggtgagaaagaagaccagctacgtcggcctggtcttggtgctgctgcgcggattacctggaagtggtaagtccttcttagctagaaccctccaggaggataatcctagcggtgtcatcctgtccacagatgactatttctatataaacggccagtaccagtttgacgttaagtacttgggggaggcccatgaatggaaccaaaaccgcgctaaggaggcctttgagaagaagatttcacctattataatagataacaccaacctgcaggcttgggaaatgaagccgtacgtggccctatcccaaaagcataaatataaggttttgttccgagagccagatacatggtggaaatttaagccaaaagagctcgccaggagaaacatacacggtgtgtctaaagagaagattacccgcatgctggagcattatcagagatttgtttcggtacccatcatcatgtcctcctcagtcccagagaaaattgagcgcatagagctgtgcgcctattcctgcgaagacagatccacaagcccaagagacgacgaggacatcataagcgaaaaggaggagaacatcctgtctctttcactgaaacacttggaatttaccgaagaaaagaacctggatgtgacaaaagagacaatgctcccagagaacgtggcttacctgagtaatgctgacctcaataaaagacggaaagagatctcagacatgaatcccagcattcagagcgctttaattctagaaacaccacatatgtacttttcggatagcgaatctaaacttcaagcgacagataagtcagagaatgagcagattgagatggtcgctgtcaagggttactctaagactgataccgattcctccatggagcgtgtgtccccatcgacctgctgctccgagaataatcaggaggactgtgacctggctaattccggacctctacagaacgagaagagctctccaggtgaaattgtggaggagcgggctacagtaaccaagaaagcgttcgggaaacagaagtcaaaatcaaccctggagaagttccctagacatgaactgtccaattttgtgggagattggcccgtcgataagactattggacagcggacgaagcgcaatcggaaaacagagaagacatcctctgtccaatccgataagaagtataattacccccagtcacacaagctggtaaatagcgtgtcggtgaacacagattgcgttcagcagcggggaagcccccatgagagcgtggaggacggcagaaaaagtcagtgcgacgacgcttccgagcccctgaattcctacaaatacgacgcctataaaaacatcgataagaatagctttaatataatgggggattggcctagttccgacagcctggcacagagggagcataggtcccgcatgcccaagacaggcctctcagaacccaacctggaaattggcaccaatgacaaaatgaatgagataagcctgtccacagcgcatgaggcctgctggggtacaagctcccaaaagctcaagacgttaggctcctcgaatctcggcagctccgagatgttgcttagcgagatgacctgtgaatcccagacttgcctgagcaaaaaatcgcatgggcagcacactagtttgcccctaacctttaccaattccgcccctacggtatccggcgtagtggagccacagacactcgcagagtgccaggagcaaatgcctaaacgtgatcctggaaaggaggtgggaatgtgcacccagacagaacctcaggacttcgccctcctttggaaaattgagaagaataagataagcatctccgatagcattaaggtgcttacagggaggctggatggctttaaaccaaaggtgttcaacattaataccaaaagcgatgtgcaagaagcaataccctacagagtgatgtatgataaaagcacgtttgtcgaggagtctgaacttaccagtgctgacgagagtgaaaatttgaatatcttgtgcaaactgtttggatctttcagtttagaggccctgaaggacctctacgagcggtgtaataaggacatcatttgggctacgtcgttgctgctggatagcgaaacaaaactgtgtgaggacacagagttcgaaaactttcagaagtcatgcgacggcagtcagatcggccctttctctctcgggttgaacctgaaagaaattattagtcagaggggtacgctggagaactccaactctccagtaccagaattctctcatggaatcggaatatccaacgcggactctcagtccacgtgtgacgcagagcgtggtaactcagagcaggccgagatgcgggcagttacacccgaaaaccatgaatccatgactagtatctttccaagcgccgctgtagggctgaaaaacaacaatgacatcctgcccaacagccaggaggagctgctgtactcctccaagcagtcatttccaggaatcttaaaagctacaacccctaaggacatgtctgagacagagaaaaatttagttgttaccgagaccggggataatatccactctccatctcactttagcgatatcttcaactttgtaagctcaacaagtaaccttgagctgaacgaagagatctactttaccgattctcttgagattaagaggaacgaaaattttccgaaggactacgttaagttcagtgatgaagaagagttcatgaacgaggatgaaaaagagatgaaagagatcctaatggccggaagcagcctgtctgctggtgtgagtggagaagacaaaacggagatcctgaatccaacccccgctatggccaaatcccttacgattgattgtctcgagttggccttaccacccgagctagcgtttcagctgaatgagctatttggcccagtgggcatcgattcaggtagccttaccgtcgaagattgcgtcgttcatattgacctcaatctggcaaaggttattcacgaaaagtggaaagaatctgtgatggaacggcagagacaggaggaggtatcatgtggaaagttcatgcaggaccctagtctagtgggacataccggactcgacaacccggaacagaagtcatcacagcgcaccggaaaaaagcttttgaaaactctaacagcctcggaaatgctgccgctgctcgatcactggaatacccagacgaaaaaggtgagtctgagggaaataatgtcagaggaaatcgcactgcaggaaaagcataatctcaagagggagacactaatgtttgaaaaagactgtgccaccaagctgaaggaaaagcagcttttcaaaatcttcccagcgatcaaccaaaactttctcgttgatattttcaaggaccacaattatagcctggagcacactgttcaattcctgaactgcgtgttggagggagatccagtgaagaccgtggttgctcaagagtttgtgcaccaaaatgaaaatgtcacatcgcacacggggcaaaagagtaaggaaaagaaaccaaaaaagttgaaagagactgaagaaaccccctcagagctgagttttcaggatttcgaatatcctgattacgacgattatcgagcagaggcctttcttcaccaacagaagaggatggaatgctactccaaggccaaagaggcttatcgcatcggtaagaaaaacgtggccacgttctatgctcagcaggggacactgcatgagcagaaaatgaaggaagccaaccacctggcagcaattgaaatcttcgagaaggtcaacgctagccttctgcctcaaaatgtcctggaccttcacggtctgcacgtcgacgaggcgttggagcacctgatgcgcgtgctggaaaaaaaaacagaggagtttaagcagaatgggggaaaaccctacctgtcagtgatcaccggtaggggcaatcatagtcaggggggagtagctaggatcaagccagccgtaatcaagtatcttatttctcatagctttcggttctctgaaatcaaaccagggtgcctgaaggtcatgctgaagta

SEQ ID NO: 29240 - DNA, 477 bp, synthetic construct
  source 1..477: mol_type = other DNA; note = Synthetic coding sequence
atgggaagtgggtcctcccgcagcagccggaccctacgtcgacgcagatcccctgaatctctgcccgctgggcctggagcggcagccctggagggcggaacacggcgtcgggtccccgtcgccgctgcagaggtaccgggagccgctgctgaggaggctcccggaagagatcctagccccgtggcaccgcctgatggcagagacgagactctgcgactcctcgatgaactgctcgcggaatcggccgcttggggaccccctgagcccgcacccagacggccagccagattgagacccacagcagtagcgggatccgccgtctgcgctgagcaatctaccgagggtcaccctggctccggcaatgtaagcgaagctccaggatccgggcgaaagaagcccgagcggccagctgcaatcagttatgaccacagcgaggagggcctgatggcctctatcgagcgcgagtattgcagatag

SEQ ID NO: 29241 - DNA, 738 bp, synthetic construct
  source 1..738: mol_type = other DNA; note = Synthetic coding sequence
atggagaagacggagcttatccagaaggccaaactcgccgagcaggcagaaaggtacgatgatatggcaacatgtatgaaagcagttactgaacagggcgctgagctgagcaatgaagagaggaaccttctgagtgtcgcgtacaaaaatgtggtggggggacgtcggtccgcttggagggtcatttcatcaatcgaacaaaagaccgacacgtcagacaaaaaactccagctcatcaaagactatagggagaaagtcgagtctgaattgcgttccatttgcacaacagtgctggagctcctggacaagtacttgatcgctaacgccacgaatcctgaatccaaggtcttttacctcaagatgaaaggggattacttccggtacttggccgaagttgcatgtggcgacgatagaaagcaaacaatagacaatagtcagggggcttatcaggaagctttcgacataagcaaaaaagagatgcagcctacccaccccattcggctcggattggccctgaatttttctgtgttctactatgagatactcaataacccagaattagcttgcacgctggccaaaacggcctttgatgaagccatcgccgagctggacaccctaaatgaagatagctacaaagactctactcttattatgcaacttcttagggacaatttaacactctggacctctgatagcgcgggagaggagtgcgatgccgctgaaggggcagagaattag

SEQ ID NO: 29242 - DNA, 1014 bp, synthetic construct
  source 1..1014: mol_type = other DNA; note = Synthetic coding sequence
atggaacaaccttggcctcctccaggtccatggagccttccacgcgctgagggagaagctgaggaggagagtgatttcgacgtgtttccctcaagcccacgctgtcctcagctgcctgggggaggggcacagatgtattcgcatggcatcgaactcgcgtgccagaagcagaaggagtttgtgaagtccagcgtcgcctgtaaatggaacctggccgaggctcagcagaagcttgggtccctcgctctgcataatagtgagtccctggaccaggagcacgctaaagctcaaactgccgtctcggagctgaggcagcgcgaggaggaatggaggcagaaggaagaggccctcgtgcaacgcgagaagatgtgtttatggtcaacagatgctatctccaaggacgtctttaataagtccttcatcaatcaggacaagagaaaggacaccgaggatgaagacaagtctgaatcatttatgcaaaaatacgagcaaaaaatacggcacttcggcatgttgtcacgctgggacgacagtcagcggttcctgtccgaccatccttatctcgtgtgtgaagagacagccaagtaccttattctgtggtgttttcatctggaggcggaaaaaaaaggcgcattgatggagcagatagcccatcaggctgtcgttatgcaattcatcatggagatggcaaagaattgtaacgtggatcctcgcggttgtttcaggctcttcttccagaaagcaaaggccgaagaggagggctattttgaggcttttaaaaacgaactggaagctttcaagagtagggtaaggctgtactcccaatctcaatcttttcagcccatgaccgtccagaaccacgtgccacactctggtgtgggctctattggcttgctagagagcctgccgcagaatcccgactatctacagtactctattagcactgcgctttgttcacttaattccgtggtgcacaaggaagacgacgaacccaaaatgatggataccgtctag

SEQ ID NO: 29243 - DNA, 927 bp, synthetic construct
  source 1..927: mol_type = other DNA; note = Synthetic coding sequence
atggaacagccatggcctcccccagggccttggtcgctcccaagggctgaaggcgaagcagaggaggagtccgatttcgacgtattcccttcatcccccaggtgtccccaactgccaggcggtggagctcaaatgtactcacatggaatagaacttgcttgccagaagcagaaggagttcgttaagagctccgtggcctgcaagtggaatctggctgaggcccagcaaaaactcggttctctggccctgcataattcggaaagcttggatcaggaacatgcaaaagcacagaccgctgtatctgagctgcgtcagcgggaagaagagtggcgccagaaggaggaagcccttgtgcagagggaaaagatgtgcctgtggagtacggatgccatttccaaggatgtgttcaacaaatcatttataaatcaggataaacgcaaggacaccgaggacgaggacaagtctgaaagcttcatgcagaagtacgagcagaaaatccgtcattttggaatgctgtcccggtgggacgacagccaacgctttctgtccgatcacccatatctggtatgcgaagaaactgccaaatacctcattctgtggtgcttccacctagaggccgaaaaaaagggtgccttgatggagcaaatagctcatcaggccgttgtgatgcagttcatcatggagatggctaaaaattgcaatgtcgatcctaggggctgcttcagactgttctttcagaaggccaaggcagaggaggaaggttactttgaagcattcaagaacgagctcgaagcttttaaatctcgtgtgcggctgtattcgcagagccaaagcttccagcccatgaccgtgcagaaccatgtcccacactctggagtcggcagcatcgggcttcttgagagtctgccgcaagctccccgattttag

SEQ ID NO: 29244 - DNA, 4227 bp, synthetic construct
  source 1..4227: mol_type = other DNA; note = Synthetic coding sequence
atgtggtctctgacggctagcgagggtgagagcactacagctcatttttttcttggcgcaggcgacgagggcctggggacacgcggtatcggaatgagacccgaagagtccgacagcgagttgctggaggacgaggaggacgaagtgccaccggagccccagattatcgtcgggatatgtgcaatgactaaaaaatcaaagagcaagcccatgacccagatacttgagagactctgcaggttcgactatctgacagttgtgatactgggggaggatgtaatcctcaacgagcctgtggagaattggccgtcgtgccattgcctgatttcattccactcaaagggctttccccttgataaggccgtggcatactccaagttgcggaacccttttctgattaatgatctggcgatgcagtattatatacaagaccggcgagaagtgtatcgcatcctccaggaagaggggatagacttgccaagatatgccgttctcaatcgggatccggctcggccagaggaatgcaacttgattgagggagaggaccaggtagaggtgaacggtgctgtcttccctaaaccatttgtcgaaaagcccgtgtcggcagaggaccataatgtctacatttattatccatcctccgccggtggagggtcacaaaggcttttccggaagatcgggagccggagttcggtttattccccagagagttctgttcgcaagaccgggtcctatatttacgaggaatttatgcccactgatggaaccgatgtcaaggtgtatactgtggggcctgactatgcccatgctgaggccagaaagagtccagccctcgatggcaaggtcgaacgcgatagcgagggaaaagagatcagatacccagtgatgctaaccgctatggagaaactcgtggcgcgtaaggtttgtgtcgccttcaaacaaacggtgtgtggatttgacctcctgcgggctaacggacatagtttcgtctgcgacgtcaatggtttttcatttgtgaaaaactcaatgaagtactatgatgactgcgcaaaaatcctgggaaatacgataatgcgcgagttggcccctcaattccagattccatggagtattcccactgaggccgaagacatcccaatagtccctactaccagtggaacaatgatggagcttagatgcgtgatagcaattattcgtcatggagataggacccccaaacagaagatgaaaatggaggtgaaacaccctagattcttcgcactcttcgaaaaacacggcggatacaagaccggcaagcttaagctaaaacgcccagagcagctccaggaggtcctggatattactcggcttttgttggccgagctggagaaagaacccggaggagaaattgaagagaaaacaggaaaactggagcagttaaagagtgtgttggagatgtatggacacttttcaggaatcaaccgcaaggtccaactcacgtactatccccatggggtgaaggcctcgaacgagggccaggatcctcaacgggagaccctcgccccttccctgctgctggtcctgaaatggggcggagagttaacacccgctggtagggtacaagccgaggagctgggcagggcatttcggtgcatgtatcctggcggtcaaggcgactacgcaggctttcccggatgtgggctacttcgacttcattctacctttagacacgatttgaaaatttatgcaagcgacgaaggccgagtacagatgacggcagcagcatttgccaagggtctcctggcattagaaggcgaactgaccccaattctggtccagatggtcaagtcagccaacatgaacggccttttagattcagacggagatagcctgtcttcttgccagcatagggtgaaggctcggctacaccacatactgcaacaggatgccccattcggacccgaggattacgaccagcttgcccctactcgcagcacctccctcttaaactcgatgacaatcatccagaacccggttaaagtatgcgatcaggtcttcgcattgatagaaaatttaacacaccagattagggagaggatgcaagatcctcgatcagtggatctccaactgtaccactcagagacacttgaactcatgttgcaaaggtggagcaagctggagcgcgactttagacagaagtccggcaggtatgacatatctaagatccccgatatctatgactgcgtaaaatacgacgtgcagcataatgggtcgcttggcctccaaggaactgccgagttgttgagactgtctaaggctttggcagacgttgttataccccaggagtatggaatctctcgggaagaaaaattggaaatcgctgtcggcttttgtctcccgttgcttcgcaaaattcttttggacttacagaggacacacgaggacgaatcagtaaataaactccacccgctctacagtcgcggtgtcctgtcccccggacgccatgttaggacaaggttgtatttcacttctgaatcgcatgtacacagcctgctctccgtatttaggtatggcggtctgctcgacgagacgcaggatgcccagtggcagagagccctagactacttatccgccatatccgagctcaactacatgacacaaattgtgataatgctgtacgaagacaatacgcaggaccccctgtctgaggaacggtttcacgtagaactccatttttccccaggagttaagggtgtggaagaagagggatctgctccagcaggctgcggcttccgtcctgcatcttcagaaaatgaggaaatgaaaacgaaccagggaagtatggaaaatctttgccccggaaaggcttccgacgaacccgatcgtgcgcttcagacctcccctcagcccccagagggaccgggactccctaggcgttctcccttgatccggaataggaaagctggtagtatggaggtcctttctgagacgagctcctcccgtcccggagggtacaggctttttagttcatcgaggccacccaccgaaatgaagcagtcaggtcttggcagtcagtgcacggggttgttctccacgacagttttgggcggatcctcttccgcaccaaacctgcaagattacgcaaggagtcacgggaagaagttgccaccagcatcactcaagcaccgggatggttttgagggctgttccatggtacccacaatttaccctctggaaacgttacataatgctttatcccttcggcaggttagtgagtttctgagccgtgtctgccagcggcacaccgacgcgcaagcccaggcctcggcggcactgtttgatagcatgcactcctctcaggcctcggacaatcccttcagcccaccacgaacactgcattccccaccactccagcttcagcaaagatctgaaaagccaccgtggtactcctctggtcccagctcaacagtcagcagcgccggaccttcctcacccactacagtagatgggaacagtcagttcgggttctcagatcagccgtccctaaactcccacgtggccgaggaacatcagggattgggccttctgcaggagacccccggtagcggtgcccaggaactgtcaatagagggagaacaggagctgtttgagcctaaccagtctccccaggtgccccctatggaaacctcccagccatatgaagaagtgagccaaccttgccaggaggtgcccgacatctcccagccatgccaagatattagtgaagccttgagtcaaccttgccagaaggtcccagatatctctcagcagtgtcaggagaaccacgacaatgggaaccacacttgccaggaagttccccacatttctcagccatgtcagaaaagcagccagctgtgtcagaaagtgagtgaggaggtctgtcagctgtgcctcgaaaatagcgaggaagtgtcacagccctgtcaaggagtgagtgtagaggtcgggaagctcgtgcacaaattccacgtgggggttggcagtctagtacaggaaaccctggtggaagtgggatccccagccgaggagatccctgaggaggtaatccaaccatatcaggaattctcagtggaggttgggagattggcccaggagacgagtgcaatcaacctactgagtcaagggataccagagatcgataaaccttctcaggaattccctgaggagattgatctccaggcacaggaagtgcccgaggagattaattag

SEQ ID NO: 29245 - DNA, 528 bp, synthetic construct
  source 1..528: mol_type = other DNA; note = Synthetic coding sequence
atgattctgaatgtcctagagtacggaagtcagcaagtggcagacttgacgctgaatctggatgactacatagacgccgagcacttgggcgacttccatcggacctataaaaacagcgaagagctcaggtccaggatcgtctcagggattattacgcctattcacgaacagtgggaaaaagctaatgtgtcatccccccaccgagagtttccgccagccacggctcgggaagttgatcctctgcggataccccctcatcatccacacacaagtagacaaccaccctggtgcgatccactaggtcctttcgtggttggaggcgaggatctcgatccttttggacccagacgcggagggatgattgtcgatccactcagatccggctttcccagagcgctcattgacccatctagcgggttaccaaatcgactacctccaggggctgtgcctccaggagctaggttcgatccatttggcccaatcggcacatcaccgccaggtccccgacccgaccggagggggcagtag

SEQ ID NO: 29246 - DNA, 552 bp, synthetic construct
  source 1..552: mol_type = other DNA; note = Synthetic coding sequence
atggctggactcgaagtccttttcgcaagtgccgcacccgcaataacatgtcgccaagatgcactcgtttgcttcctacactgggaagttgttacgcacggctacttcggactgggcgttggcgaccagccaggccctaacgataagaagtcagagctgttaccagccggatggaataataataaggatttgtacgtcttgaggtacgagtataaggatggttccagaaaactgctggttaaggctataactgtagagagttctatgatcctcaatgtgctggagtatggatctcaacaggtggctgatctgacgctgaatttagatgattatatcgacgcggaacacctgggggattttcatcgcacatataaaaactctgaggagctgcgcagcagaattgtaagcgggataataacacctattcacgaacagtgggagaaggccaatgttagcagcccacatagggagtttccaccggctacggcccgtgaggtggatcctctccgcattcctcctcatcacccccacacctcccgccagcccccatag

SEQ ID NO: 29247 - DNA, 888 bp, synthetic construct
  source 1..888: mol_type = other DNA; note = Synthetic coding sequence
atgccggtgcacacgctctcacccggtgctccctctgccccagcactaccctgcagattaaggacccgggtcccgggttacttgcttcggggaccagccgatggcggtgcgagaaagcctagcgcagtagagcgtttggaggctgataaggcgaagtacgttaaaagtttacatgtggctaacacacggcaggagcccgtgcagccgcttcttagtaagcagccgttgttctccccggagacccggaggaccgtattgacacctagtcgccgagcgctccccggaccctgccgcagaccccagcttgacctggatatcctgtccagcctcatcgatctctgtgatagcccagtgtccccagccgaagcatcgagaaccccaggcagggccgagggcgctggcaggccgccaccagccaccccaccaagacctccacctagcacatctgctgtacgcagggtggatgttagaccccttcctgcgagccccgctaggccctgcccgtcaccaggcccagccgctgccagctcccctgccaggccccctggcctgcagcggtccaaatccgatctgtccgaacgattttcccgcgctgctgccgatctggagcggttttttaacttctgcggtctggacccagaggaagctagggggcttggagtagcccacctcgcgcgtgccagctcagatattgtgtctctggccggaccctccgcgggacccggaagctccgaaggtgggtgttccagacgatcgtccgtgaccgtggaagagcgcgctcgggagcgggtcccatacggcgtgagtgtggtagagagaaatgccagggtgataaaatggctgtacggactaagacaggctcgcgagtcgcctgctgccgagggctag

SEQ ID NO: 29248 - DNA, 888 bp, synthetic construct
  source 1..888: mol_type = other DNA; note = Synthetic coding sequence
atgcccgtgcacaccttgagcccaggtgctccatccgctcccgctcttccttgcaggctcaggaccagagtgccaggatatctgctaagagggcctgcggacggaggggcaagaaagccaagtgcggtggagagattagaggcagacaaagccaaatatgtaaagagtctacacgtggccaatacaaggcaggaacctgttcagcccttactgtctaaacagcccttattctctcccgagacacggagaacagtgctgacacccagcaggagagcactgccgggaccctgccgacgtccgcagcttgatttggacatcctcagttctcttatcgacctgtgtgactctcccgtctctccagcagaagccagcagaacgccaggcagagccgaaggcgctggtcggccaccacctgcaacgccccctcggccaccacccagtacatcggctgtgcggagggtcgatgtgaggcccctgccagcttcaccagcccgtccatgtccctcccctggccctgccgcagcttccagccccgcacggcctccagggcttcaacgatcaaaaagtgacctctcagagaggttttccagagcggctgccgacctcgaaaggtttttcaacttctgtggcctggatccagaagaggcacgcggactcggcgtagcacacctcgcgcgagcctcctcggacattgtgtctcttgcagggccatctgctggtccaggttccagcgagggtggatgtagtcggagaagctctgtaaccgtggaagaaagggccagagaacgggttccatatggagtgtcagtcgtggagcgtaacgcgcgtgtcattaagtggttgtatggactgcgacaggcaagggagtcccccgctgctgaggggtag

SEQ ID NO: 29249 - DNA, 414 bp, synthetic construct
  source 1..414: mol_type = other DNA; note = Synthetic coding sequence
atgggtctgcgcgctgggggtacactcggcagagccggagccggacgaggtgcacctgagggcccaggacctagcggaggtgctcagggtggcagcatccattcaggcagaatagcagcagtccataatgttccgctctcagtcttgattcggcctctaccgagtgtgctggacccggctaaagtgcagagtctggtggacacaattagagaagaccccgactctgtgccaccgattgacgtgctgtggatcaagggggcacagggaggagactatttctacagttttggagggtgccacagatacgcagcctaccagcagttacaaagagagaccatcccagccaagctggtgcagtctactctctctgacttgcgagtgtacctaggagcctctacccctgacctccagtag

SEQ ID NO: 29250 - DNA, 1731 bp, synthetic construct
  source 1..1731: mol_type = other DNA; note = Synthetic coding sequence
atgaaatgccactatgaagcattaggggttcggagagatgctagtgaagaggagttgaaaaaagcctataggaaattggcgttaaagtggcaccccgacaagaatctggacaatgctgccgaagcagcagagcagtttaaattaatacaggctgcctacgacgtgttgagtgacccccaggagagagcttggtacgacaaccacagggaagctctgcttaagggtgggttcgacggcgaataccaggatgatagcctcgacctactgcggtactttacagtgacatgttactctggatatggagacgatgaaaagggattctatacagtgtacaggaatgtttttgaaatgatcgcaaaggaagagcttgagtccgtactggaggaagaagtagatgactttccaacattcggcgactctcagtccgattatgataccgtcgttcaccctttttacgcatactggcagtctttttgtacacaaaaaaactttgcgtggaaagaagaatacgacactagacaagccagcaacagatgggaaaagcgtgccatggagaaggaaaataaaaaaatccgcgacaaggcgcgaaaagagaagaacgagctagtgaggcagcttgtagcctttatccgcaagcgtgataaaagagttcaagctcacagaaaactcgtggaagaacagaatgcagaaaaagccagaaaggcagaggagatgagacggcaacaaaaattaaagcaggcgaagctcgtggagcagtaccgcgagcagtcttggatgacaatggctaacttggagaaggaattgcaggagatggaagcacgatatgagaaggagttcggtgatggatccgatgaaaacgaaatggaagagcatgagctcaaggatgaggaggatgggaaggacagtgacgaagccgaagacgccgaattatacgacgatctttactgcccggcatgcgacaagtctttcaaaactgagaaggctatgaagaatcacgagaaatcaaaaaagcacagagaaatggtggccctgctcaaacagcagttggaggaggaagaagagaactttagccgccctcaaatcgacgagaatccactggacgacaactccgaggaggagatggaagatgctccaaaacagaagctgtcgaagaagcaaaagaagaagaaacagaaaccagcacaggacgtgcccggaaaagattcatatttgcctgcagcccacttccagatggcatggggcaaaaaatgcgtgttgggggaacgtagagacggtgaaagcgagcacaagtgcgctaagatgctactagaaaataggcagaactatgacgataattttaacgtgaacggtcctggggaaggcgtgaaggtggacccagaggacaccaatctaaaccaggacagcgccaaggaattggaagacagtccccaggaaaacgtctctgtcactgaaatcattaaaccatgtgacgatccaaaatccgaagcgaagtccgtgccaaaaccaaaagggaaaaagactaaggacatgaagaaaccggtccgggtgccagctgagccccaaaccatgagcgtcctaatctcttgcacgacgtgtcatagtgaatttccttcccgtaataagctgttcgaccatctgaaggctacaggccacgctagagctccaagtagcagctccctgaactcagcaacatcgagccaaagtaaaaaggagaaaaggaagaaccgatag

SEQ ID NO: 29251 - DNA, 798 bp, synthetic construct
  source 1..798: mol_type = other DNA; note = Synthetic coding sequence
atgctcgctctgaccgtgttggagacatgcgtgaagaattgcggacataggttccatgtactcgtggcctctcaagacttcgtagaatcagtgcttgtgaggactattctccctaagaataaccccccaaccatagtgcatgacaaagtcttgaacctgatacagagctgggctgatgcattccgcagttccccagacctcaccggcgtggtgaccatctacgaggatttgaggagaaagggcctggagttccctatgacggatttagatatgctgtctcctattcatacccctcagcggactgtgttcaactcagaaacacaaagtgggcaggattcagtggggactgattcaagtcagcaggaagactcaggtcagcatgccgcaccgctgccagcccctccaattttgtccggcgatacccccattgcccctaccccagagcagatcggaaagttaagaagtgaacttgagatggttagtggaaacgtgagagtgatgtcggagatgctcacggagcttgttccaacccaagctgagcctgcagacttggagcttctgcaagaactcaatcggacctgccgggctatgcagcagagggtgctggagctgatacctcagatagcgaacgagcagcttactgaggagcttttgatcgtcaacgataatctgaataatgtattcctccgccatgagcgcgacagaggactgacagttctgccgcgacttgtgtccaatagttggccccaggcggtactacccccttggccccctaaagccctggtcctccaggcctag

SEQ ID NO: 29252 - DNA, 6272 bp, synthetic construct
  source 1..6272: mol_type = other DNA; note = Synthetic coding sequence
atggatgaagtagagcaggatcagcatgaagcacgcttgaaagaattgttcgatagcttcgatacaacagggacagggagtctcggtcaggaggagttgaccgacctgtgccatatgctatccctggaggaagtggctcctgtactgcagcagaccttactgcaggacaatcttcttgggagagttcattttgatcagttcaaagaagcactgattttaattctgtccaggactttgtctaacgaggaacactttcaggaacctgactgcagtttagaggcgcagcctaagtacgtgcgtggtggcaagagatatggacgacggagcttgcctgaatttcaggaatccgtggaggaattccccgaggtaacagtgatagagccgcttgacgaagaggctaggccaagccatatacccgcaggcgactgttctgagcattggaagacccagcgtagcgaagagtacgaagccgaagggcaattacgtttttggaatcccgatgacctcaatgcttcacagtcaggcagtagcccacctcaagactggatcgaggagaagctacaggaggtgtgtgaagacctaggtattactagggacggccacctgaatagaaaaaagttggtgtctatctgtgaacagtatgggttgcagaatgttgatggcgagatgctagaagaagtgttccacaatctggatccggatggcacaatgtctgtggaagactttttctatggactcttcaaaaatggaaagagcttaactcctagcgccagcacgccctatcggcagctgaagagacacctctccatgcagagctttgatgagagtggaaggagaactacgacatcaagcgccatgaccagtacgataggcttccgcgttttctcgtgccttgatgacggaatgggccatgctagcgtcgagagaatcctggacacttggcaggaagaaggtattgagaactcccaggagattctaaaggctctagactttagtctcgatgggaatattaatcttacagaactgacactggccctcgagaatgaactgctcgtgacaaaaaattctatccatcaagccgcactggctagcttcaaagctgagatccgacacctcctggagagagtggatcaggtggtgcgagagaaggaaaaacttcgttctgacttggataaagctgaaaaattgaaatcgctgatggcctcagaggtcgacgaccaccacgccgcaatagagcgtcgcaacgaatacaacttgcgcaaactggacgaagagtataaggaaagaatcgcagcactgaaaaatgaattgaggaaggaacgggaacagatcctgcagcaagcaggcaaacagcggctggaactggagcaggagatcgaaaaggccaaaacagaggaaaattatattagggaccggctggctttgtcattgaaagaaaattccagacttgaaaacgaacttttggagaacgccgagaaactcgccgagtatgagaatcttacaaataaattgcaacgaaacctcgaaaacgttttggcagagaaatttggcgaccttgacccctcatccgcagaatttttcttgcaggaggagcggttgacccagatgcgtaacgaatacgaaaggcagtgcagagtcctgcaggatcaagttgatgagttgcagtcggagctcgaggagtaccgagcccagggccgagtgcttcgcctcccattgaaaaacagcccttcggaagaagttgaagcaaattcaggagggatcgaacctgaacatggactcggcagcgaagaatgcaatccattaaatatgagcattgaggcagaacttgtaatcgagcagatgaaagagcagcaccatcgcgacatttgctgtctccggctggagctggaagacaaggttcgtcactacgagaagcagctcgacgaaactgtggtcagctgcaaaaaggcacaggagaatatgaagcaaaggcacgaaaacgagacacacactctggagaaacagatctctgacctaaaaaacgaaattgccgagctgcaaggccaggctgctgtgttgaaggaggcacaccatgaggcaacttgtcgacatgaagaggaaaaaaagcaactccaggttaaactcgaagaggagaagacacaccttcaggaaaaactgaggctccagcatgagatggagctaaaagccaggctgacacaggcgcaagcttcgtttgagcgggagcgagagggtctccagagttcagcgtggacagaggaaaaagtccgaggactgacacaggaactggaacagtttcatcaggagcagctcacatctttggtagaaaaacacaccctggagaaggaggagttacgcaaggaacttctggaaaaacaccaacgagagttacaggaaggacgcgagaaaatggagacagagtgcaataggcgcacgtcccagatcgaggcccaattccagagtgactgtcagaaagttacagagaggtgtgagagtgcgctgcagagcttagaaggccgttaccggcaggagttgaaggatctgcaagaacagcagagagaggaaaagagtcaatgggagttcgagaaagatgaactgactcaggagtgtgccgaggcacaggagctcctgaaggaaactctgaagcgggagaagacaacctcgctcgtgctcacgcaagaacgcgagatgcttgagaaaacctacaaagagcatctgaattccatggtggtcgagcgacaacaacttctgcaagatctggaggaccttcgcaacgtgagcgagacccaacaaagcctgctgagtgatcaaatcctggagctgaagtcctctcacaagcgcgagcttagggagcgggaggaagtcctctgccaggccggagcctcagaacaactggcctcccaaagattggagcgcctggagatggagcacgatcaggaacggcaagaaatgatgagcaagttactcgcaatggaaaatatacacaaggctacttgcgagacagccgatcgagaaagagccgagatgtctacagagatctcacgccttcagagcaaaattaaggaaatgcagcaggcgactagcccattgtccatgctgcagagcggctgtcaggttattggggaagaagaggtcgagggtgatggcgcactatcattgctgcagcagggagagcagcttctggaggaaaatggcgacgtcctgttgtccctgcagcgtgcccacgagcaggcagtaaaggagaatgtcaaaatggctactgagatcagcaggctgcaacaacggctccagaaactcgaacccggattggtgatgagcagctgtttggatgagcccgcaactgaattctttgggaacacggcagaacagaccgaacagtttctccagcaaaatcgcaccaagcaggtggaaggggttactcgcagacacgttctgtctgacctcgaggacgacgaggtcagagaccttggctcaaccggcacatcctctgtgcaacggcaggaagtgaagatagaagaaagcgaggcctcagtcgaaggcttcagcgaacttgaaaacagtgaagagactagaactgagtcctgggagcttaaaaatcagatctcacagttgcaggaacaacttatgatgctgtgcgctgactgcgaccgcgcatcagaaaaaaaacaggacctgttgttcgatgtgtcagtgttgaagaagaaacttaagatgctcgagcgtatccccgaagcatcaccgaaatacaaattgctatacgaggatgtgtccagggagaacgattgtctgcaggaagaactgcggatgatggaaacgagatatgatgaagccttagagaacaacaaggaactcactgcagaggttttcagactgcaggacgagcttaaaaaaatggaagaagtgacagaaaccttcctaagtctcgagaagagctacgatgaggtcaaaatcgaaaatgagggcctgaatgtcctggtacttcgtctgcaaggaaagatcgaaaagctacaggagagtgtcgtgcaaaggtgcgactgctgtctgtgggaggcttctctcgagaatctcgaaatagaaccggatggtaatatcttacagctcaatcagacattggaggaatgcgtgccgagagtgcgctccgtgcaccacgtcatcgaagagtgtaaacaggagaaccagtatttagaagggaatactcagctattggaaaaagttaaggctcatgaaatagcttggcttcacggcaccattcaaactcaccaggaaagaccgagggtccagaatcaagtcatattagaagagaacaccactttgctgggtttccaagacaagcactttcagcaccaggctaccattgcggagctggagctggaaaagactaagctccaggagcttactaggaaactgaaggagagagtcaccattttagtcaaacagaaagatgtgctgagccatggcgaaaaagaggaagaattaaaggccatgatgcatgatctgcagataacatgctcagagatgcaacagaaggtagagttgctccgttacgagagtgaaaagctccagcaggagaattccatactgcgaaatgagattactactctcaacgaggaagattcaatcagtaatctgaaactggggactctgaatggaagccaggaggagatgtggcaaaaaaccgaaactgtgaagcaggaaaatgccgctgtgcagaaaatggtcgaaaatttgaaaaagcaaatcagcgagctgaaaatcaaaaatcagcagctcgacctagagaataccgaacttagccaaaaaaattcccagaaccaggagaagctccaagaattgaaccagaggttgacagagatgctctgtcaaaaggagaaggagcccggaaactccgctttggaagagcgagagcaagaaaaatttaaccttaaggaggagctggagcgttgcaaagtacagtcaagtacgttggtttcatctctcgaagctgaactgagtgaggtgaagattcaaactcacatcgtgcagcaagagaaccacttgttgaaggatgaactggaaaaaatgaagcagctgcatcgctgcccagaccttagtgactttcagcagaaaatctcctcggtcctgagctataatgaaaaactcctgaaagagaaagaggcactcagcgaggagcttaacagctgcgtcgacaagctggcaaaatcttcgttactggagcatcgcatcgccacaatgaaacaggagcagaagtcatgggagcatcagtcagcttccctaaaatcccagctggtcgctagccaagagaaggtccaaaatctcgaggacactgttcagaacgtgaacttgcagatgagccggatgaaaagcgacctgagagtgacacagcaggaaaaggaagctctgaagcaagaggtgatgtctctgcataagcagctccagaatgccggtggaaaaagctgggcacctgaaattgcaactcatccctcagggctccacaaccagcaaaagcgcctctcctgggacaaacttgaccaccttatgaacgaggaacagcaacttctgtggcaagaaaatgagagactccaaacaatggtgcaaaacaccaaagcagagctgacacatagtcgggaaaaggttcgccagctggaatctaacctgctcccgaagcaccaaaaacatctaaacccctccggtaccatgaatcctaccgaacaggaaaaactgagcctgaaacgcgagtgtgaccagttccagaaggagcaatctccggctaatagaaaggtgtcccagatgaattccctggaacaggaattggagacaatccatctcgagaacgaggggctaaagaaaaagcaggtgaagctcgacgagcagctgatggagatgcagcacctgaggtccaccgccacgcccagtccgtcaccacatgcttgggacctacaattactgcagcagcaggcgtgccctatggtacctcgggaacagtttttgcagcttcagcggcagcttcttcaggctgagcggatcaaccagcacctccaagaggaactggagaacaggacctcagagacaaatacccctcagggaaatcaagagcagctggtcacggttatggaagagcgtatgattgaagttgaacagaagctcaaactggtcaaacgactgcttcaagagaaggtcaatcaattaaaggagcaggtttctctcccgggtcacctttgttctcccacttctcacagctccttcaactctagtttcaccagcttgtattgccacta

SEQ ID NO: 29253 - DNA, 4134 bp, synthetic construct
  source 1..4134: mol_type = other DNA; note = Synthetic coding sequence
atggatgaggtggagcaagaccagcacgaagccaggctgaaagagctgttcgactcatttgatacaacaggcaccgggagcctcggccaggaagagttaacagatctgtgtcatatgttatctcttgaggaggtggccccagtgctacaacagaccctcctccaggacaatctgctggggagggtgcacttcgaccagttcaaggaggctttgatcctcattcttagccgtacactttccaacgaggaacatttccaggagccagattgttctctagaagcccagcccaagtacgtgagaggcggaaagaggtatggacgtcgcagcctgccggagttccaggagtcagtggaagagttcccagaagtgaccgtcatagagccacttgacgaggaagctaggccatcccacattcccgctggagattgctctgaacattggaaaacacagaggtctgaggagtatgaagctgagggacagttgcgtttctggaacccagacgacctgaacgcctcacagtctgggagctcaccacctcaggactggatagaggaaaaactccaagaagtctgtgaagaccttggaataactcgagatggccaccttaaccggaagaaactggtgtccatatgcgaacagtacggacttcagaatgtcgacggtgagatgttggaggaagttttccacaacctggatccagacggtaccatgtcagtcgaagactttttctacgggctcttcaaaaacgggaaatccctgaccccaagtgcgagcaccccctaccggcaacttaaacggcatctgagcatgcagagctttgatgaatccggccgaagaactactactagttcagcaatgacctcgacaattggtttcagagtgttttcatgcctcgacgacggtatgggccatgcttcggttgagcggatccttgacacatggcaggaagagggaattgagaatagccaggagatactgaaagctctggacttttccttggatggcaatattaatctgacagagctcactctcgctctggagaatgagctgctggtgacaaagaattccattcaccaggccgcacttgcaagttttaaagctgagataagacatctcctggagagagtggatcaagtggtgcgcgagaaggaaaagctcagaagcgatttggataaggcggaaaagcttaagtcactgatggcatccgaagttgacgatcaccacgcggctattgagcgcagaaacgaatacaatctaaggaaactggatgaggagtataaagaacgaatagcagcattgaaaaacgaactgcgaaaggaacgagagcaaattctgcagcaggctggcaagcagcgcttggaactcgaacaggagatcgagaaagccaaaactgaggagaattatatccgggaccgcctagcgctttctctcaaggaaaacagccgcctggaaaacgaattactggaaaatgctgaaaagcttgccgagtacgagaatttgacaaataaactccagcgtaatctggaaaatgtcctggctgaaaagtttggggacctggacccgtcttccgctgaatttttcctgcaggaggaacggttaacccagatgagaaatgagtatgagaggcagtgccgggttttgcaggatcaggtggatgagcttcagtccgagctcgaggaatatagagctcaggggcgagtgttaaggctcccgctgaaaaactctccaagtgaagaggttgaagcgaatagcggcggaatcgaaccagaacacggtcttggctctgaggaatgtaatcccctgaacatgagtatcgaagctgaattagtcatagagcaaatgaaggaacagcatcacagagacatctgttgtcttcgactcgagcttgaagacaaagtcagacactacgagaagcagcttgacgagacggtcgtgagctgtaagaaagctcaggaaaatatgaagcaacgccatgaaaacgagacacataccctcgagaagcagatctctgatctcaagaatgagatcgccgagctgcagggccaggctgctgtcctgaaagaagcccatcatgaggcgacatgtaggcatgaggaggaaaaaaaacaactgcaggtcaagctagaagaggaaaagacccacctacaagaaaagctgcgccttcaacatgagatggaactaaaagcacgcctcactcaggcccaggcaagctttgaacgggaacgcgagggcctccagagcagtgcctggacagaggagaaggtacgcggactgacccaagagctggaacagtttcaccaggagcaattgacgtccctggttgagaagcacacgttggagaaagaggagttgcgcaaagagctcctggagaaacaccagcgcgagctgcaggaaggcagatatgaaagcgagaagcttcagcaggagaacagtatcttgcggaacgagatcacgacccttaacgaggaggactctattagcaacctgaagttgggcaccctcaacggaagccaggaagaaatgtggcagaaaactgaaacagttaagcaggaaaacgccgctgtgcagaagatggtcgagaacctcaaaaagcaaatctcggaattaaaaatcaagaatcagcaactcgacctcgaaaatacagagctgagtcagaagaacagtcaaaaccaggaaaagttgcaagagctgaatcaacgactcactgagatgctgtgccaaaaagagaaagagcctggcaatagtgccctcgaggagagagaacaagaaaagtttaacctaaaggaagaactggagcgctgcaaggtccagtccagcacattggtgagctccctagaggcggaactcagcgaggtcaagattcagactcacattgtccagcaggaaaatcatctgttgaaggacgagctggaaaaaatgaaacaactccaccgatgtcctgatctctcagatttccagcagaaaatcagctctgtgctgtcatacaacgagaagctgctcaaagagaaggaggcattgagtgaagaactgaactcatgcgttgacaaattggccaaaagctctctgctcgaacaccggatcgccacaatgaagcaagaacagaagtcttgggaacatcagtcagcttcgttgaagtctcagctggtggccagtcaagagaaagtgcagaaccttgaggacactgtgcaaaatgtgaatctacagatgtctaggatgaaatctgatctaagagtgacccaacaggaaaaggaggcacttaaacaggaagtgatgagtctgcacaaacagctgcagaacgccggtggtaaaagctgggctcccgagattgcgacacatcctagcggacttcataatcagcagaagagactgagctgggacaaactcgaccatctaatgaacgaggagcagcaactcctgtggcaggaaaatgagagactccaaacaatggtgcagaacaccaaagcagaactcacccattcccgggagaaagttcgccagctggaaagcaacttactgcctaaacatcagaaacacctcaacccttctggtacaatgaacccgaccgaacaagagaagttgagcctcaaaagggaatgtgaccagttccagaaagagcagagccctgcaaaccggaaagtatcccagatgaattctctagaacaggaattagaaactattcatctggagaacgagggcctgaaaaagaaacaggtgaagctggacgaacaactgatggagatgcaacacctgagatctaccgccaccccatcaccatctcctcacgcgtgggacctccaactgcttcagcagcaggcttgtcccatggtccctagggaacagttcctgcagctgcaaaggcagctcctgcaggccgagcggatcaatcaacatcttcaagaagagcttgagaacaggacctcagaaaccaacacccctcagggcaatcaggaacaactcgtgacggttatggaggagaggatgatagaggtggaacaaaaacttaaactcgtcaaaagactgttgcaggagaaagtgaatcaactgaaggaacaggtttctctgcccggacacctgtgttcaccgacaagccactcctcgttcaattcctcttttacaagtttatattgtcattag

SEQ ID NO: 29254 - DNA, 3171 bp, synthetic construct
  source 1..3171: mol_type = other DNA; note = Synthetic coding sequence
atggcaactgggaactacttcggcttcactcattcaggagctgcggcagccgctgccgctgctcaatattctcagcagccagcttccggggtggcctattcccacccaactaccgtggccagctacacagtgcatcaggccccagtggccgctcatacagtcaccgcagcctatgcacctgcagccgcaacagtcgcagtggctcgccctgcccctgtcgcggttgccgcagcagccactgccgcagcctacggcggataccctactgctcacacagccacagactacgggtacacgcaacgacaacaagaggcaccacccccacctccacctgccactacccaaaattatcaagacagctattcttatgtccgaagcacagcaccggctgtggcctatgacagcaagcagtactatcagcaaccgacagcaaccgccgctgccgtcgcagcggctgcccagccccagcctagcgtggcagagacctactatcagacagctcctaaagcgggatactcccagggcgctacacaatacactcaggcccagcagaccagacaggtcaccgctatcaagcccgctaccccaagcccagccacaacgacatttagtatttatcccgtaagctctactgtccagccagtggccgctgcagccacagtagtgccatcatacacccagtcagccacctattccactacggcagtgacttatagtgggacgtcctattcaggctacgaggcagccgtatactctgctgcttcctcatactatcaacagcagcaacagcaacagaaacaggctgcggctgccgctgccgctgccgctgccacagccgcttggactggaaccacctttaccaaaaaagctccatttcagaacaaacagctaaagcccaagcagcccccaaagcccccacagatccattattgcgacgtgtgtaagatttcatgcgcagggccacagacctacaaagagcacctcgaaggccagaagcataaaaaaaaggaggccgctctaaaagcctcccagaatactagttcttcaaattcaagcacacgaggaactcaaaatcagttacgatgcgagttatgcgacgtttcctgcacaggtgccgatgcgtatgctgcacacattcggggagcaaagcaccagaaggtggtgaagctgcacaccaaacttgggaaaccaattccaagtacagagcctaatgtcgtgagccaagccacctcttcaacagctgtgagtgcgtccaagcctactgcgagtccatcatctatcgctgccaacaattgtaccgtgaatacttcttccgtggctactagcagcatgaaaggtctgaccactacaggtaatagtagtctgaactctacatccaataccaaggtttcggccgtgcccactaatatggctgcaaagaaaacaagcacaccaaagatcaacttcgtgggcggaaacaagcttcagtccacagggaataaggccgaagatattaaagggactgagtgcgtgaagtccactcccgtgacatctgccgtgcagatccctgaagtcaagcaagacaccgtctcagaacccgtgactcctgcttccttggcagctctgcagagcgatgttcagccagtcgggcatgattacgtggaagaggttagaaatgatgaggggaaggttatacgatttcattgcaagttgtgcgagtgctccttcaacgatccgaatgctaaggagatgcacctcaagggccgtagacatcggctacagtataagaagaaggtgaaccccgatctccaggtggaagtgaagccctctatcagggcccgaaaaattcaggaagaaaaaatgagaaaacaaatgcagaaggaagaatattggagaagacgggaggaggaagagcgctggcgtatggagatgaggagatacgaggaggacatgtactggaggagaatggaggaggagcagcatcactgggacgatagaaggcgcatgcctgacggaggatacccccacggcccacctggacctcttggactcctaggagtgaggcccggaatgccaccccagccacaaggccctgcaccactacggcgtcctgactctagcgatgacagatacgtaatgactaagcacgctacgatttaccctacagaggaagagctgcaggcggtccagaaaatcgtctcaattacggaacgggctctcaagcttgtctcagacagcctctccgagcacgaaaagaacaaaaataaagagggggacgataagaaggagggagggaaggatcgcgcactcaagggtgttctccgcgtgggcgtgttggcaaagggcttgctgttgcggggagacaggaatgtgaacctcgtgctgctctgttccgagaaaccctctaaaaccctgctgtcaagaatcgctgagaatctgcctaaacagttagctgttatctcccccgagaagtatgatatcaaatgcgccgtgtccgaggcggctattatcctgaacagctgcgtggagccaaagatgcaggtcaccataacgctgaccagccccataatcagggaggaaaatatgagagagggggacgtcaccagcggcatggtaaaggacccccctgacgtacttgaccggcagaagtgcctggacgccctggccgctctgcgccatgccaagtggtttcagcaggcccgagctaacggactccaatcatgtgtgataatcattagaatcctgcgggatctttgccagagagtgccgacctggagtgacttcccgtcgtgggcaatggagctcctggtggagaaggcgatttcttcggccagctccccacagagccctggggacgccctgaggagagtttttgagtgtatctcttctggaattatactcaaggggtcccctggcctgcttgatccatgcgaaaaagatccattcgatacgctggcgactatgactgaccagcagagggaggacatcactagctccgcacaatttgcactcaggcttttagctttccggcagatacacaaggtcctgggcatggatccactgccgcagatgtcccagcgcttcaacattcacaataataggaaaaggagacgcgactccgatgggatggacttaaaactgagaggcaagaagaccaagaagattatgatcacgttcaaaaagtgtctctag

SEQ ID NO: 29255 - DNA, 390 bp, synthetic construct
  source 1..390: mol_type = other DNA; note = Synthetic coding sequence
atggggtgttgtggctgcagcggtggctgtggctccggctgtgggggttgcggcagcggatgtgggggttgcggctccagctgctgcgtgcccatttgctgctgcaagcccgtatgctgctgcgtgccagcctgtagctgcacatcatgtgggtcttgtggaggctccaaaggatgttgtgggagctgcggaggaagcaagggcggttgtggctcatgcggtggctcgaaaggagggtgtggctcttgtggttgcagccaatgctcatgttgcaagccatgttactgctcaagcggctgcggcagctcttgttgtcagtcttcttgttgtaagccttgctgttctcaggccagctgctgcgtgccaatttgctgtcaatgcaaaatatag

SEQ ID NO: 29256 - DNA, 1344 bp, synthetic construct
  source 1..1344: mol_type = other DNA; note = Synthetic coding sequence
atgcccatgcctaccgaaggaaccccaccacctttatctgggactcctatccccgtgccggcatattttagacacgcagagcccggtttctctctaaaacgacctcgcggtttgtctaggtcactccctcctccaccacctgccaagggctctatcccaattagcaggctgttccctcccaggacaccagggtggcaccaactgcagccccgtagagttagtttccgtggtgaggccagtgaaacgcttcagtcacctggttatgacccgagccggccagagagcttttttcagcagtcatttcaaaggctcagtcgcctgggccacggtagctacggagaggttttcaaagtccggagtaaagaggacggcaggctgtatgctgtgaaaagatccatgagtcctttccgcggtcctaaagatagggcccgtaagctggctgaggtcggtagtcatgaaaaagtcggccaacatccttgctgtgtgcgcctggagcaggcctgggaagagggaggaatcctgtatctgcagacggaactgtgtggcccaagcctgcagcagcactgtgaagcttggggagccagcctccccgaggctcaggtatggggatatctgcgggatacgctcctcgccctggcccaccttcactcacagggcctcgtgcacctcgatgtgaagccagccaatatctttcttggaccacgcggacggtgcaagttaggggacttcggtctcctcgtggagctcggaacggctggcgctggggaggttcaagagggggatcccagatatatggcgcctgagctgctccaggggtcgtatggcactgccgctgatgtcttctcacttggccttacaatcctggaggtggcctgtaatatggagctccctcatggaggcgaggggtggcagcagttacggcagggctacctgccacccgagtttacggcgggattgtcgagcgaactgaggagcgtgctggtgatgatgctggagcctgatcctaaactgcgggctacagccgaagcactgctagcgttacccgtgctgcgccagcccagagcttggggggtcttatggtgtatggcagccgaggccctctcacgcggttgggccctgtggcaagccctcctggccttgctgtgttggttatggcatgggctggcgcaccctgcaagctggctgcagcctctggggccacctgctactccacctggaagcccgccttgttcgctgctgttggatagttctctgagttccaattgggatgatgattcactcggtccttgtgtattaaagcgtacagagggggctcttgaatgctcccagatggaaggcttgtag

SEQ ID NO: 29257 - DNA, 1005 bp, synthetic construct
  source 1..1005: mol_type = other DNA; note = Synthetic coding sequence
atgagcgcagcgaatccagagacaccaaacagcacaatctccagggaagcttccacacagagctcatccgccgctgcttcacaaggctgggtgctgcctgaaggtaaaatcgtgcccaacacggtttttgtgggcggaatcgatgccagaatggacgagacagaaatcggttcctgtttcgggcgatacggatctgttaaagaagttaagatcatcacgaatcggacaggggtaagcaagggctatggctttgtctcctttgtgaacgacgtggacgtccagaagattgttggcagccagattcactttcacgggaaaaagttaaaattgggacctgccatccgcaagcagaagttgtgtgctaggcatgtgcagcccagacctctggttgtcaacccaccccctccaccccagttccagaacgtttggcgcaatcccaacacagaaacctacctgcagccccagataacccccaacccagttacccaacacgtacaggcctattcggcctatccacattctcccggacaggtgattacagggtgccagctgctggtgtataattaccaggagtacccaacataccccgattcagctttccaagtcaccacgggctaccagctacctgtgtacaactaccaacccttcccagcttatccgcgaagcccatttcaggtgacagcaggttaccagttgccagtttataactatcaagcattccccgcttatcccaactcgccctttcaggtggcgactggctatcagttccctgtgtataactatcagcctttccctgcatacccgtctagcccttttcaggtgaccgctgggtatcaacttcccgtatacaattatcaagcattccccgcataccctaattccccattccaggtcgcaacgggctaccagttccccgtctataactaccaggcattcccggcttatcctaactccccagtgcaggtcacaaccgggtaccagctgccagtgtacaattaccaatag

SEQ ID NO: 29258 - DNA, 1173 bp, synthetic construct
  source 1..1173: mol_type = other DNA; note = Synthetic coding sequence
atgagcgccgcaaaccccgagaccccaaactccaccatatcgagagaggcaagcacacagtcttccagcgccgctgcatcacagggctgggttctgcccgagggcaagatcgttcccaatactgtgtttgtcgggggtatagacgcacgaatggacgaaacagaaatagggagctgcttcgggaggtatggtagtgttaaggaagtcaagatcataacaaataggaccggtgtgtccaaagggtatggcttcgtgtcttttgtaaacgacgtcgacgtgcagaagatcgtaggttcccaaattcacttccatggcaagaaattgaaactgggccctgctattcgcaagcagaaactctgtgcgagacacgtccaaccaaggcccttggtggtgaaccctccacctccccctcagttccaaaatgtgtggaggaatcctaatactgaaacatacctgcagccccagatcacccccaacccagtcacacagcacgttcaggcctacagcgcctacccccatagcccaggccaagtgattaccggttgccagttattagtatacaattaccaggagtacccaacctacccggattctgccttccaggttactacgggataccagttgcctgtctacaactaccagcctttccctgcctatcccaggtccccatttcaggtgacagccggataccagttaccagtctacaactaccaggccttcccggcatatcccaattcaccattccaggtagcaacggggtatcagttccctgtctacaactaccagcccttcccagcctatccaagttcaccatttcaggtcactgctgggtaccaactgcccgtatataactatcaggcatttcctgcctatccaaactcgccagtacaggttactacaggctatcagttgcccgtatacaattaccaggctttccccgcatacccaagctcacccttccaggtgacaaccgggtaccagctcccagtgtacaactaccaggctttcccagcctaccccaactccgctgtgcaggttaccactgggtaccagtttcatgtgtacaattatcagatgccgccacagtgccccgtgggagagcagcgcagaaatctctggaccgaagcctataagtggtggtacttggtttgtctaatccagaggcgtgactag

SEQ ID NO: 29259 - DNA, 1173 bp, synthetic construct
  source 1..1173: mol_type = other DNA; note = Synthetic coding sequence
atgtcagcagctaatcccgagacacctaacagcaccatctccagagaagcttccacacaaagctccagcgctgcagcctctcaggggtgggtgctccccgaaggcaaaattgtcccaaatacagtctttgtcggtggaattgacgcaaggatggacgagacggagattggctcatgtttcggcagatatggatctgtaaaggaagtcaagatcattactaataggaccggagtatctaaaggatatggattcgttagcttcgtcaacgacgtggatgtgcagaaaattgtgggcagtcagattcatttccacggcaagaagctcaaattgggcccagccattcgaaagcagaaactgtgcgctagacatgtgcagccgagacctcttgtggtcaatccccctcccccaccgcagttccagaacgtgtggcgaaatccgaacaccgagacttacctacagcctcagataacccctaaccctgtgacccagcatgtacaagcctacagtgcctatcctcacagccccggacaggtgataacaggatgccagcttcttgtgtataactatcaggaatatccgacctatcccgactccgcttttcaggtgacgaccggctaccaattgcccgtgtataattaccagccctttcctgcctatccacggagcccgttccaagttacggccggttatcagctccctgtttataattaccaggccttcccagcctatccgaatagcccctttcaggtggctacaggctaccagtttcccgtttataactaccagccttttccagcctatccttcatctcccttccaggtgaccgctgggtaccaactgcctgtgtacaactaccaagcttttccagcttacccaaactccccggtccaggtcacaaccggttaccagttgcctgtgtataactaccaggcttttccggcttacccttcatccccatttcaggttacaacgggctatcagcttcccgtgtataattatcaggcatttcctgcgtacccgaattccgccgtccaagtgacaacgggctatcagttccacgtttacaattatcagatgccccctcagtgccccgtaggggaacagcgacggaacctttggacagaggcctataagtggtggtatctggtgtgtctgatccagcgcagggactag

SEQ ID NO: 29260 - DNA, 1101 bp, synthetic construct
  source 1..1101: mol_type = other DNA; note = Synthetic coding sequence
atgtctgcagctaatcctgagacaccaaatagcactatcagtagggaggcctccactcagtcctcctctgccgctgcaagtcagggttgggtgctgcctgagggaaagatagtccctaatactgtgtttgtgggtgggatcgatgcaagaatggacgaaaccgaaattgggagttgcttcggacgctacggatccgtaaaggaagttaaaatcattaccaaccgcaccggtgtgtctaagggatacgggtttgtttcgtttgtgaatgacgtggatgttcagaagatcgtaggcagccagattcactttcacgggaagaagctcaaactgggccctgcaattcgcaagcaaaaactttgcgctcggcacgtccagcccaggccactcgtcgtcaatcctcctccgcctcctcagttccaaaatgtctggcggaacccgaacactgagacgtatcttcagccacagataactcccaatccagttacacaacatgtccaagcgtactcagcataccctcacagtcccggacaggtcatcactggatgccagctgctggtgtataattaccaggagtaccccacttatcccgactcagcattccaggtgacaacaggttatcagctacccgtctacaattatcagccgttcccggcttaccccagatcgccattccaggtcaccgctgggtaccagctccctgtgtataactatcaggcattcccggcatatcccaatagccctttccaggttgccaccgggtaccaatttcctgtgtataattatcagcccttcccagcctatcccagcagtccattccaggtcactgccggataccagctgccagtgtacaactaccaggcgttcccagcatatcccaatagccccgtccaggtgactactgggtatcagctgccggtctataattaccaagcattccccgcataccctaactcagccgtgcaggtcaccaccggatatcagtttcacgtgtataattatcagatgccccctcagtgccctgttggagagcagcggaggaatctgtggaccgaagcctataaatggtggtaccttgtgtgcctgatacagagacgcgattag

SEQ ID NO: 29261 - DNA, 1149 bp, synthetic construct
  source 1..1149: mol_type = other DNA; note = Synthetic coding sequence
atgagcgcggctaaccccgagacccctaactctaccatatctcgagaggctagcacccaaagctcatcagccgctgcctcccagggttgggtcttgcccgagggtaagatagtgcccaacaccgtgttcgttggtgggattgatgcgagaatggacgagaccgagatcggcagctgttttgggagatatgggtctgtgaaagaggtcaagatcatcacaaatcgcaccggcgtctcaaagggctatgggtttgtgtcctttgttaatgatgtggacgttcaaaaaatcgtcgggtcacagatacacttccacggcaagaaattaaagcttggacctgctattcggaagcaaaagctctgtgccagacatgtgcagccccgacccctcgtggtgaacccaccgccacctcctcagttccagaatgtgtggcggaatcctaacaccgaaacgtaccttcagcctcaaatcactcccaaccccgtaacacagcatgtgcaggcctactcagcctacccccactcaccagggcaagttattacaggctgccagttgctggtgtacaattaccaggaatatccaacctaccctgactcggcattccaagttactacagggtaccagctgccagtgtacaactaccagccattccccgcttaccccagatccccattccaggtcactgcagggtatcagctcccagtctacaattaccaagcctttccagcttaccctaattccccctttcaggtggctactgggtaccagtttcctgtctataactaccagcccttcccggcatatccttcttcgccttttcaggtcacagccggatatcaactgcccgtgtacaattatcaggccttccccgcttatcctaacagtccattccaggtggccaccggctatcagttcccggtctacaattaccaagcctttcccgcatacccgaacagtcctgtgcaggtcacaactggctaccagctgcccgtctacaactaccaggctttcccggcttatcctaatagcccattccaggtggccaccggctatcagttcccagtgtacaactatcaggcatttcctgcgtacccgaactcccctgtgcaggtaaccacaggatatcagttgcccgtctataactaccagtag

SEQ ID NO: 29262 - DNA, 1842 bp, synthetic construct
  source 1..1842: mol_type = other DNA; note = Synthetic coding sequence
atgtctgccgcaaaccctgagaccccaaactccacgatcagtcgggaagccagcacccagagctcctctgcagcagcgagccagggctgggttctgccggaagggaagattgttcccaacacagtgtttgtgggaggtattgatgccaggatggatgaaacagagatcggcagctgttttgggagatacggctccgtgaaagaagttaaaattatcaccaatcgtactggagtgtccaaaggatacgggtttgtctctttcgtaaacgatgttgatgtgcagaagatagtgggcagccagattcatttccatggaaaaaagttaaaactgggtcctgctatccgtaagcagaagctctgcgccagacatgtccagcctcgccctctagtggtcaatcctccgccaccaccacaatttcagaatgtgtggagaaacccaaatactgagacttacctccaaccacagatcactcctaacccggtgactcaacacgttcagtctgcagctaatccagaaacaccgaactctactattagccgggaggctagcacccagagctctagcgcagccgcaagtcaagggtgggtgctgccagagggcaagatcgtgccgaacacggtgtttgtgggcggaatagacgccagaatggatgaaacagagattggatcttgctttgggcgttacggttcagtcaaggaagtgaagattattaccaacagaacaggagtgtctaaaggatatggctttgtgtcctttgtgaatgacgtggacgtacaaaagattgtgggctcccagattcacttccacggcaaaaaactgaaattaggacccgcaattaggaaacagaagctgtgcgcgcgacatgtacagccccgacccttggtcgtgaaccctcctcccccaccacagttccagaacgtgtggcgcaaccctaatacggaaacatatctgcagccccagatcaccccgaacccagtaacacagcatgtgcagtccgccgctaacccagagactccaaactcgaccatctccagagaggctagtactcaatcctcctcagcagccgcttcacagggttgggtcctcccagagggaaagatcgttcccaatacagtgtttgtgggtggaatcgacgctcggatggatgaaacagagattggtagctgcttcgggcgatacggctctgtcaaggaggttaagatcattacgaatcggactggcgtctctaaagggtacgggtttgtgtctttcgtgaatgacgttgacgtgcagaagatcgtcggcagtcagatacatttccacggcaagaagttgaaactcggacctgctatccggaagcagaagctgtgtgccaggcacgtccagccccgtcccttggtggtgaatcctcctcctcccccacagtttcaaaacgtatggagaaaccctaacaccgagacatatcttcagccacagattacccctaatccagttactcagcacgttcaagcctattccgcctacccgcatagcccaggtcaggtcattactggatgccaattactggtctacaactaccaggaatatcccacctatcccgacagtgcattccaggtaactactggctatcagctgccagtatataactatcagccttttcccgcttacccaagaagccctttccaggtgaccgcaggctatcaactccctgtatacaactaccaagcgtttccagcctacccaaactctccgtttcaggtggccactggttaccagtttcccgtgtgtgaaatttgtaaaattctggttctgaagaatgccgctgccttcctctgtcatagcaaggtgaatcggtccatatag

SEQ ID NO: 29263 - DNA, 384 bp, synthetic construct
  source 1..384: mol_type = other DNA; note = Synthetic coding sequence
atgaggccactggatatagtcgagttggcggagcctgaggaagtggaggtgctagaaccagaggaggattttgagcagttcttgctacctgtcatcaacgaaatgcgcgaagatatagcttctcttactcgagagcacggcagggcctacctgcggaacagaagtaagctctgggaaatggacaacatgctaatccaaattaagactcaggtcgaggcctctgaggaatcggccctgaatcatttgcagaatccaggagatgcagcagaaggacgggcagccaagcgttgtgagaaggctgaagaaaaggccaaagaaatagctaaaatggcggagatgctggtagagttggtcagacggattgaaaagtccgagtcatcatag

SEQ ID NO: 29264 - DNA, 537 bp, synthetic construct
  source 1..537: mol_type = other DNA; note = Synthetic coding sequence
atgatgagagcaatgaagcccccaggcggtgagtctagcaatctcttcggctcaccagaagaggctactccttccagtcggcctaaccgaatggctagtaacattttcgggccaaccgaggagccacagaacattcctaaaagaacgaacccgcctggagggaagggctcaggcatctttgatgagtccaccccagtccaaactcgtcagcacctgaatccccctgggggaaagacttctgacatttttggctccccagtgacagctacttcccgtttagctcatcccaacaagccgaaggatcacgtgttcctctgtgagggcgaggagccaaagagcgatctcaaagcagcgagatccatccctgcgggagccgagcccggagagaaaggcagtgcccgtaaagctgggccagctaaggaacaagagccaatgcccacagtcgacagccatgaacctaggctggggcctcggcctcgatcacacaataaggtcctcaacccgcctggcggtaaatcctctatttccttttattag

SEQ ID NO: 29265 - DNA, 657 bp, synthetic construct
  source 1..657: mol_type = other DNA; note = Synthetic coding sequence
atgtttcaggtaccagacagcgagggtgggcgagccggatccagaaaatggcagttattgacgggatctttagcctcgacaagtccatctttattaagcggacaaggaccgtgggctccactccaacgggctatgaagccacccggaggagagagctccaatctgtttggatccccggaggaagcaaccccttccagcaggcctaaccggatggcttcaaacattttcggtccaacagaggagccccagaatatccccaagcggaccaaccccccagggggaaagggtagcggaatctttgacgaatccacacctgttcaaactaggcaacaccttaaccctcctggtgggaaaacaagcgatattttcggcagtccggttacagccactagccgtttagcccacccaaataaacccaaagaccatgtttttctttgcgaaggtgaggagcctaaatctgatttgaaggccgctaggagtattcctgccggtgctgaacccggagaaaaaggctcagcccgaaaggcaggaccggctaaagagcaagaaccgatgcctactgttgattctcacgaacccaggttaggacctcgaccacgatctcacaacaaggttctaaatccccctggaggaaaatcatccatctccttttactag

SEQ ID NO: 29266 - DNA, 4866 bp, synthetic construct
  source 1..4866: mol_type = other DNA; note = Synthetic coding sequence
atggccggaggtagaggggctcccggtagaggaagggatgaaccaccggaatcatacccacagaggcaggaccacgagctgcaggcactcgaggcgatctacggtgcggactttcaagatctgcgccctgatgcctgtggaccggtaaaggagccacccgagatcaacctggtcctgtatcctcaaggcctgactggagaagaagtgtacgtcaaggttgatctgagagtcaaatgccctcctacatacccggatgtggtgcctgaaattgagctgaagaacgccaaaggtttgagcaacgagtccgtgaatctgctgaagtccaggctggaggaactggccaaaaagcattgcggtgaagtcatgatcttcgaattggcttatcacgtccagtcatttctgtccgagcacaacaagccacctcctaaatcatttcacgaagagatgctcgagcggagagcccaagaagaacagcagagactgctggaagccaaacgcaaagaagagcaggaacagagagagattcttcacgagattcagagacggaaggaggagattaaagaggagaaaaagcgcaaggagatggctaaacaggaaagacttgagatcgcttctctctcgaaccaggatcacacctccaaaaaagatccagggggacaccgaactgctgccatcctgcatggaggatcaccggacttcgtgggaaacggtaagcatcgtgcaaacagttccgggagatccaggcgggaaaggcagtattccgtgtgtaattcggaagacagtccaggcagttgcgagatactgtactttaacatggggagccctgatcagctgatggtacataagggcaaatgcataggttcagacgagcaactggggaaattagtctataacgccctggaaacagccactggaggtttcgtattattgtacgaatgggtactgcaatggcagaagaagatgggccctttcctgaccagccaggaaaaagagaagattgacaaatgcaaaaaacagattcaaggaaccgaaaccgagtttaacagcctagtgaagctgtcccatcccaatgtggtacgttatctcgccatgaatttgaaggagcaagacgacagcattgtggttgacatactagtcgagcatatttccggagtgtcactggctgctcatttgtctcatagcggcccaattcccgtccatcagctgcggaggtataccgcccagttgctgagcggactggactacctgcactctaattcggtcgtgcataaggtgctgtccgcctccaatgtcctggttgacgccgagggaaccgtgaaaatcacggactacagcatctctaagcgcctggctgatatctgcaaagaagacgtgttcgagcagacccgtgttagattctcagacaatgccttgccctacaagaccggaaaaaagggagatgtgtggaggctcgggcttcttttgctgagcctgtcccagggccaagaatgtggcgagtacccggtgacaattccaagcgacctgcctgccgacttccaggattttttaaaaaaatgcgtctgcttggatgacaaggagagatggtctcctcagcaattgctgaaacactcatttatcaatccccagcctaagatgccactcgtagagcagtcgcctgaggatagcgagggacaagactacgtagaaacagtgataccgtcaaatcggcttccttccgccgctttctttagtgagacacagcggcagttcagcagatatttcatcgaatttgaagaactgcaattattgggtaagggcgcatttggcgctgtcatcaaggtgcagaacaagctggacgggtgctgttacgctgtaaagcgaatcccaatcaatccagccagccggcagttccgtaggattaaaggcgaggttaccttgctgagtcgcctgcaccatgaaaacattgtcaggtactataacgcctggatcgagaggcatgagcgcccagctgggccaggcacacctccgcctgattccggtccactagccaaggatgatagagcggcacggggacagccagcttccgacacagacggattggacagcgtggaggctgcagcccctcctcctatcctgtccagttccgtggaatggagtacctcaggcgagcggtctgcatccgctagattcccggctaccggccctggcagctccgatgatgaggatgatgacgaggacgagcacggcggagtgttctctcagtcatttcttcccgcatccgactccgagtccgacattatctttgacaatgaggatgagaactccaagtcgcaaaaccagatggaatactgcgagaaatccacccttcgagacactattgaccagggactgtaccgcgatacagttcgactgtggcgattgttcagagagattttggatgggctggcctatatccatgaaaagggtatgatccaccgcgaccttaagccggtaaacatattcctagatagcgacgatcacgtgaagatcggcgatttcggcctggccacggaccatttagccttcagtgctgattccaaacaggatgaccaaaccggtgatctgatcaaatcagacccttcaggtcacctgacaggcatggtcgggacggcgctttatgtgagtccagaggtgcaggggagcacaaagagtgcatacaatcaaaaggtggacctcttctctctcggcattattttctttgaaatgagttatcatcccatggtgaccgccagtgagaggatttttgtcctgaatcagttgcgggaccccacctctcctaagtttcctgaggattttgatgacggagaacacgcgaagcaaaagtcggtcatctcctggcttctcaatcacgaccctgctaaaagacccaccgcaaccgagctcttgaaaagtgagttgctgcctccacctcagatggaagagagtgaactgcacgaggtcctccaccacacattgactaacgtggacggtaaggcgtaccgcacgatgatggcccagatctttagccaacgcatttcgccggctatcgattacacgtatgacagcgacatccttaaaggaaatttttctattcggaccgccaagatgcaacagcacgtctgcgaaaccatcatcagaatatttaaaaggcacggcgctgtgcaattgtgcacacctcttcttttacccaggaacaggcaaatttacgagcataatgaagcagccttgttcatggaccactcgggcatgctggtcatgctgcccttcgatctgagaattccctttgcgagatacgtcgctcgtaacaacatcctcaacttgaagagatattgtatagaaagagtcttcagacctcgcaaactcgatcggttccaccccaaagagcttctcgagtgtgcctttgacattgtgacctcaacaacaaatagcttcctgcccaccgcagagataatttacacaatttatgagattatccaggaatttccggcactgcaggaacggaattactctatctacctgaatcacactatgctgttgaaggctattctgcttcactgtgggattcccgaggataagctgagccaggtgtatatcatcctatatgacgccgtaaccgagaaattgacccggcgagaagtggaggccaagttttgtaacctcagcttaagcagcaacagcctctgcaggctctataagtttatagagcagaagggggacctccaagacctgatgccgaccatcaacagtttaatcaagcagaagactggcatcgctcaattggtgaagtacgggctgaaagatctagaagaagttgtcggcctactaaagaaactcggcatcaagctgcaagtactgattaacctcggcttagtatataaagtgcagcagcacaacggtatcatcttccagtttgtcgcgtttatcaagaggagacagcgcgctgttccggagatattagctgccggaggcaggtatgacttgctgattccccagttccggggaccccaggccctggggccagtccctactgccatcggcgtttccattgccatcgataagatttccgccgcagtacttaacatggaagaaagcgtgacgatctcgtcctgcgatttgctcgtggtgtctgttggacagatgtcaatgagtcgggcaataaatctgactcaaaagctctggacagccggaattacagccgagatcatgtacgattggtcacagagccaggaagaactgcaggagtattgtcgacatcacgagatcacatatgtagctctggtgtccgataaagagggaagccacgtcaaggtgaagagcttcgaaaaggaacgccagacagagaagcgggttcttgagacagagcttgtcgaccacgtattgcaaaaactgaggacgaaagttacagacgagaggaatggacgcgaggcatccgataaccttgcagtgcagaacctgaaggggagcttttctaacgcttcaggcctgttcgagattcatggtgccaccgtggtgcctatcgtgtcagtactggcccctgagaagttgagcgccagcactcggaggcggtacgaaacgcaggtgcagacccggctccagacctcacttgcgaacctacatcagaagagctcggaaatcgaaattctcgccgtggacctgcccaaggagaccatcctgcagtttctaagtttggaatgggacgctgatgaacaggccttcaacacaactgtgaaacagctcctttcccggctccccaagcaaaggtatctgaagctcgtatgtgacgaaatatataacatcaaagttgaaaagaaagtctccgtgttgttcttgtactcatacagggatgactactatcggatcctgttctag

SEQ ID NO: 29267 - DNA, 2388 bp, synthetic construct
  source 1..2388: mol_type = other DNA; note = Synthetic coding sequence
atgaagtttacaaataccaaggtgcaaatgatgcaaaacgtccatctcgccccagaaacagacgaagacgacttgtatagcggctacaatgattataatcccatctacgacattgaagaattggaaaatgatgccgcatttcagcaagctgtgcggactagtcacgggcgaagaccgcctattacagcgaagattagtagcaccgccgttacccggcctattgccacgggctacgggtctaagacatccctggcgtcctctattgggagacctatgaccggtgcgatccaggatggggtcaccaggcccatgactgccgtgcgggcagctggcttcaccaaggctgctctcagaggctcagccttcgaccccttgagtcagagcagaggtcctgcctccccactggaggcaaaaaagaaggattcacctgaagagaaaattaaacagctcgaaaaagaggtaaatgagctagttgaagaaagttgtatagctaattcatgtggtgatctcaagctggccttggaaaaagctaaagacgccggtcgcaaggagagagtgctagtgaggcaacgtgaacaagttactacacctgagaacattaaccttgatctcacctacagtgtgttgtttaatctggcttcgcagtatagtgtgaatgagatgtacgctgaggcattgaacacctatcaggttattgtcaagaacaagatgttctcaaacgcagggatcttgaagatgaatatgggaaatatttatctgaagcagcggaactactcgaaagctataaagttttatagaatggctctggatcaggtcccatcagtcaataaacagatgcgtatcaaaattatgcagaatatcggggtaactttcatccaggctgggcagtattcagacgcaattaactcctatgagcacatcatgagcatggccccaaacctgaaggctggatacaacctgaccatctgttattttgccattggagatcgggaaaagatgaagaaggccttccagaaactgattacagtgccattggaaattgatgaggacaaatacatcagcccttcagatgatcctcataccaaccttgtgactgaagccataaagaatgatcacctgcgacagatggaaagagaaagaaaggctatggccgaaaaatacatcatgacaagcgcgaagctgatcgcgcctgtcattgagacctcatttgcagctggatacgactggtgtgtggaggttgtcaaggcctcacagtacgtggaattggccaatgacctggagatcaataaagccgttacctatctcaggcagaaagattacaaccaggccgttgagattctcaaggtcctggagaaaaaagactcaagggtgaaatccgccgctgccaccaatcttagcgcactatactacatgggcaaggatttcgctcaggcctctagctatgcggacattgccgtcaattctgataggtacaatccggcagctttgaccaacaaagggaacacggtgttcgcaaacggagactatgagaaagcagcggaattttataaggaggctttgcgcaacgacagctcctgcaccgaggccctgtacaacatagggctgacctacgaaaagctaaaccgcttggacgaagccctggattgctttctgaagctgcacgccatccttcgcaattccgccgaagtcctgtatcagatcgcaaacatctatgagctgatggaaaatcctagtcaagcaattgagtggctcatgcaggtagtctcggtgatccctactgatcctcaggtcctcagtaaactgggcgagctatacgacagagagggcgacaaatcacaagcattccagtattactatgaatcatatcggtactttccatgtaacattgaagtcatagaatggctgggggcatactacatagatacgcaattttgggaaaaagctatccaatactttgaacgcgcttctctcatccaacccactcaggtcaagtggcagctgatggtggccagctgtttcagaaggtctggtaactatcaaaaggctctggatacatacaaggacacacacagaaagttcccggagaacgtcgagtgctcgggcagcgtaaggacgggtcacatggaaagggatcctctgaacctcctccctcgtaagtcagtcctccctggccctgaaatcgccaaatgcaactatttctccggcgagaagtattaccttagcgcctttttgagcagctccctccacaggagctggattaagaggtgtagccggatctgccagaagacggaggaagtggggaagaacgaaaggaacaaaggaaccgctcacaaagtgcgtcagcgatggcagtggggcctgccatggcagaagcgtaggaagtgttag

SEQ ID NO: 29268 - DNA, 192 bp, synthetic construct
  source 1..192: mol_type = other DNA; note = Synthetic coding sequence
atgtcctattacagatcctactatggtggtctgggctatggctacggagggttcggcggttggggatacggatacggatgtggctacggaagctttaggcgcctcgggtacggctgcggctacgggggatatggtttttcctgctgtaggcccctgtattatggcggatacggttttagcgccttttattag

SEQ ID NO: 29269 - DNA, 135 bp, synthetic construct
  source 1..135: mol_type = other DNA; note = Synthetic coding sequence
atgagctattacgggaattattacgggggtctcggttacgggtacgattgcaagtactcttatacgtccggtttcggcgctttcaggatcctggattgtggttacagatgcgggtgcgggggtgtatggatatag

SEQ ID NO: 29270 - DNA, 135 bp, synthetic construct
  source 1..135: mol_type = other DNA; note = Synthetic coding sequence
atgtcatactactcccatctgagcggtggcctgggatgcgggttagcagtggcggttacaatgggcaggaccgtcgctgttgcagaatatggccgttgccgccatggctgtcacagtagttatagcgcgagatag

SEQ ID NO: 29271 - DNA, 138 bp, synthetic construct
  source 1..138: mol_type = other DNA; note = Synthetic coding sequence
atgtgttattatcacaattactatgggtcgttagactacgggtgttcctatggctctgagtacggaaactctggttacgcatgtaactttccgtgttcctatgggagattcctgctcgcacccagaaagaaattctag

SEQ ID NO: 29272 - DNA, 624 bp, synthetic construct
  source 1..624: mol_type = other DNA; note = Synthetic coding sequence
atgccccatagccactgtcacagcctacgaagctttcataacgcaccaccattaagcgctatcactcatgggacaaaccctattacgttcgaggatagactgtgcctcccctcctccttccatagcaggacgtgttttctcgataatttccaggagacatgtaacgagaccaccagctgtcagatgacgaactgcgaacaggacctgtttactgacgattcttgtgtccagtcaaattgctttcctggtgtggtgcagactacttacagtaacagtagaccatgcgagaggaccgcttgtcagtcagaaagcagctcggctgggctcgcatgtgttagccaaccgtgccaaagcgagtcaacgcagcaaatgggtttcgtggcccagtcctgccagcctgcgagcctgaaggggaacagctgtcctcccaaaacctcaaagtcaaagaacttcgagactctggaacgagccagctcacaatgtcagtgtcagagtcagaaccccgagtcctcaagttgcagaccactagtaaatgtcgctccagaacctcaactgctggaaagctctcctggagttgagcccacctgctgtgttactggtgggtcccagctgcccagcaaatag

SEQ ID NO: 29273 - DNA, 645 bp, synthetic construct
  source 1..645: mol_type = other DNA; note = Synthetic coding sequence
atggctcatgtctcaagtgaaactcaagacgtctcccccaaggacgagttgaccgcgtcagaagcttctactaggtctcctctgtgtgagcatacctttcccggagatagcgatttacgatctatgatcgaagaacatgcctttcaagtgctgtctcaagggtccctgttagaaagtccgagttataccgtttgtgtgtctgaaccggataaggacgatgatttcctaagcttgaattttccacgtaagctatggaagattgtggaatcagatcagtttaagtcaataagctgggacgagaatggcacttgtattgtgattaacgaagagctcttcaagaaggaaatactcgaaacaaaagccccttaccgaatttttcagacagatgccataaagagctttgtgaggcagttgaatctttatggcttctccaaaattcagcaaaactttcaacggagcgcattcctggcgacgtttttgtctgaggaaaaagagtcctccgtgctgtcaaagctccacgtcttcgtttttcaccactctctgtttggcgctacgttcggcgaacaccacttccaaccttgccccctaccctctggtaataaagcccctatctccacatggtcaggcgacagctggctactctag

SEQ ID NO: 29274 - DNA, 645 bp, synthetic construct
  source 1..645: mol_type = other DNA; note = Synthetic coding sequence
atggcacatgtgagcagcgaaacccaggacgtatctccaaaagatgaactgacagctagcgaagcctccactcggtcacccttgtgcgaacacacatttcccggtgactccgacctgcgcagcatgattgaggaacacgcctttcaggtgctctctcagggttccttgctggagtcccccagctacacagtgtgcgtctcagagcccgacaaagatgacgactttctgtccctcaatttccccaggaagctctggaagattgtcgaatctgatcagttcaaatcaattagctgggacgagaacggaacgtgcattgtcattaatgaagagctattcaaaaaagaaattttggagacgaaggcaccgtaccgtatattccaaactgatgctattaaaagtttcgtgcgacagctgaacctttacgggttctctaagattcagcaaaacttccagcgatctgcatttctcgccaccttcctgtcggaagagaaggagtcttcagttctgtctaagttacacgtgttcgtgtttcaccactcactcttcggtgctacttttggtgaacaccacttccaaccctgccccctgccatccgggaacaaggctcccatatccacttggtctggcgatagttggctcctatag

SEQ ID NO: 29275 - DNA, 1437 bp, synthetic construct
  source 1..1437: mol_type = other DNA; note = Synthetic coding sequence
atggccgctgctctgaagtgcttactgacactagggaggtggtgtcctggcttgggtgttgcaccacaagctcgggcactcgcagctttggtgcccggtgtgactcaagtggataacaaatcaggattcttgcagaaaaggccacaccggcagcaccccggaattctcaagctcccccatgtccggctccctcaggcactcgccaacggagcgcaattattgctcctgggatctgcaggtccaacgatggaaaaccaggttcaaacgcttacatcctacctgtggagccggcatctgccagttgagcccgaagagctgcaacgaagagccagacacctggagaagaaatttctcgaaaaccccgacctgagtcagacagaagaaaaactgaggggggctgtgctccatgccctgcgcaagaccacttatcattggcaggagcttagttacacagaagggcttagcttagtgtatatggctgcccgacttgatggtgggtttgctgcggtgtctcgggcatttcacgaaattagagcacgcaacccagcattccagccgcaaactttaatggatttcggcagcggcactgggagcgtgacctgggctgcccattctatttggggtcagtccctgagagagtacatgtgtgtggatcgtagcgccgcaatgctcgtcttggccgagaagctgctgaaaggcggaagcgagtctggggaaccgtatatccctggcgttttcttccgtcagtttctccctgtctcccctaaggtacagtttgacgttgtggtcagcgctttttctttgagcgagctccccagtaaagccgataggactgaggtcgtgcagacattgtggaggaagacaggacacttcctggtgctcgtcgaaaacggtacgaaggccggtcacagcctcctgatggacgccagagacttagtactgaaagggaaagagaaatctcctcttgaccctaggcccggttttgtgttcgctccatgtccacacgagttgccttgcccacaactcacaaacttggcctgctctttcagccaggcctaccaccccatcccgttttcttggaacaagaagccgaaagaagaaaaattctccatggtcatcttagcccgtgggagtcccgaggaagcccatcgatggccaaggatcacccagcccgtcctgaagagaccccgtcacgtgcattgtcacctgtgttgccccgacggccatatgcaacatgccgtgctcacagccaggaggcatggacgatacggagggtgcgaccagaaccagtgggacgttgccggaagctgctctcctcgccagcatttattcccccaggggttcgtatctttgtgcccctgtcaactgctgggccgttctttcacttgcgcttattctgtttgcgtctcatctatctatggaagcggttccctgtag

SEQ ID NO: 29276 - DNA, 774 bp, synthetic construct
  source 1..774: mol_type = other DNA; note = Synthetic coding sequence
atggaggaagaggcctccagtcctggcctcgggtgcagtaagccacatctggagaagctgacactgggcatcacgcggatccttgaatcttccccaggcgtgaccgaggtcaccatcatcgagaagcctcccgcagaacggcacatgataagctcatgggagcaaaagaataattgtgtgatgccagaggacgtcaagaatttctatctgatgaccaacggcttccatatgacttggtcagtgaagctggacgcctcagacgatcagcctgaaaagcctcactttgatagcagaagtgtgatctttgaacttgacagttgtaacggttccggaaaggtttgtctagtttataagtcagggaaaccagcccttgcggaggacaccgagatctggtttttagatagggctctgtactggcacttcctcacggacacctttaccgcgtactaccgcctactgatcacccacctggggctgccccagtggcagtatgcatttacctcatatggcatttccccacaggctaagcagtggttctccatgtacaagcctatcacctacaacaccaacctgctcaccgaggagactgacagcttcgtgaacaagctggacccgtcaaaggtatttaagagtaaaaataaaattgtgattccgaagaaaaaaggacccgtgcagccagcaggcggtcagaagggaccctctggtcccagcggtccaagtacaagctccactagcaagtcctcctccggatccggcaacccaacgcggaaatag

SEQ ID NO: 29277 - DNA, 792 bp, synthetic construct
  source 1..792: mol_type = other DNA; note = Synthetic coding sequence
atgctgagctctaaaggcctgaccgtggtggacgtataccaaggctggtgcggtccttgtaagcccgtggtttccctttttcagaaaatgagaattgaagtgggtttagatctgctgcatttcgcacttgcagaggcagatcggctggatgtgctcgaaaagtatagaggtaaatgtgagccaaccttcttgttctacgctatcaaagacgaggcactgtctgacgaagatgagtgcgtctcgcacgggaagaacaatggcgaggatgaggatatggtcagttccgagcggacctgtaccctggcaatcattaagccagatgctgttgcccatgggaaaacagatgaaataatcatgaaaatccaggaggctggatttgagattctgacaaacgaggaaagaacaatgaccgaagccgaggtgcgtcttttctaccaacacaaggccggtgaagaagcctttgagaagcttgttcaccacatgtgtagcggaccatcgcaccttcttattctcacccgcaccgaagggttcgaggatgtcgtgaccacgtggcggacggtgatgggcccaagagatccaaacgtcgctcgaagggagcaacctgagtctctccgggctcagtatgggacagaaatgccttttaatgccgtgcacggttctagagatcgtgaggacgccgatagggaactcgccttgctatttccttcgctcaagtttagcgacaaggacaccgaagcccctcaaggcgagagtagcacacaaccacgactgaaaattaccgatttggattag

SEQ ID NO: 29278 - DNA, 390 bp, synthetic construct
  source 1..390: mol_type = other DNA; note = Synthetic coding sequence
atggcagagctgattcagaagaaactacaaggtgaagtggagaagtaccagcagcttcagaaagatctgtccaaatcaatgtcaggcagacaaaagttggaagcccagctgaccgagaataacattgtgaaggaggagctggcactgctcgacgggagcaatgtcgtgtttaagctcttgggccctgtgctggtgaaacaggaattaggagaggctcgggctaccgtgggcaaacggctagactacattaccgccgaaatcaagcgatatgagtcccaattgagggatttagagcgacagtctgaacagcaaagggaaaccctcgctcaacttcagcaagagtttcaaagagctcaagcagccaaggcaggcgcacctggcaaggcatag

SEQ ID NO: 29279 - DNA, 1626 bp, synthetic construct
  source 1..1626: mol_type = other DNA; note = Synthetic coding sequence
atggaagctctgctcgagggcattcaaaaccgcggacacgggggaggatttctgacaagctgtgaggcagagctccaggaattgatgaagcagattgacattatggttgctcataaaaagtccgagtgggaaggacgaacacacgccctggagacatgcttgaagataagggagcaagagttaaaatccctgagaagtcagctcgatgtaactcataaggaggtcgggatgttgcaccagcaagtggaagagcacgagaaaataaaacaggagatgaccatggagtataagcaggaactgaaaaagcttcacgaggaactatgtatcctgaaacgctcgtatgaaaagctgcagaagaagcaaatgcgggagtttaggggaaacacaaaaaatcaccgggaggaccgcagtgaaatcgaacgactgaccgctaagatcgaagagttcaggcagaagtctcttgactgggagaagcagagactgatttatcaacagcaggtgagctcgctggaggcccaaagaaaggctctggccgagcagtccgagatcatccaggctcagctggtgaaccggaaacagaaattagaatccgtcgagctgtcttctcagtctgaaatccagcacttgtcaagcaaactcgagagagctaatgacactatctgcgcgaatgagctagaaatcgagcgcctcacgatgcgggtgaacgacctggtgggcacgtcgatgacagtcctgcaggaacagcagcagaaggaggagaaacttagagagagtgaaaagcttctagaagctctgcaggaggaaaaaagagaactgaaggcggcattgcaatcccaggagaacctcatacatgaagctcgtatccagaaagagaaactccaggaaaaggtgaaagcgacgaatactcagcatgctgtggaggccatccgtccccgtgaggagagcctcgctgagaagaaatacacatcccaaggacagggggacttagatagcgtgttatcgcagctgaacttcactcacacatccgaggatctattgcaagcagaggtgacctgcctcgaaggaagcttggaatctgtctcagccacatgcaagcagctgtcccaggagctgatggaaaagtatgaagaattaaagcggatggaggcccacaataatgaatataaggccgagattaagaagttgaaggaacagatattgcaaggggaacagagttactcaagcgcacttgagggtatgaagatggagatctcccatttgactcaggagctccatcagcgcgacattactatcgcttccactaagggctcatcaagtgacatggaaaaacgcctgcgtgctgaaatgcagaaggctgaggataaagccgtagagcataaggaaatcctggaccagctcgagtctctaaagctagagaaccgtcatctgagtgaaatggtcatgaaactcgaactggggctccacgaatgctctttgcctgtttcccccttagggtctatcgctacaagattcctggaggaggaggagctgcggagtcaccacatcctcgagcgcctggatgctcacatcgaggagttaaaaagggagtccgagaaaacagttcgacagtttactgctctgaaatag

SEQ ID NO: 29280 - DNA, 483 bp, synthetic construct
  source 1..483: mol_type = other DNA; note = Synthetic coding sequence
atggaggcggaacggccacaggaggaggaggacggggagcaaggcccaccccaggacgaagaaggctggccgcctccaaactcgaccacacggccatggaggtcagctcctccaagccctccacctccgggtacaagacacaccgccttgggccctagatcagcctctctgctgtctctccagaccgagctcctcctggaccttgttgccgaggcccagagcaggcgcctagaagaacagcgagcgactttctacaccccccagaacccctcatctctggctcccgctcctctgcgcccactggaggatcgcgaacagctgtacagcaccattctctcccaccagtgccagcggatggaagctcagaggtccgagccccctctgccccctggcggtcaagaactgttggaactgctgctgagagtgcagggcggtggcaggatggaggagcagcggagtcgtcctccaacacatacctgttag

SEQ ID NO: 29281 - DNA, 483 bp, synthetic construct
  source 1..483: mol_type = other DNA; note = Synthetic coding sequence
atggaggccgagagaccacaggaggaagaagacggggaacagggcccaccccaggatgaggaaggctggccccctcccaatagcactacgcgcccatggagaagcgctcccccaagtccgcctccccctgggacccgccacacagcccttggaccacgaagcgcctcactgttgagccttcagaccgaattgttgctggacttggtcgccgaagctcagtcccggcgactggaggagcaaagggcgacgttttatacaccccagaacccttcaagcttagcaccagcacccctgagaccgctggaggatagggaacagctgtactcgactatcttgtcccatcagtgccagcggatggaggcccagagatctgagccccctctgcccccagggggacaggagctcttggaactcctcctgcgtgtgcagggcggtggcagaatggaagagcaaagaagtagaccacccacgcatacttgttag

SEQ ID NO: 29282 - DNA, 3192 bp, synthetic construct
  source 1..3192: mol_type = other DNA; note = Synthetic coding sequence
atgcctcatttacctctcgcttcattccggcctccattttggggactgcgacacagtcgtggtttacctcggttccattctgtaagcacacagagcgagcctcacggatctcctatttctcggcgaaacagggaagccaaacaaaagagactccgcgaaaagcaggctactctggaggccgagatagcgggagaaagtaaaagcccagcagagtctatcaaggcatggaggcccaaggaactggtcttgtatgagattccgaccaaacctggggagaagaaggatgtgagtgggccactacccccagcctacagcccccgatacgtggaggcagcttggtatccatggtgggtgcgagagggattttttaagccagaatatcaggcacgcttgccccaggctaccggcgaaacattttctatgtgtatccccccaccaaacgttacaggaagtcttcacataggccacgccctcaccgttgccatccaggacgctctcgttagatggcatagaatgcgtggtgaccaggtcctgtgggtgcccggatctgaccacgctggtatcgcaacccaagccgtggtcgagaaacagttatggaaggagagaggagtccgcagacatgaactgtccagagaggcttttctgagagaagtctggcaatggaaagaagcaaaaggcggtgagatttgcgaacagctgcgcgcactgggggcatctctcgattgggatagggagtgtttcaccatggatgtgggaagtagcgtggccgtgacagaagcatttgtgaggctctacaaagcaggactgctctaccgtaaccaccagttggtgaactggagctgcgcgctccggtctgctatcagcgatatagaagtcgaaaatcggccacttcccggtcatactcagctgcgcctacctgggtgcccgacccctgtaagcttcggccttctgttcagtgttgctttcccagttgatggggagcccgacgctgaggttgtcgtgggaactacgaggcccgaaactctccctggtgatgtagcagtcgccgtgcaccctgacgattcacggtacacccaccttcatggccgacagctgagacatcctctgatgggacagcctctgcctctgattaccgactacgcggtgcagcctcatgttggcacaggcgctgtcaaagtaaccccagcacacagcccggcagacgcggaaatgggcgctcgacatggcttgtcaccactgaacgtcatagccgaggacggaaccatgaccagcctctgtggagactggctgcagggtctgcatcgctttgttgcgagggagaaaattatgtccgtgctttctgaaaggggcctgtttagaggcctgcagaatcacccgatggtgctcccaatttgctcccggtctggcgatgttatagaatacttgctcaaaaatcagtggtttgtccgttgccaggaaatgggcgcacgcgctgctaaggctgtggaaagtggggctctggagctttcgccgtcattccaccagaagaattggcagcactggttttcacatatcggggattggtgtgtctcgcggcagttgtggtggggtcatcagatccctgcttaccttgtggtggaagaccatgcccaaggcgaggaggattgctgggtggtcgggagatcggaggccgaagctcgagaggtagcagctgaactgaccggcagaccaggcgctgagctcacccttgaaagggatcccgatgtgctggacacatggttttctagcgccttgtttcccttcagcgcactaggttggccacaagagacacctgacctggcgaggttttatcccctctccttgttggagaccggcagtgacctcttacttttctgggtggggaggatggtaatgctgggtactcagctaactggccagctgccctttagtaaagtccttctccaccccatggttagggatagacagggccgaaagatgagcaagtcactgggcaatgtcttggacccacgggacattatatccggcgtggagatgcaattactgcaggagaaactaaggtctggcaacttggatcccgcagagctcgcaattgtagcagccgcacaaaagaaggatttcccccatggaattcccgaatgcggaaccgacgcacttcggtttactctgtgttcacacggggtacaggcaggcgaccttcacctgtccgtttcagaagtgcaaagttgcaggcatttctgcaacaagatttggaacgccttaagatttatattgaacgcactcggcgaaaagtttgtgccacagccggcagaggagctttcaccatcctctcccatggacgcctggatacttagcagactggccctggcagcccaggagtgcgagcggggatttctgaccagggaattgagccttgtgacacacgctctgcaccatttttggttgcacaacttgtgtgatgtgtatctggaggccgtgaagcccgtgctctggcacagtcctcggcctctgggacctccacaagttctcttctcttgcgctgatttgggtctgagacttttggctccactcatgccattcctggctgaggaactttggcagcgcctacctccacgacctggctgcccgccagcaccctctatttctgtcgccccttacccctcagcatgctccctcgaacactggcgccagccagagctggagcgcaggttctcacgcgtccaggaggtcgtgcaagtcctgcgtgcgctgcgagccacatatcagctgactaaggctcgccctcgagtgttgctgcagtcatctgagcctggagatcaaggcctcttcgaggctttcctggagccactcgggaccctgggatactgtggtgccgtgggcctgctaccccctggcactgccgctccatccggctgggcgcaggcacccctatcagataccgctcaggtttacatggaacttcagggcctggtagacccccagatccaactccctcttttagcggctagacgttacaagctgcagaaacagcttgactccctgacagcgaggactccttcagaaggggaagccggaacccagaggcagcaaaaactcagctctttgcagcttgagctatctaaacttgataaggccgcatcacatttgcgccagctgatggatgaacctcctgcgcctggaagtccagagctctag

SEQ ID NO: 29283 - DNA, 1620 bp, synthetic construct
  source 1..1620: mol_type = other DNA; note = Synthetic coding sequence
atggccacctccgccccactcaggtccctcgaagaggaagtgacttgttccatttgtctcgactacctgagagatcccgttacaattgactgtggccatgtgttttgtagatcatgcactacggatgtaaggcccatttcaggatctcggccagtgtgcccactgtgcaagaagcccttcaagaaggagaatattcgccctgtgtggcagctggcgtcactggtcgagaacattgagcgactaaaagtagacaaaggacggcagcctggagaggtgacccgagagcagcaagacgccaagctttgcgagcgtcacagagaaaaactgcactactattgcgaagacgatggcaagctcctgtgtgtcatgtgtagggagtccagggaacacagaccccatactgctgttcttatggaaaaggccgctcagcctcacagggaaaaaattctgaatcacctcagcacactgaggagagatcgtgataagattcaagggttccaggccaagggcgaggcagatattctcgcagccctgaagaaactgcaggaccaacggcagtatatcgtggcagaatttgagcagggtcatcaatttttaagagagcgcgaggaacacctgctcgaacagttggcaaagctggaacaagaactcaccgaggggcgtgagaaattcaaatcacgaggcgtgggcgaattggcgaggctggctctcgttatctctgagctggagggcaaggcgcaacagcctgctgcggaactgatgcaggatacaagggacttcttgaatcgttacccgagaaagaagttttgggtgggcaaacccatcgcgagggtggtgaagaagaagaccggggaattcagcgataaactgttatccttacaaaggggcctgcgagagttccagggcaaactgctgcgcgaccttgagtacaaaacagtctcggtcactcttgacccccaatcggcctctgggtatcttcagctgtcagaggattggaaatgtgtgacctacacgagcctatacaaatctgcgtatctccacccacaacagtttgattgcgaacctggcgtccttgggtctaagggattcacttggggaaaggtgtactgggaggtagaagtagagcgcgagggatggagcgaagatgaagaggaaggagatgaagaagaggagggagaggaggaagaagaagaagaggaggctggttacggagacggatacgatgattgggagacggacgaagacgaggaatccctcggcgacgaggaggaggaggaggaagaggaggaggaggaagtactcgagagctgcatggttggcgttgccagggacagcgtcaagcggaagggagacctaagccttaggccggaggacggggtgtgggcccttcgcctctcatccagcggtatttgggcgaacacctcccctgaagccgagctgttccccgcattgagaccccgacgggtggggatcgcccttgattatgaagggggaacagtgactttcacaaacgccgagtcacaggaactgatctatacattcacagcgacatttacgcggagactagttccatttctttggctcaagtggcccggaactagactgttattaagaccttag

SEQ ID NO: 29284 - DNA, 678 bp, synthetic construct
  source 1..678: mol_type = other DNA; note = Synthetic coding sequence
atggcagccggtagcgaggcaaccaccccagtgatagtggccgctggggctgggggagaggagggggagcacgtcaaacctttcaaacccgagaaggccaaggagatcatcatgtcactgcagcagccagctatattctgtaacatggtgttcgattggccagccagacattggaatgctaagtacctgtctcaggtgctacacggtaagcagatccggttccggatggggatgaagagtatgtctacagttccccagtttgaaacaacctgtaattatgttgaagcaactctggaggagtttctgacctggaattgtgatcagtcctctatctctggtccatttagggattatgaccactcaaagttttgggcatatgccgactataaatattttgtctcactgttcgaagacaagactgacctgtttcaggacgttaagtggtcagatttcggatttccaggaagaaacgggcaggagtcgacactgtggataggatctctgggagcgcatacaccgtgccacctggacagctatggctgtaacctggtttttcaggtgcaggggcgtcttgaatgcaacggaatgatcattgctccaggcccacaggccattctcttaccacaaccgctgaagtatttgggcctgcaggagacaatggcttcactgagttcctag

SEQ ID NO: 29285 - DNA, 2571 bp, synthetic construct
  source 1..2571: mol_type = other DNA; note = Synthetic coding sequence
atggacatctccaaggggctgccgggtatgcagggaggcctccatatctggatctctgagaaccggaagatggtgcccgtccctgagggcgcttatgggaacttcttcgaagagcattgttacgtgatcctgcacgttccacaatcacctaaggccacccagggcgcatcaagtgacttacattattgggttggcaagcaggctggagccgaagcccaaggagctgctgaggctttccagcagagattgcaggacgagctgggcggacagacagtcctgcacagggaagcccagggccacgagtccgactgcttttgttcgtatttcaggccaggcatcatttatcgaaagggtggcctggcgagcgaccttaaacacgtggagactaatttattcaatatccagcgcctcctgcatatcaaaggcagaaagcatgtgagcgccaccgaggtcgaattaagctggaatagcttcaacaaaggcgacattttcctgcttgacctcggcaaaatgatgattcaatggaatgggccaaagacaagtattagcgaaaaagccagggggctcgctttgacatactctctccgagatcgggaacgcggaggcggaagggcccagattggggttgtcgatgacgaggctaaggccccagatctgatgcagattatggaagcggttttaggccgacgggtgggaagtctgagggcagccaccccttcgaaggacattaaccagttgcagaaagcgaatgtgcgcctgtaccacgtgtatgaaaagggcaaggatttggtagtccttgaattggcaacacctcccctgacccaggatctcttgcaggaagaagatttctatatcttggatcagggagggtttaagatttatgtgtggcaaggcaggatgtctagtctgcaagaaaggaaggcagctttctcccgggctgtgggcttcatccaggctaaaggatacccaacctatactaacgtcgaggtggttaatgatggcgctgaatctgctgctttcaaacagttatttcggacatggtccgagaaaagacgcagaaaccaaaagcttgggggaagagataagtccatccatgtgaagctggatgttggaaaactgcacactcaaccaaagttggcagcacagttgcgaatggtggatgatggatctggtaaggtcgaggtatggtgcatccaagacctacatcgacagccagttgatccgaaacggcatggacaactgtgtgccggtaactgttacctggtcctgtacacctaccagagacttgggcgagttcagtatatcctgtacctttggcaaggccatcaggcaacggctgacgagatcgaggctctcaactctaacgccgaggagctcgatgtgatgtatggcggagttctcgtccaagaacacgtaacgatgggaagtgaacccccacatttcctggctatcttccaaggccagttggtgatcttccaagaacgtgcagggcatcatggaaaggggcaatccgcgtccaccaccaggctgttccaggttcaggggaccgattcacacaacacgaggacaatggaggtgcccgcacgcgcttctagcctcaattcttctgatatttttcttctagtcaccgcgtccgtgtgctatctgtggttcggaaagggctgtaacggggatcagcgtgaaatggctcgagtggtggtaaccgtgatctcccgcaagaacgaagaaaccgttctcgaggggcaggagcccccacatttctgggaagcccttgggggaagagcaccctacccctcaaataaacgtcttccagaggaggtaccatcatttcagccgaggctgtttgaatgctccagccacatgggatgtctagtattggctgaggtcgggtttttttctcaggaggacttggacaagtacgacatcatgcttctggatacatggcaagaaatcttcctgtggcttggggaggccgcatctgagtggaaggaggccgtcgcctggggacaggaataccttaagacccatcccgcagggaggagcccagccactcccatcgtccttgttaaacagggccacgagccccctaccttcattggttggttctttacctgggatccctataagtggacttctcaccccagtcataaggaagtggtggacgggagtcccgcagccgcatccactatcagcgaaataacggccgaagttaacaatctgcgattgagccgttggcccggaaacggacgggctggcgcagtggccctgcaggctctgaaaggatctcaagactcaagtgaaaacgaccttgtgaggtcgccgaagtctgctgggagtcgtacatcaagcagcgtgagctccaccagtgcaacaatcaatgggggacttcggagagagcagttgatgcatcaggccgtggaggacctcccagagggagtagacccagccaggcgagagttttacctttcggactccgattttcaggacatctttggaaaaagtaaggaagaattttacagtatggcaacgtggagacagaggcaagagaagaagcagttaggttttttttag

SEQ ID NO: 29286 - DNA, 2607 bp, synthetic construct
  source 1..2607: mol_type = other DNA; note = Synthetic coding sequence
atggcctcttttccggaaacggattttcaaatatgtctgctctgtaaggaaatgtgtgggagcccagctcccctgtcaagcaattcgtctgcctcatcaagcagcagtcagactagcacgtcctccggtggcggaggaggaggccctggtgcagcggcacgcaggctccatgtgttgccatgcctgcacgctttttgcaggccatgcctggaagcccaccggcttccagctgccggtggaggcgctgcaggggagcctttaaagttgcggtgccctgtgtgcgaccagaaagtggtccttgcagaagctgctgggatggatgcactaccgagtagtgcctttctactcagtaacctgcttgacgcggtcgtggccaccgcagatgaaccgcctcctaaaaacgggagagcaggtgccccagctggtgccggtggccattccaatcatagacatcacgctcatcatgcccatccaagagcttccgcctctgctccaccattaccccaggccccacagcccccagcccctagtagatcggcccctggaggacctgctgctagtccaagtgccctgctcttaaggaggccacatgggtgtagcagttgtgatgaaggaaacgccgctagcagccgttgtttggactgccaagagcacctgtgtgacaattgcgtaagagctcaccagagggtcagactaactaaagatcattatatcgagcgcggaccaccaggccctggcgcagccgctgccgcacagcaacttgggctcgggcctcccttccccggacctcccttttcgatactgtctgtctttccagagcgtcttggattctgccaacaccacgatgacgaagtgctccacctgtattgcgatacctgcagcgttcccatatgccgcgagtgtactatggggcgtcacggtgggcacagctttatctacctccaggaagctttgcaggatagccgtgcacttacgatccagctgctcgccgacgcccaacaaggtcgacaggcaatacaactttctatagaacaggcccagaccgtcgccgagcaggtggagatgaaagccaaggtggtgcagtcggaagtgaaagctgtgacagcacggcacaagaaagcgctcgaagagcgcgagtgcgagctgctgtggaaggtggagaaaatcaggcaggtaaaggccaagtcactctatttgcaggtggagaagctgcggcaaaatctcaacaaactcgaatcaactatcagtgctgtccagcaggtgctggaagagggacgggcattagatatactgctggctcgcgaccggatgttggcgcaagtgcaggagctcaagacagtgcggtctctgctccagccccaagaggatgaccgagtgatgtttacacctcctgatcaggcactctacctggctattaagtcgtttggcttcgtgtcatccggcgcttttgccccactgacgaaagctacgggggatggcttgaagcgtgccctgcagggcaaggtcgcttcatttacagttattgggtacgatcatgacggagagccacgtttgtccggtggggatcttatgagcgccgtggtgctgggtcccgacggcaacttgttcggggcagaggtgtccgatcaacagaatggcacatacgtggtgagttaccggccacaactggagggggagcaccttgtgagcgttacactctgcaatcagcatattgaaaattcaccttttaaggtggtcgttaagagcgggcgaagttatgtggggattggcctcccgggattatcattcgggtcagagggagattcagacgggaaattgtgcaggccttggggagtgtcagtcgataaagaaggatatattatagtggccgatcgttccaacaacagaatccaagtcttcaagccctgtggcgctttccaccataaattcgggactttgggctctcgtcccggacagttcgacaggcccgctggagtggcttgtgacgcgtcgcggcgtatcgttgtggcagacaaagacaatcatagaatacagatttttaccttcgagggtcagtttctcttaaagttcggcgagaaagggaccaagaatggccagtttaactatccatgggacgtagccgtgaacagtgaaggcaagatccttgtgtctgacacacggaatcacaggatacaactttttggccctgatggagtgtttctcaataagtatgggttcgagggcgctctctggaaacatttcgattcaccacgtggagttgcgttcaatcacgagggacatctagtcgtgacagactttaacaaccatcgcctcctcgtcatccaccccgactgccagtctgctcgttttctggggagtgaaggcactggtaatggtcaattcttgcggcctcagggcgtcgccgtggaccaggagggtcgcattattgtggccgactcacgcaatcaccgggtccagatgttcgagtcaaacggctcttttctatgtaaatttggggctcaggggagcggttttgggcagatggacagaccttctggcatcgctatcacccccgacggtatgatcgtggtcgtggactttgggaacaatagaattcttgtcttttag

SEQ ID NO: 29287 - DNA, 1107 bp, synthetic construct
  source 1..1107: mol_type = other DNA; note = Synthetic coding sequence
atgcgagaacccgtattgacctggtgcgtacctctcgagctgctatgttctcatccacttccattgtccgcattcctcaagagtcaggtgaagttgtacacctatagggcctgcgcaggcaaagacgagatggggaagatggtttccgttatcaacactgtggatacgagccacgaggatatgattcatgacgcccaaatggactactacggcacgcgcttggccacgtgtagcagtgacaggtcggtgaagatcttcgatgttcggaacggcggacagattctcatcgcagacctgagagggcacgagggaccagtatggcaggttgcgtgggcccaccctatgtatgggaacattctcgcctcgtgcagctacgacagaaaggtgatcatatggcgcgaagagaatgggacctgggagaaatctcatgagcatgcgggacacgacagcagcgtgaactccgtgtgctgggctccgcatgactacggtttgattcttgcctgtggttctagcgatggcgctatttctctcttgacttacactggggagggtcagtgggaagtgaaaaaaataaataatgcacacaccattggctgcaacgccgtatcctgggcccctgcagtggtgccgggttctctgatagatcacccctcagggcagaaacctaactatattaagagatttgcctcaggtggatgtgacaatctcatcaagctgtggaaggaagaggaagacgggcagtggaaggaagagcaaaaactcgaagcccactctgactgggtgcgggacgtcgcctgggctcccagcattggcttgcccacatccactatagcctcttgctcacaggacggcagagtgttcatctggacctgtgatgatgcatcttctaatacctggtcccctaagctgctgcataaattcaacgacgtggtctggcacgtttcatggagtattaccgcgaatatactcgctgtgtctgggggagataacaaggtgacactctggaaggagtcagtggacggacagtgggtatgtatctcagacgtgaacaagggccagggctcagtgtcggccagcgtgaccgaaggtcagcagaacgaacagtag

SEQ ID NO: 29288 - DNA, 1059 bp, synthetic construct
  source 1..1059: mol_type = other DNA; note = Synthetic coding sequence
atggacattgataaagaccttgaggcaccactgtacctaacgcctgaaggctggtctttatttctgcagcgctattaccaagttgttcatgaaggagcagagctgcgacatttagatacccaggttcagcgatgtgaggatatcctgcagcaactgcaggctgtcgtgccacaaatcgatatggagggtgatagaaatatctggatcgtcaaaccgggagctaaatcccgaggccgagggattatgtgtatggatcatttggaagaaatgctcaaactggtaaacggcaatcccgttgttatgaaagatggcaagtgggtggtgcagaaatacattgagagacccctgctgatttttgggactaagttcgacctgaggcaatggttcctggttacggattggaaccccctcactgtctggttctatagggatagttacattaggttttcgacccaaccattttctttaaagaacctggacaactctgtccatctgtgcaataattcaattcagaagcatctcgagaacagttgccaccggcatccgctgctccctcctgacaatatgtggtccagccaacgcttccaggctcatctccaggagatgggcgctcccaatgcgtggagcaccattatcgtccccggaatgaaggacgcagtgattcacgctctgcagacaagccaagacaccgtacagtgtcgcaaggcttcctttgaactgtatggcgctgacttcgtgttcggggaggacttccagccctggctcatagaaattaatgctagccctactatggccccttctacagcagtgacggccagattgtgtgccggagtgcaagccgataccctgagagtcgtgatcgaccgcatgttggataggaattgcgacacaggagccttcgagctgatttacaaacagcctgtgacaacatcccccgcttccactcccaggcccagttgcctgttgccaatgtattctgacacccgggcaaggtcaagcgacgatagcactgcgtcctggtgggccctgcgaccctgccgaccacaggcccgaccgtag

SEQ ID NO: 29289 - DNA, 579 bp, synthetic construct
  source 1..579: mol_type = other DNA; note = Synthetic coding sequence
atggggaaaggctgtaaggtcgtcgtgtgtggtctgctttctgtgggcaagacagccatcctggagcaactgttatacggtaatcacactatagggatggaggactgtgaaactatggaggatgtatacatggcctccgtggagaccgaccggggagtcaaagaacagctccatctgtacgatacccggggactccaggaaggcgtggagttgcctaagcattactttagcttcgccgatgggtttgtgctcgtgtacagcgtgaataacctggagtccttccagcgcgttgaattgcttaagaaggaaattgacaagttcaaggataaaaaagaggtcgcaatagtggtgctgggtaacaagattgatttatccgaacagaggcaggttgacgccgaagtcgcacagcagtgggcaaaaagcgaaaaggttcggctctgggaggtcacagtgaccgatcgaaagactctaatcgagcctttcaccctgctggcttccaaattgtcgcaaccacagtcaaaaagttcttttccattgccgggaagaaagaataagggtaattctaatagcgagaattag

SEQ ID NO: 29290 - DNA, 1419 bp, synthetic construct
  source 1..1419: mol_type = other DNA; note = Synthetic coding sequence
atgtcccgccgagtggtccgccagtctaagttccgccatgtgtttggacaggccgctaaggcagatcaggcctacgaagatatcagggtctcgaaggtgacgtgggactcttctttttgcgccgttaatcccaagttcctggctattattgtggaggctggcggtggcggtgcgttcatcgtgttgcctcttgctaaaactgggagggtggataaaaattatcctttagtcaccgggcacactgcaccggtcttggacattgactggtgcccacacaatgacaacgtaatcgcctcggcttccgacgatactactattatggtttggcagataccagactataccccaatgcgcaatattaccgaaccaattatcaccctcgagggccacagtaagcgcgtgggtatactgtcctggcacccaaccgcccgtaatgtgctcttgtcagctggcggtgacaacgtgatcataatttggaatgtgggtactggagaagtgttgctaagtttagacgatatgcaccccgacgtcatccatagcgtgtgttggaattccaacggatccttgttggccaccacctgcaaggacaagacccttcggatcattgacccacggaagggtcaggtggtggccgagagattcgctgcccacgaagggatgcgcccaatgagggccgttttcactaggcagggtcacatatttacaacagggttcacacgcatgagtcagagggaactggggctgtgggaccccaataacttcgaagaacctgtggccctccaggagatggacacctctaatggggtgctcttgcccttctacgacccagacagttccatagtgtacctgtgcgggaaaggagatagttctatccggtatttcgagattactgatgaacctccattcgtccactacttaaatactttttccagtaaagagcctcagcggggtatgggcttcatgcctaagcgagggctggatgtatctaaatgcgaaattgctagattctataagcttcacgagaggaaatgtgaacccatcattatgaccgttcctcgcaagtctgacctgtttcaggacgacctttacccggacaccccaggaccagagccagcactggaagcagatgaatggttaagtggccaggatgcggagcccgtgttgatcagtttgcgcgatgggtacgttcctccgaaacatcgcgaactgagagtaacaaagcgcaacattctggacgtcaggcctccctcgggtccacgaaggtcccaatccgcatcagacgcccctctatcccagcaacatactttggaaacactgctggaagaaatcaaagccttacgggagagagttcaagcacaggagcaacgcatcacagctcttgagaacatgctctgcgaactggtggacggtaccgactag

SEQ ID NO: 29291 - DNA, 2628 bp, synthetic construct
  source 1..2628: mol_type = other DNA; note = Synthetic coding sequence
atgggtgattctgatgacgagtatgataggcgccgtcgggataagttcagacgggaacgcagcgactatgatagatcacgcgagagagacgagaggcggagaggggacgattggaatgatcgagagtgggatagaggacgcgaaaggcgaagtcggggtgagtaccgggactatgaccgaaacagaagggaaagatttagtccacctagacacgaattgagcccaccgcagaagcggatgcgtagagattgggatgagcattcttctgacccctatcacagtggttacgaaatgccgtacgccggtggcggaggagggcctacctacggcccaccacagccttggggccacccggacgtgcacatcatgcagcaccatgtgcttccgatccaagcccgtctcggctctattgccgaaatcgacctgggagttcctcctcccgttatgaaaacattcaaggaattcttactgtccctggatgatagtgtcgacgagacagaagccgttaagcgctacaatgattacaaactggacttccgtagacagcaaatgcaagacttttttctggctcacaaggacgaggagtggtttcgatctaaatatcaccccgacgaggtgggcaaacgaaggcaggaagccagaggagccctgcaaaaccgccttcgggtttttctgagtctgatggagactgggtggttcgacaacctgctgttggacattgacaaagccgacgccattgtgaaaatgttagatgctgctgtgataaagatggaggggggtaccgagaatgacttgcgaatactggaacaagaggaggaggaggagcaggccggaaagccgggagagcctagcaaaaaggaagaaggcagagctggggctgggctgggagatggagaaagaaagaccaatgacaaggatgagaagaaagaggatggaaagcaggcggaaaacgacagctcgaacgatgacaaaactaagaagtcagagggagatggagacaaggaggaaaaaaaagaggatagcgagaaggaagcgaagaagagctccaagaagagaaaccggaagcactcaggagacgactccttcgatgaagggtccgtgtcagagtcggagtcagaatctgagagcggacaggctgaagaggagaaggaggaagctgaggccctgaaggaaaaggaaaagccgaaggaggaagagtgggaaaagcctaaggacgcagccggtttggagtgcaaacctcggccactgcataagacctgctctttgtttatgcgaaatatagctcctaacatttcacgagcggaaattatcagtctatgcaagaggtatcctgggttcatgcgcgtcgcactgagtgagccccaaccagagagacgcttttttcgcaggggctgggtaacctttgatcgtagtgtaaacatcaaggagatttgctggaacctccaaaacattcggttgcgggagtgtgagttgtccccgggagtgaatagggacctaacacgtagagtgcggaacatcaacggcataacccagcacaaacaaatcgtaagaaatgacataaagctcgccgctaaactgatacacaccctggacgaccgtacccagctatgggcctctgagccagggacaccgccattgccaacgagcttaccaagccaaaacccgatattaaagaatataaccgactacctgatcgaagaggtgagcgctgaggaagaggagctgttggggtcatctggtggggctcctcccgaggaaccccctaaagagggtaatcctgctgagatcaacgttgaacgggacgaaaagcttatcaaggtgctggataagctcttattatacctaagaattgtccactctctcgactactataatacgtgcgaatatcccaatgaggacgagatgcccaatcgttgcgggatcattcatgttcgagggcctatgccacccaatcgcatttctcacggtgaggtgctcgagtggcagaaaacttttgaggagaagctgacaccacttctcagcgttcgggagagcctgtctgaagaagaggctcagaagatggggcgaaaggaccctgagcaagaggtggaaaaatttgtcaccagcaatacccaggagctggggaaggataaatggctgtgtcccctgtcagggaagaagtttaaagggccagagtttgtgcggaaacacatcttcaataagcatgccgaaaagattgaggaagtgaaaaaggaagtcgcgttctttaacaatttcctgactgatgcaaagcgaccagccctcccagaaatcaaacccgcacagccaccaggtcccgctcagattctccctccaggtctcacacccggtctgccttacccacaccagacgcctcaaggtctgatgccttacggccagcctcgaccccctatactagggtacggcgctggagctgtcagaccggcagtgcctactggtggtcctccctacccccacgcgccatacggggctggacggggtaattatgatgcttttcgtgggcagggtggttaccctggcaagccaagaaacaggatggtccggggtgatccccgagccatcgtcgagtatcgcgatctcgatgcacccgacgacgtggattttttctag

SEQ ID NO: 29292 - DNA, 816 bp, synthetic construct
  source 1..816: mol_type = other DNA; note = Synthetic coding sequence
atggcagctgtcgagaagagacgccaggcggtgcctccaccagccggatttacggactccgggcgtcaaagcgttagtagggccgcaggtgctgcagagtccgaagaggattttctgaggcaggtcggcgtgacagagatgttgcgtgccgcacttctcaaagtgctggaagctcgccctgaggaaccaatagccttcttggcccattacttcgagaatatggggctccgctcaccagttaacggcggtgccggtgagcccccaggtcagcttctgctgcagcagcagaggcttgggagggccctgtggcatctccgcctagcccaccacagtcagcgggcagcctttaataacaacgtgagcgtagcttacgaatgcctgtccgcaggcggtcggagaaagcgccctgggcttgacgggcgaacttatagcgagctccttcgtagaatctgccgggacggacaggcaccagaagaagtggtggccccactcttgcgaaaagtccagtgtcgagatcatgaggccgtgcctctgtcggtcttccgagcaggaaccttaacctgcttcgttttactggagtttgtggcaagagcaggtgccctgttccaactgctggaggattcagccgctgcagtggctgacagaagggtgggccaggccgtgcttgacacactggagggcgctctgcaggctagcgacgccgctgcgcctgctcggttcctggaggcagggtccagattggccccaatgacccgcgaagagttcctggagagggctgccgctctgttcatcgccaaagtgaagcctgttggttag

SEQ ID NO: 29293 - DNA, 1977 bp, synthetic construct
  source 1..1977: mol_type = other DNA; note = Synthetic coding sequence
atgggaggacatctgtctccgtggcccacatatacctccggccaaactattctccaaaacagaaaaccttgcagcgatgattaccgtaagcgagtggggtcatgtcagcagcacccttttaggactgcaaagcctcagtaccttgaagagctggagaactacttacgtaaagagcttcttctgctcgatctcggaacggactcaactcaagaactgcggttgcagccgtatcgcgagattttcgagttctttatcgaggattttaagacttacaagccactgctgagcagtatcaagaacgcctatgagggaatgctggcccaccagcgcgagaagatcagggcactggagccccttaaggctaaactcgtcaccgtgaatgaagactgtaatgagagaatcctggccatgcgcgctgaggaaaaatatgaaataagcctgctgaaaaaggagaaaatgaatcttctgaagttaatagacaagaaaaatgaagagaaaatctctctgcaaagtgaggtgactaagttgagaaagaatctcgccgaggagtaccttcactacctgtccgaaagggatgcgtgtaagatcctcattgcagacctgaacgagctccggtaccagagggaggacatgagcctggctcagtcacccggtatttggggagaagacccagttaaacttaccctggcactgaaaatgactaggcaagatcttaccaggacacagatggagctaaataacatgaaggcaaacttcggggacgtcgtcccaagacgagattttgagatgcaggaaaagactaacaaggacttgcaagagcaactcgacacactccgggcttcctatgaggaagtgcgcaaagagcatgagatccttatgcaactgcacatgagcactctgaaggaacgagaccagttcttcagcgaactgcaggagatacagaggacctctactcctaggccagactggacaaagtgcaaagatgtggtcgccggaggcccagaacgctggcagatgcttgctgaggggaaaaatagtgaccagttggtggatgtactactggaggaaattggcagcggactcctgagagagaaggattttttccccggtttggggtacggagaggccatccccgctttcctgcgattcgacgggcttgtggaaaataagaaaccatctaagaaagacgtcgttaatctcctgaaggatgcctggaaagagagactggccgaggagcagaaggagaccttccctgatttcttctttaactttctcgagcaccgctttggccctagtgatgccatggcctgggcctacactatattcgagaatattaaaatctttcattccaatgaggtgatgtcacaattctatgctgtgctgatgggcaaaaggtccgagaacgtgtatgtcacgcagaaggagacagtcgctcagctgttgaaagaaatgaccaacgcggacagtcaaaacgaagggttgctcacgatggagcagttcaacacagtactgaagtcaacgttcccactcaaaacagaggaacagatacaagaactcatggaagccggaggttggcaccccagctcttctaacgcagacctgctgaactatagaagtttgttcatggaggacgaagagggccagtcagaaccattcgttcagaagttatgggagcagtatatggatgagaaagatgagtatctgcagcaacttaagcaggagctgggcatcgagctgcacgaggaagttacactaccaaaactgcgcggagggctgatgactatcgatcctagtttagacaaacagactgtcaacacctatatgtctcaagcatttcaattgccggagtcagagatgccagaagagggcgacgaaaaggaagaggcagtggtggagatactgcagactgctctggagaggctccaagtgatagacatcagaagagtgggaccgcgtgagcccgagccagcctcatag

SEQ ID NO: 29294 - DNA, 1287 bp, synthetic construct
  source 1..1287: mol_type = other DNA; note = Synthetic coding sequence
atggagcccctcaaggttgaaaaattcgccaccgccaagcgtggcaacggcttacgagcagttaccccactgagacctggagaacttttgttcaggagcgacccattggcgtacaccgtctgtaagggttcccggggtgtggtctgcgatcgctgccttctgggcaaagagaaactcatgcggtgctctcaatgccgggtggcaaaatactgctcagcaaagtgccagaagaaagcatggccagaccacaagcgtgaatgtaaatgtctgaagtcctgcaagccaaggtatccgcctgatagcgttagactgttgggtcgggtggtgttcaagttgatggatggcgcaccgagcgagagtgaaaagctttatagcttttatgatctggaatcgaacattaataagctcacagaggacaagaaagagggcctgcggcaactggtaatgacatttcaacacttcatgagagaagaaattcaggatgcatcccagcttccccctgcattcgatctgttcgaggcttttgcaaaagtaatctgtaacagcttcaccatatgcaacgcagaaatgcaggaggtgggggtgggcctttatcccagcatttctctgctgaaccactcttgtgacccaaattgttcgattgtgtttaatggccctcatctcctcctgagggccgtcagagacattgaggttggcgaagagttaaccatttgttacctcgatatgctgatgacaagcgaggaacggaggaaacagctgcgtgatcagtactgttttgaatgtgattgtttccgatgccaaactcaggacaaggacgctgatatgcttacaggtgatgagcaggtctggaaggaggtgcaggaatccttgaagaagattgaggagttgaaggcgcattggaaatgggagcaagtcttggcaatgtgtcaagctatcatttctagcaatagtgagcgtttgcctgatattaacatttaccagcttaaagttttggattgcgccatggacgcgtgtatcaacttaggcttgctcgaggaggctttgttttacgggactcgaaccatggaaccttataggatttttttccccggaagccatcctgtccgcggagttcaagtgatgaaggtgggtaaattacagttgcaccagggaatgttcccacaggccatgaaaaatctaaggttagcctttgacatcatgagggtgacacatggacgggaacactccctcattgaggacttgattttgcttctagaggaatgtgacgcaaacatccgggcttcctag

SEQ ID NO: 29295 - DNA, 1122 bp, synthetic construct
  source 1..1122: mol_type = other DNA; note = Synthetic coding sequence
atgagttccggcaattatcagcagagtgaggcgctctcaaaaccaacatttagcgaggagcaggcatctgctctggtggaatcggttttcgggttgaaagtttcaaaagtgcggccattgcctagttatgacgatcagaacttccatgtgtacgtttccaaaaccaaagatggcccaactgagtacgtgctaaaaattagcaacaccaaggccagtaagaatcctgatctaatcgaggtgcagaaccacattatcatgttcctgaaagcggctggcttcccgactgcctccgtctgccatacaaaaggagacaacaccgcctccctggtgtcagtggattcggggtctgagatcaagtcatatcttgttcgcctgctgacctatctgcccggaagacccatcgccgaactccctgtctctcctcagctcctttatgagataggaaagcttgctgcgaagctcgacaagaccctgcaacgctttcaccatcctaagctgtctagcctgcatcgcgagaatttcatttggaacctcaagaatgtgccccttctagaaaaatacctgtacgcattgggacagaatcggaatcgggaaattgttgagcacgtgatccatctgttcaaagaggaagtaatgacaaagttatcccatttccgggagtgcattaatcatggagacctgaacgaccacaacatcctgattgagtcttctaaatcagccagtggcaacgcagaatatcaagtcagcgggatcctggatttcggagatatgagttacggctactatgttttcgaggtggccataacaattatgtatatgatgatagaatcaaagagccccatccaagttggtggccacgttctggcaggatttgagagcatcacccccctgacagccgtggaaaagggcgctctctttctgttagtgtgttctagattctgtcagagcctggtaatggcagcatacagttgtcagctgtaccccgagaataaggattacttgatggtcactgcaaagaccggctggaaacacctccaacagatgttcgacatgggccaaaaggcggtcgaggaaatttggtttgaaacggccaagagctatgagtccggtatcagcatgtag

SEQ ID NO: 29296 - DNA, 2766 bp, synthetic construct
  source 1..2766: mol_type = other DNA; note = Synthetic coding sequence
atggcacttctgtgcggactggggcaggtcacattgcggatctgggtgtccctacccagtcaaagcgaaaatgggataggaagcggcggtatggaggcgctgaccacccaactcgggcctgggagagagggtagctccagtccgaactcaaaacaggagctgcagccgtactcaggcagcagcgctcttaaaccaaaccaggtgggtgaaacctccctctatggcgtgcccattgtctctctggtgatagacggccaagaacgactgtgcctcgctcaaatttctaacaccttactcaagaattactcctacaacgagatccacaatcggagggtggccttaggcatcacttgtgtgcagtgtacccccgtgcagctggagattctgcgtcgggctggagccatgccaataagctccagaagatgtggaatgattacaaaacgagaggcggagagactttgtaagagtttcttaggggagcataagcccccaaagttacctgaaaactttgcctttgatgtggtgcatgaatgcgcttggggctccagaggatcgttcattccagcacggtataattcgtctcgcgctaaatgcattaaatgcggttattgctccatgtacttctcgccaaacaagtttatatttcacagtcaccggacacctgacgctaaatacacccagcccgatgcagccaacttcaatagctggaggaggcacctcaagttaagcgacaagagcgcgactgacgagttgtctcatgcatgggaggatgtcaaagcaatgttcaatggcggaacccgatgcggagccgaaatggcgcctggaccccctccccacaaatccctgcggtgtggggaggacgaggccgctggtcctcccggtccacccccaccacacccacagaggggtctcggactggccaccggcgcatcaggcccagctggacctggtggaccagggggaggcgcaggagtacgctcatatcccgtgattcctgtcccgtcaaagggcttcggcctgctgcagaagctcccaccacctctgtttccccacccatatgggttccccacggccttcggcctgtgtcccaaaaaggacgaccctgtgctcggcgcaggggagcccaagggcggacctgggacgggctccggcggtggaggcgcaggtactggtggtggggctgggggacctggcgcttcccacctgccaccaggcgcaggggctggcccagggggaggggctatgttctgggggcaccagccatctggagccgctaaagacgcagctgcagtggcggcagcagccgcagccgctaccgtctatcctactttcccaatgttctggcccgctgccggatctctgccagttccctcgtatccagctgctcaaagccaggcaaaggcggttgctgcagccgttgccgctgctgccgctgctgcagccgctgcagctggaagcggcgctcccgaacccctggacggtgcagagccagccaaggaaagtggactgggtgccgaggagcgctgcccctccgcactgtcccggggaccgctcgacgaggatgggactgatgaagccctaccccctccgttggcaccactgccaccccctccccctcctccagcgaggaaggggtcctacgtgtccgcatttcgaccagtggtgaaggataccgagtccattgccaaactgtatggctctgctagagaagcatacggcgctggacccgctcggggacctggccctggagccggttcggggggttatgtgtctcccgatttccttagtgaggggtccagctcatataactctgccagccctgatgtggacactgccgacgaacctgaggtggatgtggaaagcaatcggtttcccgacgatgaggatgctcaggaggaaactgagccttccgcgccatccgcaggcggaggacctgacggtgaacaacctacaggccctccttccgccacttcttctggcgctgatggccctgcaaacagtccagacgggggtagccccagaccaaggcgcagactgggtcctccccctgctggcagacctgcattcggagatctggcggctgaggatttagtgcgacgacctgagcgctccccaccaagtggtggcggtggatacgaactgcgggagccctgcggcccactcgggggtccagcccctgccaaggtgtttgctccagaacgggacgaacacgtaaagtccgctgctgtggccttaggacccgctgcaagctacgtttgtacccctgaggcccatgagcctgataaggaggacaatcactcaccagctgacgaccttgagaccagaaagtcctatccggaccagaggagtatcagccaaccttctcccgctaacactgatcgtggcgaggacggactgactcttgatgtgactggaacccacctggtggaaaaggacatcgagaacctcgcacgcgaagagctgcaaaaactgctgctggagcagatggagctgaggaaaaagctggagcgggaatttcagtctctaaaggataacttccaggaccaaatgaagcgtgagctggcatacagggaggagatggtgcagcagctccagatcgtgagagacaccctctgcaacgagctcgatcaagagcgcaaggctcgttacgcaatccaacaaaagttgaaagaggctcacgacgccctgcatcattttagttgtaagatgctcactcccaggcattgtactggaaactgttctttcaagccacccctactgccttag

SEQ ID NO: 29297 - DNA, 1395 bp, synthetic construct
  source 1..1395: mol_type = other DNA; note = Synthetic coding sequence
atggctatgacagcgggaactaccactactttcccaatgagcaatcacacccgagagagagtcaccgtcgctaagctcaccctggaaaatttctatagcaatctcattctgcagcacgaggaacgagagacgcgccagaaaaaactcgaggttgccatggaggaagaggggctggcagatgaggagaaaaagctccggcgatctcagcatgctcgcaaggagacggagttcctccgcctcaaacgaactcgattaggactggacgactttgaatctctaaaggttatcgggaggggagcatttggggaagtccgtttagtccagaaaaaggacacagggcacatttatgcaatgaaaattctcaggaagtcggacatgctagagaaagagcaagttgcacatattcgcgcagaaagggacatcttggtggaagccgatggcgcatgggtagtgaagatgttctatagcttccaagacaaacggaatttgtacctaataatggaattcctgccgggtggtgacatgatgacactgctcatgaagaaagatactctgaccgaggaggaaacccagttttacatctccgagaccgtcctcgctatcgacgcaatccaccagcttggattcattcaccgcgatattaagcccgacaatctgctgctggatgctaaaggccacgtaaagctgtccgatttcgggctgtgcactggtctcaagaaggcacacagaaccgaattctatcgcaatctgacacacaatccgccatccgatttctcatttcaaaacatgaactcaaagcgcaaagccgaaacttggaaaaagaaccggagacaactcgcctacagtaccgtggggacaccagattatatcgcccctgaggtgttcatgcagacaggctacaacaagttgtgcgattggtggagcctgggcgtgattatgtacgaaatgctgattgggtaccctccattctgtagtgagactccccaggagacttatcggaaggtgatgaattggaaagagaccctggtcttcccaccagaagtccccatctctgaaaaggcgaaggatctcattctgcgcttctgcatcgactccgaaaatagaattgggaactccggcgtagaggaaatcaaggggcacccctttttcgaaggagtagactgggaacacatcagagaacgcccagccgcaatccctattgagattaagtctattgatgatacctccaacttcgatgattttccggagtctgacattctgcaacctgtgcccaacaccactgagccggactacaaatcaaaggattgggtcttcctgaactatacttacaagcggttcgagggcctgacccagagaggatccatcccaacttatatgaaggcaggcaagttgtag

SEQ ID NO: 29298 - DNA, 3951 bp, synthetic construct
  source 1..3951: mol_type = other DNA; note = Synthetic coding sequence
atggcctccaagggggctggaatgtcgttttccaggaaatcctaccgcctcacatctgacgccgaaaagagtcgggtgactggtatagtgcaagaaaaactgctaaatgactaccttaataggatcttctcatctagtgaacacgctccaccggctgccacgagccgtaagcccctgaactttcagaacttaccagagcaccttgaccagctgttgcaagtggataatgaagaagaggagtctcaaggccaagtcgaaggaagactgggcccttccactgtcgttttggaccataccggagggttcgagggcctgttactggtcgacgacgaccttctcggcgtgattggtcatagtaattttggaacaattcgaagcactacctgcgtctataaagggaagtggctctacgaagtgttgattagctcacagggactgatgcagattggctggtgcacaatttcctgccggtttaaccaggaggaaggcgtgggagatacccacaattcctatgcgtacgatggcaatcgagtccggaagtggaatgtcactaccacaaattacgggaaagcttgggcagccggagatatcgtctcctgcctgatcgacctcgatgacggaaccctgtctttctgcctcaacggggtttccctggggactgcctttgaaaacctatctagaggcttgggtatggcttacttcccagctatctctttatccttcaaagaatcagtcgcattcaatttcggatcccgacccctccgctacccagtcgctggctacaggccactccaggaccctccgtctgctgacctggtgcgtgcccagaggctgctcggctgttttcgggcagtcctgtctgtcgagctcgaccctgttgagggacggctgctggataaagagagctcaaaatggaggcttagagggcagcccacagtgttgcttacactggcacacatctttcatcactttgccccattgctgagaaaggtgtatcttgtggaggccgtgctgatgagttttctcttgggtattgtggaaaaagggacacctacgcaggcgcagtccgtggtgcaccaggtcctggacctgctgtggctgtttatggaggactatgaggtgcaagactgtctgaagcaattaatgatgagcctgcttaggttgtatagattcagtcctatcgttccagatttggggctgcagatccactacttgcggttaacaattgccatcctccgtcacgaaaaaagcagaaagtttctcctgtccaatgtgctgttcgatgtgcttagatctgtggtcttcttctacattaagtctcctttacgagttgaagaggcaggactccaggaattaattcctaccacttggtggccccactgctcatcgagggagggcaaggaatccacggagatgaaagaggagacagccgaagaaaggttacgtcggagagcttatgagagaggatgccagagattgcggaagcggatcgaggttgtcgaggaactgcaagtgcagattctcaaacttctgctggataacaaggatgacaacggcggagaggcctctcgttatatttttctgactaaattccgcaagtttctccaagaaaacgcttctggcagaggaaatatgccaatgctgtgcccacctgaatatatggtatgctttctgcacagactgatatcggccctaaggtactactgggacgaatacaaagcatccaaccctcatgcgtcctttagtgaggaggcttatatcccccctcaggtgttctataatgggaaggtcgactactttgacttgcaacggcttggcggactgctgagccatctgcgaaagactcttaaagacgacttagcctccaaggcaaacatcgttattgatcctttggaactgcagtcaactgcgatggatgaccttgatgaggacgaagagcctgcgccagcgatggcccaaaggccgatgcaagctcttgccgtcggagggcctcttccactgccccgtcccggatggctttccagccctacactggggagagccaataggtttctgtcaactgcagccgtctcgctgatgactcccagaagacccctgtctacttcggagaaggtcaaggtgcgtaccctcagcgtagagcagcgaactagagaagacatcgaaggcagccactggaatgaagggcttcttctagggcgaccaccagaggagcccgaacagcctttgactgaaaattcgctgctggaggtgctggacggagcggtgatgatgtataatttgtcagtacatcagcagctgggaaaaatggtgggtgttagtgacgacgttaacgaatacgccatggctctgagagatacagaagataaactccgcaggtgtcccaaacgacgtaaagatatactcgcggagctgacgaaaagccaaaaagtgttttcagaaaagctggatcatttgagcagacgactggcttgggtgcatgccactgtgtatagccaagagaagatgctggatatatactggctcctcagagtctgcctcaggacgatcgagcacggcgacagaacaggtagcctgttcgcctttatgccagaattttatttatccgtagctatcaacagctactccgctcttaagaattatttcggcccagtgcacagtatggaagaattacctggatacgaggagactctcacgcgcctggcggcaatattggccaagcactttgccgacgcgcgtattgttggaaccgacataagagattccctgatgcaagctctcgcaagttatgtctgctatcctcactcactgagggccgttgaaaggatccctgaagaacaacggatcgcaatggttagaaacctgctggccccatacgagcagcgcccatgggcacagacaaactggatccttgtccggctctggcgtggatgcggcttcggttacaggtataccagacttccccaccttctgaaaacaaagttagaggacgccaaccttccttccttacaaaagccttgcccatccaccttgttgcagcagcacatggccgacctgcttcagcaggggcctgacgtcgcgccatcattcctgaactccgtcctgaatcagctcaactgggctttctctgaatttattggcatgatccaagagatccagcaggcagccgaacgcctagaacgaaactttgtcgacagcagacaacttaaagtgtgcgctacatgtttcgatctgtcagtctcattgctcagagtgctcgaaatgaccatcacactggttcctgaaatctttcttgactggactcgacctacatccgaaatgcttctgaggcgacttgcccagctgcttaatcaagtcctcaaccgtgtgactgctgagcggaatctcttcgaccgtgtggtgaccctgagactacctggcctggagagcgtcgaccactatccaatcctggtggccgtcacaggaatccttgtccagctcctggtgcgcggacctgccagtgaacgcgaacaggctaccagcgtgctgctggctgatccatgcttccagctgcgatcaatttgttacttacttggtcaacccgaacctccggctcccggaacggccctgcccgcaccggaccgcaagcgtttcagtctgcagtcctatgccgattacatctccgctgacgagcttgcccaagtcgagcagatgctggcacacttaacatcggctagcgcccaggccgcagccgctagtttgcccacctctgaggaggacctgtgcccgatttgttacgcgcatcctatctccgcagtgttccagccttgcggtcataaaagttgcaaggcgtgtatcaaccaacacctgatgaacaacaaagattgttttttttgcaagacaactacaagcaatctattggcctgcctatatcctcactggtgggagccttcccacggacccaactgtgcttag

SEQ ID NO: 29299 - DNA, 2043 bp, synthetic construct
  source 1..2043: mol_type = other DNA; note = Synthetic coding sequence
atgccaagcgtcagtaaagccgcagctgccgcacttagtggaagtccgcctcagactgaaaagcccacccattaccgctatctgaaggagttcaggacggagcagtgtcctctgttcagtcagcataagtgtgcgcagcaccggccattcacttgtttccactggcactttctgaatcaacgtcgaaggcgcccactgcggaggcgggacgggacatttaattattcaccagacgtttactgcagcaagtataatgaagcaacgggggtttgtcccgatggcgatgagtgtccctatctgcatcgaacaactggggatacggagaggaaataccaccttaggtactacaagaccggcacctgtatacatgaaacagacgccaggggccattgcgtaaaaaacggactacattgcgcatttgcccacggacctttggatctgcggccaccggtatgtgacgtccgagaactgcaagcacaggaggccctccaaaatggccagctgggaggaggcgaaggtgttcctgatctgcagcctggcgtgcttgcttcacaggccatgatagaaaagatactgtccgaggatccacgctggcaggatgccaactttgtgttgggcagttacaagaccgaacagtgtcctaaaccccctcgcttgtgtaggcaggggtacgcttgcccgcattaccataatagccgggatcgacgtcgcaatcccagacggttccaatacagatccacaccatgtccaagcgtgaagcatggcgacgaatggggggagcccagcagatgtgatggaggcgacgggtgccagtactgccatagcaggaccgaacagcagtttcacccggaatccacaaagtgtaacgacatgcgccagaccgggtattgcccacgcggaccattttgtgccttcgcacacgtggagaagtcacttgggatggtgaacgagtggggctgccacgacctgcacctcacaagcccgtcctccaccggctccgggcagccaggtaacgccaaaagaagagactcccccgctgaggggggaccaagagggtccgaacaggactcaaaacagaaccatctggccgtatttgccgctgtgcacccccctgccccatctgtctcatcttcagttgcgagttcattagcttcctccgctggttctggatcctcaagtcctaccgctttgccagcacccccagccagggccctccctctcggaccagctagttccaccgtggaagctgtattgggctccgccctagatttgcacctgtccaatgtcaatattgcttctctggaaaaggacctcgaagagcaagatggccacgatttaggcgcagcaggccctcgctcactggccggttctgctccagtcgcgattcctgggagcctgccgagagctccgtcactccattccccttccagtgcttccacttcgcctctggggagcctgtctcaacctttgcctggacccgtgggaagctcagccatgacccctccccagcagccacctcctttgcgctccgaacccggaaccctcggctcagctgcttcctcctactccccactgggcctgaatggggtcccaggatcaatctgggattttgtgtctgggtccttctccccttcgcccagtcctatcttgtccgctgggcctccctccagttcatctgcctctccgaacggcgcagagcttgcacgcgttcgtcgccagttagacgaagccaaacgaaaaatacgacagtgggaagaaagctggcaacaagtaaagcaggtatgcgatgcttggcagcgggaagcacaggaagctaaggaacgggcacgtgtggctgacagtgataggcagctggcattgcagaaaaaagaggaggtcgaagcacaagtcattttccagctgagagccaaacaatgtgttgcttgtcgggaaagggcgcacggcgctgtactacgaccctgccagcatcacattctttgcgagccctgcgccgctacagcccctgaatgcccctattgtaagggacagcccctccagtggtag

SEQ ID NO: 29300 - DNA, 462 bp, synthetic construct
  source 1..462: mol_type = other DNA; note = Synthetic coding sequence
atgtcttcacctctggcctctttgtcaaagaccaggaaagtgccactgccatccgagcccatgaatccaggaagacgcggtatcaggatctatggagacgtgcccgcttcccacgactcagagttgatggccttcatgacccggaagctgtgggatctggaacagcaagtgaaggctcagacagacgagatcctgtctaaagaccagaagatcgctgctttggaggatctggtccagacgctaagaccccatccagccgaagctactctccaacggcaagaggagcttgaaaccatgtgtgttcagcttcagcgtcaggtgcgggagatggagagattcttgagcgattatggcctccagtgggtgggtgagcccatggatcaggaggacagcgagtctaagactgtaagcgagcacggtgagcgtgactggatgactgccaagaagttttggaagccttag

SEQ ID NO: 29301 - DNA, 2382 bp, synthetic construct
  source 1..2382: mol_type = other DNA; note = Synthetic coding sequence
atggggcagtgttacaacctggaggacgacgacctggagacggacgtaaacaagctctctagtaaacctggcctggatcgacccgaggaagaactgatgcagtatgaagtcatgtgtctcgagttgtcctactctttcgaggaactgcagtcgaagttaggagatgatcttaactctgagaagacccagtacgccaaccaccaccacatcccagcagcagcttcgagcaaacaacactgctattcgaaggatcaatcaagctgcggacaagaacgagagtacgcggtccagacttccttgctgtgcagggttaaaactggacggtcgaccgttcatctgggctccaagaaaaatcccggagtgaacttataccagaatgtccagagcaatagcctgaggcgcgatagtagcgagtccgagattccggacatccaggcttcacctaaagccgatgcctgggacgtagatgccatcttctgcccacgcatgagcgcctcgttttcaaactcgacccgaacaagagaagtggtcaaggtcattgataaacttcttcaaactcacctcaaaagagtaccattccatgacccatacttgtacatggcaaaggctaggcgtacctcctcagtggttgactttaaaatgatggcattccccgacgtgtggggacactgcccaccgccaactacacagccaatgctcgagagaaagtgcggtgtgcagagaatccgcatattcgaggacattcggagattgatacaaccaagcgacgtcattaacaaggttgtcttctcattggacgaaccctggcccctgcaggataatgctagcaattgtctgcgattcttctctaaatttgaatccgggaacctgcggaaagcgatccaggttagagagtttgagtatgacttgctggtgaacgcagatgttaattccacccaacaccagcagtggttctattttaaggtcagcggtatgcaggccgctatcccgtatcattttaatatcataaattgcgagaagcctaatagccagtttaactacgggatgcaacccaccctgtatagtgtaaaagaggcattgctggggaagcccacatggatccggaccggacacgaaatttgttactacaaaaatcattacagacagtctactgccgtcgccggtggcgcttctggaaagtgttactatacattaacttttgctgtgacatttccccattcagaagatgtgtgttacctcgcgtatcactacccttatacttataccgcactcatgacccacctcgatatccttgagaaatccgtcaacctaaaggaagtgtatttccggcaggacgtactgtgccagacgctcgggggtaatccttgtcctcttgtgaccatcaccgctatgcccgaaagcaacagcgatgaacacctggaacagtttcggcataggccgtatcaggtaattaccgcacgggtacacccaggtgagtccaatgctagctgggtcatgaagggtactctggagtttctggtgagtagtgacccggtggccagactcctccgcgagaatttcattttcaagataattcctatgttgaatcctgacggtgtgattaacggcaatcaccgatgctctctatccggcgaagacttaaacagacagtggctttctcctagcgcccatttgcagcctactatttatcatgccaagggattgttgtaccacctgtcctctatcggaagatctcccgttgttttctgcgactttcacggccatagccagaaaaagaacgttttcctgtatggttgttccattaaggaaactctgtggcaggccgcttgcaccgttgggacatcaaccatcctagaagaggtcaactaccggaccctaccaaagatccttgacaaactggcacctgccttcacaatgagcagctgctccttcctggtggaaaagtcccgtgcttccaccgctagggtggtcgtgtggcgcgagatgggagtctccagatcttataccatggagtccagttactgcggttgtaaccaggggccataccaatgtactcagcgcctactggaacggactaagaatgagcgggctcaccctgtggacggactacagggattgcaattcggaacccgagagctcgaggagatgggggcaatgttctgcctcggactcctcatactcgagctgaagtcagctagctgttcacatcagctgttggcacaggctgcgacgctcttatccgcagaagaggatgctctggaccaacaccttcaacggttgaagtcgagtaatttcctcccaaaacatatttggttcgcataccacttcttcgcgatcacaaattttttcaaaatgaacctattacttcatgtttcaccctag

SEQ ID NO: 29302 - DNA, 153 bp, synthetic construct
  source 1..153: mol_type = other DNA; note = Synthetic coding sequence
atgatgcaaaacgtccaccttgcaccagaaaccgatgaggatgacctgtattccggctataacgattataatccaatttacgacattgaggaactggagaacgatgccgcattccaacaggccgtgcgtacttctcatggaagacggccttag

SEQ ID NO: 29303 - DNA, 1299 bp, synthetic construct
  source 1..1299: mol_type = other DNA; note = Synthetic coding sequence
atgaccgctgtgcgggctgcgggtttcacgaaggccgctctcagaggttcagcgtttgatcccctgtcacagtcgcgaggcccagcgtctcccctggaggccaagaaaaaagacagtcccgaagaaaagatcaagcagttagagaaagaggtgaacgaattggtcgaggaatcatgcatagccaactcctgtggggacctgaagttagccttagagaaagccaaggatgctggtagaaaggaaagggtccttgtgcggcaaagagagcaggtgaccactcctgagaacattaacctcgacctcacatattctgtgctgttcaatctcgcaagccaatatagtgttaatgagatgtacgcggaagcgcttaacacctaccaagtgatcgtcaagaacaaaatgttttcgaatgccggaattttaaaaatgaatatgggaaacatttatctcaaacaacgcaattactcgaaggctatcaaattttaccgcatggctctggaccaggtcccttctgtgaacaaacagatgcgcattaaaatcatgcaaaacattggggttacatttattcaggcggatagggaaaaaatgaaaaaggccttccagaaactgatcactgttccccttgaaatagacgaggacaagtacattagcccatctgacgacccccataccaacttggtcacagaagcgattaagaacgaccatctgagacagatggagcgcgaacggaaggccatggccgaaaaatacatcatgacctctgccaaactaattgccccagtcattgagacctcttttgccgcagggtatgactggtgtgtcgaggttgtgaaggcctctcagtatgtcgaactggccaacgatctggagatcaataaggccgtcacctacctgcgccagaaagattacaatcaagctgtagagattcttaaagtgctcgagaaaaaagactcacgtgtgaagagtgccgctgctacaaacttgagtgcactgtactacatgggaaaagacttcgcacaggccagtagttatgcagacattgctgtgaattccgaccggtacaatccagctgcattaacaaacaagggcaatactgtgttcgccaacggagactatgagaaggctgctgagttctacaaagaagccttgaggaatgattcgtcatgcaccgaagccctctacaacattggactgacatatgagaagctgaatagattagatgaggctctggactgcttccttaagttgcatgccatcctgaggaactccgccgaggtcctgtaccaaattgctaattag

SEQ ID NO: 29304 - DNA, 387 bp, synthetic construct
  source 1..387: mol_type = other DNA; note = Synthetic coding sequence
atggcagctgctgccgcagagcagcagcaattttacctgcttctgggaaacctcttgagtcctgacaacgtggtgcgaaaacaggcggaagcaagacaaatggctgctgttctcctacgtagactgctgtccagtgcgttcgacgaagtatatcccgctctgccttcagacgtacagacagcgattaaaagcgagctcctgatgatcatccagatggaaactcagtcctctatgcgaaagaaggtttgtgatatcgcagcggaactggcgaggaatctaatcgatgaggacggaaacaaccaatggccagaaggactgaaattcctgtttgactctgtgagttcccagaacgtggggcttagagaagccgcactgcacattttttag

SEQ ID NO: 29305 - DNA, 2766 bp, synthetic construct
  source 1..2766: mol_type = other DNA; note = Synthetic coding sequence
atgagaccagaaggagctggaatggagctaggagggggagaagagcgtctacctgaggagagcagaagagaacactggcagctgcttggcaacctgaagacgacagtcgagggcctcgtctctacaaattctccaaacgtgtggtcgaaatatggcggtctggaacggctgtgcagggatatgcaatccatcctgtatcacggcttgatccgcgaccaggcttgccggaggcagacagactattggcaattcgttaaagacatcaggtggttatccccccactctgccctccacgtggaaaagttcatatcagtgcacgagaacgaccagagttccgctgacggcgcttctgagcgcgcagtggcggagctgtggctccagcattccctgcagtaccattgcctgtctgcccagctccgccctctacttggtgacagacagtacatacgcaagttctacacggacgctgctttcctgctcagtgatgctcacgtgacggctatgctgcagtgcttagaggcggttgagcagaataacccgagattgttggcgcagattgatgcttctatgttcgcgcgaaagcatgaaagcccgctgttggttacaaaaagtcagagtctcacagctctgccttcctctacctatactccaccaaattcatacgctcagcatagctatttcggatcattctctagcctccatcagtcagttcctaataatgggtcagagcgccgaagtacttctttcccgctgagcggcccaccacgcaagccccaagagagcagggggcacgtatcaccagccgaagaccagacaatacaggccccacctgtgtcagtttccgctcttgctcgcgatagccccctgactcctaacgagatgtcatcatccactttgacgagtccaatcgaagcctcctgggtgagctcgcagaacgacagccctggcgacgcctcagaggggcctgaatacctggcgattggtaacctcgaccctagaggcagaacagcatcatgtcagtctcacagctcaaacgcagaatcctcaagttctaatctattctcctcttcttcttcacaaaagccggactctgccgcatcgagtctgggagaccaggaagggggaggagagagccagttatccagtgtgctacggagatcctcatttagcgaggggcaaactctgaccgtcacttctggggcaaaaaagtcacatataagatctcacagtgatactagcattgcaagtcgcggtgcacctgaaagctgtaatgataaggctaagctgcggggacccctgccgtactcaggccaatccagcgaggtctctactccttcctcactttacatggagtatgaaggaggcagatacctctgcagtggcgaaggcatgtttaggagacctagcgaaggacagtcgctaatcagttacctgtctgagcaggattttgggagctgcgccgatctcgaaaaagaaaacgctcatttttcaatatctgaaagcctgatcgccgctatcgagctcatgaaatgcaatatgatgtctcagtgcctcgaagaggaagaggtggaggaggaagatagcgatagggagatccaagagctcaaacagaagattcggcttcggaggcagcaaatcagaaccaagaatctgctcccaatgtatcaggaggccgagcacggctcatttagagtcacctctagtagcagccagttttcctcaagggactctgcccagttatctgacagcggatcggctgatgaagtggacgagttcgagatacaagatgggagcgagggctcaaacttaactcatattagcaagaatgggctctccgtcagtcttgccagcatgttctcggatgccgatatccggaggaacacggcctcttccagcaaaagtttcgtaagttctcagtcattttcccactgcttcctgcacagcaccagtgccgaggcggtcgccatgggtctcttgaaacaatttgagggcatgcagctgcctgccgcaagcgaactggagtggctggtgccagagcacgacgctccgcagaagttgttgccaattcctgattctctcccaatctcccccgatgatggccaacatgcggatatctataagttgcgcataagggtgcgagggaacctggagtgggccccacctcgaccccagatcatttttaacgtccaccccgctccaacccgcaaaattgcggtcgcaaaacagaactataggtgcgctgggtgcgggattagaacagatcccgactacatcaagcgcttgcggtattgcgaatacttggggaagtacttctgtcaatgctgccacgagaacgcccagatggccattccatctcgcgtgcttagaaagtgggacttctctaagtattatgtttctaatttctccaaagatctgctgattaaaatttggaatgacccactgttcaatgtgcaggacattaatagtgccctgtatagaaaggttaaattattaaatcaggtgcgtctgttacgcgtgcaactctgccacatgaaaaacatgttcaaaacttgtcgactggctaaggaactcctggacagctttgatactgtcccaggacacctgactgaagaccttcatctgtattccctcaacgatctaaccgccaccaggaagggggaattgggccctcggttagctgaactaacgcgagcaggcgctactcatgtggagagatgcatggtgagaaagtctcactgctccatgcaactttccccctgcttctag

SEQ ID NO: 29306 - DNA, 1644 bp, synthetic construct
  source 1..1644: mol_type = other DNA; note = Synthetic coding sequence
atgagagcactgactgtccagcgcgttaaattcgccatggatttgcccctgctgaagcgtgctgggcaggacctcgccgagaagaccaaaaatttcgtgtccagaagtctggtcatcggtgaggtgcttagtatggctgacatggcgaccggcgttaagtgtggaattatatactggctcttcggcggagccatccgtaacctggggagccccgaacacgtaacaaaatggttccagcctctgcaagagcagaagtacaccgggatgttcgctatgacagagcgtggccacgggagcaacgccagaggtattcagaccgaggccaccttcgatctctccgctcaggaattcgtaatcgataccccgtgtgaaaacgctgagaaaatgtatattggaaacgccatgtatggtaattacgctgccgtctttgctcagctgattatagatggtcgctcgcagggcccacattgcttcattgtccctgtgcgagacgagaacggctctttgtatcccggtgtaaccgcgattgatatgatgtataaagagggtctacacggagttgataatgggatcttgatcttcgataaagtacggatcccccgtgaaaatctactggacaagtttggctctgtcgccccagatggccagtatcacagcccaattcggaacaaaagcgcccgtttcaacgctatgctagcggcactcactccatcccgcctggccgttgcctttcaagccatgggggcaatgaagttaggtttaacaatcgccattcgctactcacacagccgaagacagtttggacccaagaccaaagaggaggttaaaatcatcgaacaccagacacaaacgttgaggctaatgccgcatctcgcgacggccctggctcttaccttcgtgagtcgttatgccggtgcactcctggatgaggacgtttttcaggggaaagagcttgtgaattcgaggagtctccaggcacttgtggctggacttaaagcgtatagtacatgggagaacattcgttgcctgcaggattgccgggagtgcaccggaggtatgggctacatgatggagaatcggatttcagggctgaagtgtgatactgatgtgttcgctaccttcgagggggacgatgttgtgatgctgcaggtggtcgggagggagttgttggctcagtacaccaaacagtacgaggagaaacccctctttggactactgcagaattgggcggaaagcgttggtgacaaactccgcacttcatttctggcttttaacatggacactgtggacgacctggcatttctcttgaaagctgtgaaattccgagaacgggtacttcagcggggactcgtggccagaatttattataaagtcaaaaccaagaaagaggacttctttcatgcctggaattcttgtcttcatcacgtggcctctctgtcacttgcacatacccaccgcgtgacgcttgaacagttcagccttgctgttaagagctgtccagatcaggaggaccagactcttcttatgaagttttgtctgctgtacggaacgaaactcgtttttcaggaacgtgcatggtaccttgagcacaaatacttgacaccaatggctagcacgcgtattcgaaaccaggagcgttgctag

SEQ ID NO: 29307 - DNA, 6086 bp, synthetic construct
  source 1..6086: mol_type = other DNA; note = Synthetic coding sequence
atggatgtgaccgtgtcagaactgcttgagctcttcctccagagtccactagtgacatgggtcaaaacttttggcccttttggctcagggagccaggacaacttaaccatgtacatggacttagtggatggcatcttcctgaaccaaattatgttacagatcgatccccgtcctacgaaccagagaatcaataaacacgtgaacaacgacgtcaacctccggatacagaatctcaccatcctggtacggaacataaaaacctactatcaggaggtcctccagcagcttatcgtgatgaacctcccgaatgttctgatgattgggagggaccccttgtctggcaagtcaatggaagagatcaagaaagtgcttctccttgttctcggatgcgccgtgcagtgtgagcgcaaggaggagtttattgaacgaattaagcagttggacattgagacacaagccggaatcgtcgctcatatccaagaggtgacacataatcaggagaatgtattcgatctccagtggttggagctccctgatgtggctcccgaggaattagaggccttgagccggtctatggttttgcatctgaggcggcttatcgatcagcgcgacgagtgcactgagctgatcgtggacttaacccaggagcgtgactatcttcaagcgcagcatccgccatccccgattaagtcctcatccgcagacagcacccccagtcctacctcaagtcttagctcggaggataagcagcaccttgccgtcgagcttgccgatacaaaagccagactccgtcgtgtcaggcaggagttggaagataagacggagcagctagtggatactcgacatgaggttgatcagctggtgctggaactgcaaaaagtgaagcaggagaacatccagttggcggctgacgcacggagcgccagagcctacagagatgagctggatagcttgagggagaaagccaacagagtggagcgacttgaactggagcttactcggtgcaaggaaaagctgcatgatgtggatttctacaaagccaggatggaagagctgagagaagataatatcattttgattgagacaaaggccatgctggaagaacagctcacggctgctcgagctcgcggagacaaagtgcatgagctggagaaagagaatctccagctgaaaagtaagttgcacgacttggaactggatagagacactgacaagaagaggatcgaggagctgttagaggaaaatatggttctggaaatcgctcagaaacagagcatgaatgagtctgcccatttaggctgggagctggagcagttatctaaaaacgccgatctctccgatgcttctaggaagtcctttgtctttgagcttaatgagtgtgcgtcctctcgtatccttaaactcgaaaaggaaaatcagtccctgcagtcaactattcagggacttagggatgcctcactggtgctcgaagagagcggcctgaagtgcggcgagctggaaaaagagaaccaccaactgagtaaaaaaatagagaagttgcaaacacaactcgagagagagaagcagtcaaatcaagaccttgaaacattatctgaggagctcatcagagagaaggaacagctccagtctgatatggagaccctgaaagccgacaaagcacggcagatcaaagatctggagcaggagaaagaccatctcaaccgcgcaatgtggtctctgagagagagaagccaggtgtccagtgaagctaggatgaaggacgtggaaaaggaaaacaaggccctgcatcagactgttacggaggccaacggaaagctgtctcagcttgaattcgaaaagcgccagctgcaccgtgacctggagcaggccaaagagaagggggaaagagcagagaagctggagagagagttgcaacgcttacaggaagaaaacggcagactcgctagaaaagtgacatctctggagaccgcaaccgaaaaagtggaagccctggaacacgaaagtcagggtctgcagttggagaatcgaactctgcgcaagtccctcgacaccctccagaacgtatcactccagctcgagggtttagagcgcgataacaagcagctggacgcagaaaatctggaactcaggaggctcgtcgagacaatgcgcttcacctcaacaaaattagcacagatggagagggaaaaccagcagttagagcgagaaaaggaggaactgcgcaagaatgtggacctgctgaaagccttgggtaaaaaatccgaaagactcgagctttcctatcagagtgtgtccgccgaaaatctgaggctccagcagtcattggagagcagttctcacaaaacccagacactggagagcgagctgggagagctggaagccgagcgccaggctctgcgcagagatctggaggccctgagactagcaaatgcccagctggagggggcagaaaaggaccgcaaggctctggagcaggaagtagcgcagttagagaaagataaaaaattgctggagaaagaggccaagaggctctggcagcaggttgagctaaaagatgcagtgctggatgactctaccgccaaactgtcggccgtagaaaaggaaagtagagccctggacaaggagctcgcgagatgcagggatgctgctggcaaattgaaagagctcgagaaagacaaccgggatctaaccaagcaagtgactgtccacgccaggaccctcaccacactgcgcgaggatttagtgctcgagaaactgaagtcccagcagctctcaagcgagttggacaagctctcccaggagctggaaaaggtcggcctgaacagagagttgttgctccaggaagacgacagtggttctgataccaagtacaagattctggaaggtaggaatgagagcgccctgaaaacgacacttgcaatgaaggaggagaaaatagtcctcctcgaagcccagatggaagagaaagcttctctgaatcgccagctagaatcagagctacagatgctcaaaaaggagtgcgagaccttgcgccagaatcagggtgagggtcagcatctgcagaacagtttcaagcaccctgctggcaaaacggccgcaagccaccagggcaaggaggcctggggccctgggcataaggaagctaccatggagctcctgcgggtgaaagatagagctattgagcttgaacgtaataatgctgccctgcaagccgaaaagcaactgctcaaggaacagctgcagcacctggagacgcaaaacgtgactttttcttctcagattctcactctgcagaaacagtcagcattcctgcaggaacacaacacaaccctgcagacgcagaccgctaagctgcaagtagagaacagcaccctgagcagccagagtgctgctttgacagcccaatataccttgttgcagaatcaccacaccgccaaggagacagaaaatgagagcttgcagcgccaacaggagcaactgactgccgcttacgaggccctgttgcaagaccatgagcaccttgggacccttcatgagaggcaatctgcggagtatgaggcgctaatccgtcaacatagttgtctgaaaactctgcataggaacctcgagctagagcacaaggaattgggcgagcgccacggtgacatgttgaagcgcaaggccgagctggaagagagggagaaagtgctgacgacagagcgggaggccctgcaacaagagcaacgtactaatgcgcttgccatgggagagaaccaacgcctcaggggggaactcgaccgcgtgaacttcctgcaccaccagctcaaaggtgagtatgaggagttgcacgcccacactaaggagctcaaaacttcattgaataatgctcaactggagctgaataggtggcaggccaggttcgatgagctgaaggagcagcaccagaccatggatatttctctgacgaagttagacaaccactgtgagctgctgagtcggctgaaagggaacttggaggaggaaaatcatcacctgttaagtcagattcagctattatcccagcagaaccagatgctgctagaacagaacatggaaaacaaggaacagtaccatgaagagcagaagcagtatatcgacaagctgaacgccctgcgacgacataaagaaaaactggaagagaagataatggatcaatacaagttttatgaccccccacccaaaaagaaaaatcattggatcggtgcaaaagcccttgtcaaactcattaagcccaagaaggaagggtcgagagaaagattaaagagtactgtggacagccccccatggcagttggagagttctgaccccgcaagcccagctgcctctcagccactccggtctcaggctgaaaaccccgacaccccggctctggggtcaaattgcgctgaagaacgcgatgctcataacggcagcgtcgggaaagggcctggagatctcaaacctaaacgtggtagtccgcatcggggttctctggatcgtaccgatgctagcacagacctcgcaatgagatcctggcctagtgagctgggctcgaggacctgttccacgagcgccacaactacggccccttcgaattctactcctattgctcggcatccgggaaggacaaaaggttacaacagtgatgataacctgtgcgaaccatctctggagttcgaggttcctaatcatcggcagtatgtgtcacgcccaagcagcctggagagctccagaaatacttcctccaatagctctccgcttaacctgaaaggctcttccgagcagctgcatggccgttccgagagttttagcagcgaggacctgatcccatctcgtgatcttgctacacttccaagggaggcctccacacccggacgcaacgcactgggacgacacgaataccctctgccacgaaatggaccgctgccacaggaaggcgctcaaaaacgcggaacagctccaccctacgtgggcgtgcgcccatgtagcgcatccccatcgagtgaaatggtgaccctagaggaattcctggaggagagcaacaggagcagtcccacacacgatacgccctcttgtcgggatgatctgctgagtgactatttcagaaaagcgagtgacccgccagcaattgggggacagcctggaccgccagctaaaaaggaaggcgctaaaatgcccaccaactttgtggcccctacggtgaagatggcggcaccaacctcagaggggaggccactcaagcctggacagtacgtgaagccgaatttccggcttacggaggcggaggcgcctccctcagtcgctccacggcaggctcagcctccccagagcctgagtctgggacggccacggcaggcacctgtacccccagcctcacacgcccctgcaagcagaagtgcctccctgagccgagccttctcattggcctctgcagacctacttcgggcatcaggccctgaggcctgtaaacaggaaagcccgcagaagttgggcgctccggaggcactgggcggtcgtgagactggatcccacactctccagtcccccgctcccccaagcagtcactcactggccagagagcggacaccccttgtcggcaaggcaggctccagctgtcagggtcccggtccccgaagccgacccctggatactcgacggtttagtctcgctccaccaaaggaggaacgactggctcccctgcaccaaagcgctaccgctccagccatcgctactgccggagccggagctgctgctgcaggcagtggttccaatagccagctcctccacttttccccggcagccgctcctgcagcccgtacaaaacccaaggcaccacccaggtcaggggaagtcgccacaattacccctgtccgggctggtctgagcctgtccgagggcgatggcgttccaggccagggatgttccgaaggcctgcctgccaaatcacctggcagaagtcccgatctggctccgcatttgggtcgggcactggaagactgctctcgtgggtcggtctctaaatcatccccagcgtccccagagccgggaggagatccccagactgtctggtacgagtatggctgcgtgta

SEQ ID NO: 29308 - DNA, 3831 bp, synthetic construct
  source 1..3831: mol_type = other DNA; note = Synthetic coding sequence
atggacgaggtggaacaggaccaacacgaagccaggctgaaagagctgtttgactcttttgatacaaccggcacagggagccttggccaagaggagctcacagacttgtgccacatgttgtcacttgaagaagttgctcctgtacttcaacagacactgcttcaggataatctcctgggacgcgttcatttcgatcagtttaaggaggctctgattctcattctgtcgcgcacccttagtaatgaagagcattttcaagagcccgattgttcactcgaggcacagcccaagtatgtccgaggcggtaagcgatacggcagacgtagtctgccggaatttcaggagtccgtcgaggagtttccagaggtgaccgtaatcgagcctttggacgaagaggcaagaccaagccacatccccgcaggggattgttccgagcactggaagacccaacgtagtgaggaatacgaggccgaaggccagctccgcttttggaatcctgatgacctgaatgctagccagagcggctccagccccccacaggattggatcgaggagaagctgcaagaggtgtgcgaggatctgggaataacaagggacgggcatcttaataggaagaaattggtcagcatttgtgagcaatacggccttcaaaacgtggatggtgagatgctcgaggaggtcttccacaacctggacccagacggcaccatgtcggtcgaggattttttctacggactttttaaaaatggtaaatctctgactccttcggcatcgactccttataggcagctcaagaggcacctcagcatgcagtcattcgatgaatcagggaggaggacgaccacctcttccgctatgacttccacaattgggttcagggtgttttcctgccttgatgatggcatgggccatgcaagcgtagagcgcattctggatacttggcaggaagaaggcattgagaatagccaggagatactgaaggcgcttgacttctcccttgacggaaacattaatttgacagaactgactcttgccttagagaatgaactgctggtaactaagaatagtattcaccaggcagccctcgccagtttcaaggcagagatccgtcaccttcttgagcgagttgaccaggtcgtgcgagaaaaggagaagctgcgatctgacttggacaaggccgaaaagctcaagtccctaatggctagtgaagtggatgaccaccacgccgcaattgaacgacgcaatgagtacaacctacgaaagctggacgaagaatataaggagagaattgctgctctgaaaaacgaactacgcaaagaaagggaacagatattgcagcaagcagggaagcagcgcctggagttggagcaggaaatcgagaaggcaaaaaccgaggagaactacatcagagaccgcttggcgctgagcttaaaggagaattccagactggagaatgaactgttggaaaatgccgagaagctggccgaatacgaaaatttaactaacaagcttcagcgcaacctcgaaaatgtgctggccgagaagtttggcgatttggatccatcttctgccgagttttttctgcaagaggaaaggctgacgcaaatgaggaacgagtatgagagacagtgcagggtgttgcaggaccaggtcgacgaactacagtcagagcttgaggaatacagagcgcaggggagagtcctccgactcccactcaaaaatagtcctagtgaagaggtggaggcaaactcaggcggaattgagcccgagcatggcctgggatctgaggagtgcaatcccctcaatatgagcattgaggctgagctcgtgatagaacagatgaaagagcaacatcatcgtgacatctgttgcttgagattggaactcgaagataaagtacgccactatgagaagcagctcgatgagactgtcgtgagttgcaagaaggctcaggaaaacatgaagcagcgacatgagaatgagacacatactctggaaaaacaaatttccgatttaaagaatgaaattgcagagttgcaggggcaagctgcagttctgaaagaggctcaccatgaagccacctgccgacacgaggaagagaagaagcagttgcaggtgaagctggaggaagaaaaaacacatctgcaggagaaattgagactgcaacatgagatggaactcaaagcacgactcacacaagcacaggcatcgttcgaacgcgaaagagaaggcttgcagtcctctgcttggactgaggaaaaagtgagagggctgacacaggagttagaacaattccaccaggaacagctgaccagcttggtggagaaacacactctcgaaaaagaagaactgcgcaaagagctgctggagaaacaccagcgagaactgcaggaaggacggtacgagtctgaaaagctccagcaggagaacagcattctgcgaaatgagataaccacacttaatgaggaagatagcatttccaatttaaaactcggcaccttaaacggttcacaggaagaaatgtggcagaaaactgagacagtgaagcaggaaaacgccgctgtgcaaaaaatggtagagaacctgaaaaagcaaatctcagaactcaagattaaaaatcagcagttggatctagagaacacggaactgagtcagaaaaactcccagaatcaagaaaaactacaggaattgaaccagcggttgaccgaaatgttatgtcaaaaggagaaagagccagggaacagtgccctggaagagagggaacaggaaaagtttaacttgaaggaggaacttgaacgatgtaaagttcagagcagcaccctggtgagctctctcgaggccgagctctccgaggtgaagatccagacacatatcgttcaacaggagaaccacttgctaaaagacgagctcgaaaaaatgaagcaactccaccggtgtccagacctgtctgatttccagcagaaaatctcatccgtgttatcctacaacgagaagctattgaaggagaaggaagcactgtcagaggagttaaactcttgtgtggacaagcttgctaaaagtagtttgttggagcaccgaatcgcgacaatgaagcaggagcagaaatcatgggaacaccaatcggcctcccttaagtctcaattggtcgctagccaggagaaagtccagaatttggaagacaccgtgcagaacgtgaatctgcagatgagcagaatgaaatcggatctacgcgtgacacagcaagagaaggaagcgctgaagcaggaagtgatgtcactgcataagcaactgcagaacgctggcggaaagagttgggcaccggaaatcgccacccatcccagcgggctccacaatcagcaaaagcgactgtcctgggacaagctcgaccacctcatgaatgaggagcagcagctgctgtggcaggagaacgagcgtcttcagaccatggtgcagaatactaaggctgagttaactcactcgcgggagaaggtgcgtcagcttgaatctaatctgttaccaaagcatcagaaacatctcaatcctagtggcacaatgaatcctacggaacaggagaaactgtcactgaagagagagtgcgaccagtttcagaaagagcagtcccccgctaatcgaaaggttagtcagatgaattctctcgagcaggaattggaaacaatccacctggaaaacgaagggcttaaaaaaaagcaggtaaagctcgatgaacagctgatggaaaattctgtcgtgggttcatccagggaagggtgcagcagcctccccgagatcgtgtgtgaagatgctgccccagaggtgcactgcgatgcttag

SEQ ID NO: 29309 - DNA, 2997 bp, synthetic construct
  source 1..2997: mol_type = other DNA; note = Synthetic coding sequence
atgaaggactccggggattccaaggatcagcagctcatggtcgcgctcagggtaagaccaattagtgtcgccgagctggaagagggtgctaccctgattgcccataaggtggatgagcagatggttgtgctcatggatccgatggaagaccctgatgacatcctgcgcgctcacaggagccgagaaaagtcttacctttttgatgtggcttttgactttaccgcaacacaggagatggtctaccaagccaccaccaagtctctcatagagggcgtgattagcggatacaatgctactgtttttgcgtacggtccaactgggtgtggcaaaacatataccatgctcggcaccgatcaggagcccggaatctatgtccagactctcaatgacttattccgtgctatcgaagaaacgtccaacgacatggaatatgaggtttcaatgagttacctggagatctataatgaaatgatccgggacctcctaaatccatccctgggatacctcgagctgcgggaagactccaaaggcgtgatccaggtcgccggaataaccgaagtttccaccattaatgcgaaggaaattatgcaactcctcatgaagggaaatcgccagcggactcaagagccaactgccgcaaaccagacctcttcgaggagccatgccgtattgcaggtaacagtgcggcagaggtctcgcgttaaaaacatattgcaggaagtccgacaagggagactgttcatgatcgacctggcaggctcagagcgtgctagtcaaacgcagaataggggacaacggatgaaggaaggggctcacataaatagatcccttctagccctggggaactgcataaatgctctgtccgataaagggagcaataagtacataaattatagagattccaaactcactcgcctgctcaaggactcactcggaggcaactcacgcactgtgatgattgcccatatctccccagcctcgagcgcattcgaggaaagtcgcaacacgctgacttatgccggaagggccaaaaacattaagaccagagtcaagcagaacctgctaaatgtgagctatcatattgcacagtacactagcattatcgctgacctgagaggagaaattcagcgacttaagcgcaaaattgacgaacaaactgggaggggccaggcaagaggccgtcaggacagaggcgacatcaggcacatccaggcggaggtgcaattgcacagcggccagggggagaaagccggtatgggacagctgagagagcaactggcctccgcctttcaagaacaaatggatgttcgcagacggctcttggagctggagaacagggccatggaagtccagatcgacaccagtcggcacctactgacgatcgcaggatggaagcacgaaaagtccaggagagccttgaaatggcgcgaggagcagcggaaggaatgctatgcaaaagatgactccgaaaaagattccgacactggggacgaccagcccgacatcttggaacctcctgaagtggccgcagccagggagtctatcgcagccctcgttgatgagcagaagcaactgcgcaaacagaagctggcgctggaacagagatgtcgcgaactccgcgctagggggaggcggctggaagagacgctccctagacggattggatctgaggagcaacgggaggtgctctctttgttatgtagggttcacgagctggaggtggaaaataccgagatgcagagccacgcccttctgcgagacggagcccttcgtcaccgccatgaggcggttaggcgccttgaacagcacaggtcgctgtgcgacgagattatccaaggccagcgacagattattgatgactacaacctcgccgttccccagcgcttagaagaactgtacgaggtctacctgcgtgagctggaggagggttcgctggaacaggccacaatcatggatcaggtagcttccagagccctccaagactcgagtctccccaagatcacgcccgcaggcactagcctcaccccagattctgacttggagagcgtaaagacattaagtagcgacgcgcagcacctgcagaattcagcccttcctcctctgagtaccgagtccgagggccatcacgtatttaaggctggtactggcgcatggcaggccaaatcttcttccgtgcctactcccccacccatacaactggggtcacttgtaacccaggaggcacctgcccaggactctttgggctcatggatcaattcgagtcccgacagttccgaaaacctaagcgagatacctctgagtcataaagaacgcaaagagattttgaccggaacaaagtgcatatgggtgaaggctgctcggaggcggtcacgcgctctgggaacagaaggacgccatctgttggcacccgcaactgaaaggtcctcactgagcctgcacagcttatctgagggggatgatgccagaccgccaggccctttggcgtgcaaaaggcccccatcgcccactttgcagcatgcagcttcagaagacaacctctcttctagcactggggaggcccctagtcgagccgtcggacaccacggggacggcccaagaccttggctgcggggtcagaaaaaatctctaggcaaaaaacgcgaggagtcactcgaggctaagagacgaaagcgtcgctctcgctcttttgaggtgaccggacagggcctcagtcatcccaagacccacctgctgggcccacatcaggccgagcgcatatccgaccaccgtatgcctgtatgccggcaccccgcacctggaatacgccacttgggtaaagtgacgctccccctagccaaagtgaaacttcccccaagtcagaacaccgggcctggagatagtagccccctggctgtgcctccgaacccagggggtggctcacgcagagccaccaggggacctcgactgcctcatggcacctccacgcacggcaaagacgggtgctcccgtcacaactag

SEQ ID NO: 29310 - DNA, 1194 bp, synthetic construct
  source 1..1194: mol_type = other DNA; note = Synthetic coding sequence
atgacggctgaagagggggtgcagctatcccaacagaatgccaaagacttcttccgtgtgttgaatcttaataaaaaatgcgacacgagtaagcacaaagtcttggtggtctcagtgtgcccccagagtcttccatactttgccgctaagtttaacctcagcgtgaccgatgcttcccgcagactctgtggtttcctaaagtcactcggagtgcactatgtttttgacacaaccatcgccgcagatttcagcatcttagagagtcagaaggagttcgtgagaaggtataggcagcacagtgaggaggaaaggacgctcccaatgcttaccagtgcgtgtccgggatgggtcaggtatgccgaacgcgtcctgggacgcccaattaccgcccatttgtgcacggcaaagagtccccagcaggtgatgggcagtctggtgaaagattatttcgcaaggcagcagaacctatccccagagaagatcttccatgtcatcgtggctccatgctacgacaagaaactggaggctttgcaggaaagtttaccacccgctttgcatggttctcgaggagccgactgcgtgctgaccagcggtgagatcgctcagatcatggaacagggcgacctcagcgtgcgcgatgccgcagttgataccctgttcggggatcttaaggaagataaagtgaccaggcatgatggagcctcaagtgacgggcacctggctcatatcttccgtcacgccgctaaagagctattcaatgaagacgtagaagaagtgacctatcgcgctttaagaaataaagacttccaagaagttactttggagaaaaatggagaggtggttctaaggtttgcagctgcctacggtttccggaacatccagaacatgatactaaagctgaaaaaaggcaagtttccatttcattttgtggaagtgctggcgtgcgccggaggatgcctgaacggcagggggcaggcccagactcccgatgggcatgctgacaaggctttactaagacagatggaagggatttacgccgacatccctgttagacgcccagaatcgtccgcccatgtacaagagctgtaccaggagtggcttgagggcataaatagccccaaggcgagagaggtgcttcatactacctaccaatctcaggaacgcggtactcacagtttggacatcaaatggtag

SEQ ID NO: 29311 - DNA, 3603 bp, synthetic construct
  source 1..3603: mol_type = other DNA; note = Synthetic coding sequence
atgaaagttgcaggtgggctggagttgggcgcagccgctcttctgtctgcctcaccacgggcactggtgactctttctactggacctacctgctcaatcctgccaaaaaatcctctattccctcagaatttgagctcacagccgtgcatcaaaatggagggggacaagtctttgacattcagcagctatgggctgcagtggtgtttatatgaattagacaaagaagagttccaaacatttaaagagcttttgaagaagaagagttccgagtccacaacgtgttcaatcccacaattcgaaattgaaaatgctaacgtggagtgcctggctctgttgctgcatgaatactatggtgcaagccttgcttgggccacaagtattagcatatttgagaacatgaacctaagaaccttgagtgaaaaagcgagggatgatatgaagcggcattctccggaggaccccgaagccacgatgacggatcaaggaccctctaaagagaaagtgccaggaatatcacaggcagttcagcaagacagcgcaaccgcggctgaaacgaaagagcaggaaatttcgcaggccatggaacaggaaggagccaccgctgccgagacggaagaacaagagatttcacaggctatggaacaggaaggcgctactgcagcagagacagaggaacagggacacggaggggacacatgggactacaagagccacgtgatgacgaaattcgcagaagaagaagacgtgcggcgttcttttgagaacacagccgctgactggcctgagatgcagaccctggccggagcattcgactcagatcgatggggcttccggcctcggaccgtggtcctacacggcaagagcgggatagggaaatccgccctggcccgtagaattgtcctctgctgggctcaagggggtctctatcaggggatgtttagctatgtattctttctgcctgtgcgagagatgcaaaggaaaaaagaaagcagcgtcacagaatttatttcccgtgagtggcccgacagccaagctcctgtcacagaaatcatgagtcggccagaacgcctgcttttcatcattgatggatttgatgacctcgggtcagttttgaataacgacactaagttatgtaaagactgggccgagaagcaacccccattcacgctgattcgaagcttgctgcgaaaagtgctgctgcccgaatcatttttgattgtaactgtcagggatgtgggcaccgaaaaactgaagagtgaggtcgtttctcctagataccttctcgtgcggggaatatccggggaacagagaatccaccttcttcttgagcggggaattggtgaacatcaaaaaacccagggtttgcgtgcaattatgaataatcgcgaactcctcgaccagtgccaagtaccggctgtgggatccctaatctgcgtggccctgcagctccaggatgtcgtcggcgagagcgttgctccatttaaccagaccctgactggcctgcatgcggcattcgtcttccatcagctaactcccaggggagtggtacgtagatgcctcaacctcgaggaacgcgtagttcttaagaggttttgccggatggcagtagaaggcgtgtggaatagaaagtcagtattcgacggagacgacctgatggttcaggggctcggcgaatcagagttgagggccctgttccacatgaacattcttctacccgactcccattgcgaagaatattacactttttttcatttgtctcttcaagatttctgtgcagctctgtactacgtcttagagggccttgaaattgaaccagccctgtgccctctatacgtggagaaaacaaaacgtagtatggagttgaaacaggctggctttcatatacactctctctggatgaagcgctttcttttcggcctggtgagtgaagatgtccgcaggcccctcgaggtgctgctgggatgtccagtgcctctcggcgtcaaacagaagttattgcactgggtgagcctgctgggtcagcagccgaatgcaactacccccggagatacacttgatgcatttcactgcctttttgaaacacaagacaaggagttcgtgcggcttgccctgaactcctttcaggaggtctggttaccgattaaccagaacctggacctcatcgcctccagcttctgtctgcaacactgcccttacctgcggaagattagggttgacgttaagggcattttccctcgggacgagtccgccgaggcgtgccccgtcgtaccgttgtggatgcgggataagactctcattgaggaacagtgggaggatttttgcagcatgctcggaacccacccacacctacggcagcttgacttaggctcctcgatactgaccgagagagctatgaagaccctgtgtgcgaagctgcgccatcccacatgtaagatacagactctgatgtttcgaaacgctcaaatcaccccaggagtgcagcatctgtggagaatcgtgatggccaaccgcaatctccggtcactgaacctcggcggtacacatctcaaagaagaggacgttaggatggcttgtgaggccctgaagcaccccaagtgcctccttgagtccttgagactggattgctgcgggctgactcatgcatgttatcttaaaatctcacagatcctgaccacttctcctagtctcaaaagcctatcactcgccggtaacaaggtgacagaccagggtgtcatgcctctgagcgatgcgctgagggtttcccaatgcgccctgcagaaactgatcctcgaagattgcgggatcactgcaactggatgtcagagcctggcaagcgcactggttagcaataggtcactgacccatctgtgtctttccaataatagtctgggtaacgagggcgtgaatctgctctgtcgtagtatgcgcctgccccactgttccctccagaggctgatgctgaatcagtgccaccttgacacagcagggtgcgggtttctggcactggcacttatggggaacagttggcttacccatttgagtctgagtatgaacccagtggaggacaacggcgttaaactcctgtgtgaagtgatgcgagagccttcttgtcacttacaggatctggaattagtgaaatgtcaccttacagccgcttgttgtgagagtctgtcttgtgtcatcagtagatcacgccacctcaagagcctggacctgactgacaatgccctcggagatggaggggtggctgcgctgtgcgagggactgaagcagaagaactccgtactggctcggctgggcttgaaggcttgcggcctcacatcagattgttgcgaggcgctgagtctcgccctgagctgtaatcgtcatttaacgagccttaatctggtgcagaataacttttccccgaagggaatgatgaagctgtgcagtgcgttcgcctgcccaaccagtaacctgcagatcattggactttggaagtggcagtaccccgtgcagatccgtaaactcctcgaagaggtccaactgttaaagccgagggtggttattgacggatcatggcactcattcgacgaagacgaccggtactggtggaagaactag

SEQ ID NO: 29312 - DNA, 2787 bp, synthetic construct
  source 1..2787: mol_type = other DNA; note = Synthetic coding sequence
atgaatgaagcaatggcaactgactccccgcgacggccaagccggtgcacgggaggggtagtagtcaggccccaggcagtaacggagcaatcttacatggagagtgtcgtcacatttttgcaggatgtcgtccctcaagcgtattcggggacacctctcactgaggaaaaagaaaaaattgtatgggtgcggttcgagaacgccgatctgaacgacacctctagaaacctggagtttcacgaaatacatagcacaggtaacgaacctcctctgctgattatgattggatactctgatggaatgcaagtgtggtctatacccatcagtggcgaggcgcaagagctattttcggtgcgacatgggccaatcagggcagcccgaatcctgcccgctccccaatttggcgcacaaaagtgtgacaatttcgctgaaaagcggcctcttttaggcgtttgcaagtctataggttcctccgggaccagtcccccttattgctgtgttgacctctatagcttgagaacaggcgaaatggttaaaagcatccagttcaaaacccccatttatgacctgcactgtaacaaaagaatcttggtcgtggtcttgcaggagaagattgctgcttttgacagttgtacctttaccaaaaagttcttcgtgactagctgctatccgtgccctggccctaatatgaatcctattgccttaggctcacggtggctagcctacgctgaaaacaagctgattaggtgtcatcaaagtagaggaggcgcatgcggggacaacattcagtcttacacagctactgtcattagcgccgctaaaactctgaagtccggcctgactatggtgggaaaggtagttactcagttaactggaacgctccccagcggcgtcaccgaggacgacgtcgccatccactctaacagccgtaggtcgcctttggtgccgggtattattaccgtcatcgacacagagaccgtcggagaaggtcaggtgttagtcagcgaagactcggacagtgatgggatcgttgctcacttccctgcccacgaaaagcccgtctgttgtatggccttcaataccagcggaatgctgcttgtgaccaccgatacgctgggacacgattttcacgtgttccagattcttactcacccttggtcgtcctctcagtgtgcagtgcatcacctctatacactacatagaggagagactgaagcaaaggtccaggatatttgcttttcgcatgactgccgctgggtggtcgtctcaaccctccggggtactagccatgtgtttccgataaatccctatggagggcagccatgcgtcaggacacatatgtctccccgagtggtcaatcggatgtcacgtttccagaagagcgccggtcttgaggagattgaacaggagctgacatccaaacaaggtgggcgttgctctcccgtcccgggtctgagttcatcaccaagtggctcccccttacacggcaagctcaattcccaagattcctataataacttcacaaataataaccctggcaatcctcgcctgtcccccctgcctagcctcatggtggtgatgccattggctcaaattaagcagcccatgacacttgggactattactaagagaacaggaccataccttttcggggctggatgcttctcaatcaaagcaccttgcaaagttaagccccctcctcaaataagtccatctaaatctatggggggtgagttctgtgtcgcggcaatcttcggcacatccagaagctggttcgcaaacaacgcgggactgaaacgcgagaaggaccagtctaaacaggtggtcgtggagtctctgtatattatctcctgctatggcacactcgtagagcatatgatggaacctcgaccccttagtaccgcaccaaaaatctcagatgatacaccccttgaaatgatgaccagtcctcgggcttcctggactctcgtgcggaccccacagtggaatgaattgcagcccccattcaacgcaaatcaccctctgttgctggccgctgacgcagtgcagtattaccaatttctcctggcaggcctcgtgccgccagggtcccctgggcctatcactcggcatggtagttatgactctctggcatccgaccatagcggccaggaagacgaagaatggctgtcacaggttgaaatcgtgacgcatacaggtcctcaccggcgactctggatgggacctcaatttcagttcaaaaccatccacccatccggacaaacaaccgtgattagctcttcctcatcagtgctgcagtctcacggcccttcagatacccctcagccactcctggactttgataccgacgacctcgatctgaatagcctgcgaatccagccagtgaggtcagatcctgtttctatgcccggttctagtcgacccgtgagtgaccgaagaggagtaagcacagtgatagacgctgcgtccggtacatttgatcgatcggtgacattgctggaggtgtgcggaagttggcctgagggtttcggtcttcggcacatgagctccatggaacacacagaagaagggctcagagaacgcctggcagatgcaatggccgaaagcccatcacgagacgtggtgggctctgggaccgaattgcagcgggaaggcagtatcgaaaccctgtccaacagcagtggatctaccagcggcagcatccctcgcaacttcgatggttacaggagccctctcccaacaaatgagtcccagcctttgtctctgttcccgacaggattcccttag

SEQ ID NO: 29313 - DNA, 501 bp, synthetic construct
  source 1..501: mol_type = other DNA; note = Synthetic coding sequence
atggttaacagctgttgcggcagtgtttgctcagaccaaggctgcggattagagaactgctgcagaccaagctactgccaaaccacttgctgtcggacaacctgctgccgacccagttgctgcgtgagcagctgctgcagaccgcaatgttgtcagactacttgctgccgcacaacgtgctgccatccatcctgttgtgtttcaagctgctgtcggccacaatgttgccagagcgtgtgctgccagcctacctgctgccggcctcagtgttgtcagaccacatgttgtcgcactacgtgctgcagaccttcatgctgtcgaccgcagtgctgtcagtcagtttgctgtcagccaacctgttgttgcccgagttactgcgttagcagctgctgcagaccacaatgttgccaaactacatgctgtcggactacgtgctgtagaccaagctgttgtgtgagccggtgttatagaccgcactgtggccagtctctgtgttgctag

SEQ ID NO: 29314 - DNA, 1104 bp, synthetic construct
  source 1..1104: mol_type = other DNA; note = Synthetic coding sequence
atggatgacgctgcagtgttgaagcgaagagggtatctcctcggcatcaatctgggagaaggctcctatgcgaaagtcaaatccgcctacagcgagcgacttaagttcaatgtcgccatcaagatcattgaccggaagaaggcaccagcggattttcttgaaaaattcttaccgagagagatagaaatcttggcgatgcttaatcactgctccattatcaagacctacgagatctttgagacaagccacggcaaggtatatattgtgatggagctcgctgtacaaggggatctcctggagttgatcaagacccgcggtgccctacatgaggacgaagccagaaaaaagtttcaccaactgagccttgcgataaagtattgccatgaccttgatgttgtacaccgagacctaaagtgtgacaatttgttgctggataaagatttcaacattaagctctcggatttcagcttttccaagagatgtttgagagacgactctggtcgtatggccctaagtaagacattctgtggatctccagcctatgcggcaccagaagtactccaggggattccctaccaaccaaaagtttatgatatttggtcgctaggcgtcattctgtacatcatggtgtgtgggtcgatgccctacgatgattctaatattaagaaaatgctgagaatccagaaggagcacagggtgaacttcccacgatctaaacatctgactggggaatgtaaagatctcatttaccacatgctccagccagatgtgaaccggagactccacatagatgaaattctatcgcattgttggatgcagcctaaggccagaggatctccctctgtcgcgattaataaggagggtgagagtagtaggggcacagaaccactgtggacccctgagcctggctctgacaaaaaatctgctactaaattggagccagagggggaggctcaaccgcaggcccagccagagacaaagcccgagggtaccgccatgcagatgtcccgccagagtgagatcctggggttcccatcaaagccttctaccatggagacagaggaggggccaccccagcagccccctgaaactagggcgcagtag

SEQ ID NO: 29315 - DNA, 273 bp, synthetic construct
  source 1..273: mol_type = other DNA; note = Synthetic coding sequence
atgagccactatggaagttattacggtggcctcgggtatagctgcggtggctttggcggtcttggatacggatacggctgcggctgtgggtccttttgtcggaggggtagtgggtgcggttatggcggatacggatatggttccgggttcggcagctacggatatggaagcgggttcggaggttacggttatggttcaggattcgggggatacgggtatggctgctgtcgcccttcctataatgggggatacggtttctccggcttttactag

SEQ ID NO: 29316 - DNA, 519 bp, synthetic construct
  source 1..519: mol_type = other DNA; note = Synthetic coding sequence
atgagctataactgttgcagcagaaacttttctagctgctcacatgggggttacctccactatccagggtcgagttgcggatcaagctacccttccaaccttgtttatagcacagatctgtgcagtcctagtacatgtcagctcggaagtagcctgtaccggggatgccaagaaacatgctggcgtccaaattcttgtcagacactctgtgtggagtctagtccctgtcacacaagttgttattacccgaggacgcatatgttgtgcaatagttgtctgacaatgcacgtcggctcccggggatttggctccaatagttgttgtagtttgagttgcggttctcgctcttgtagctcattaggatgtgggagcaatggttttaggtacctaaactaccgtatccacactagtccctctcaatcatacaggtcacggttctgccatcctatctatttcccaccacgacgatggttccatagcagctgttaccagcccttctgcaggagcggattctattag

SEQ ID NO: 29317 - DNA, 1554 bp, synthetic construct
  source 1..1554: mol_type = other DNA; note = Synthetic coding sequence
atgtccgggagttgtagcagccgcaagtgcttttccgtgcccgcaacaagcctgtgctccacggaagtgtcatgcggaggacctatctgcctgccttcttcctgccagagtcaaacatggcagctcgttacctgtcaggacagctgcgggtcttctagttgtggcccacaatgccggcagccttcatgcccggtctcaagttgcgctcagcccctgtgttgtgaccctgtcatctgtgagcccagctgttcagtttcaagcgggtgtcaaccagtctgttgtgaggctacaacatgcgagccaagctgctccgtgtccaattgttatcagccagtgtgtttcgaggctacgatttgcgaaccaagttgttcggtgtccaattgttgccagcctgtgtgttttgaagccactgtatgtgaaccttcctgcagtgtcagttcctgcgcccagcccgtgtgctgcgagcccgcaatttgcgaaccatcttgttccgtcagctcatgctgtcagccggttggcagcgaagctacatcatgccaacctgtcctctgcgtgccaaccagctgtcaaccagtgctgtgcaagtcttcttgttgccaacccgtggtgtgcgaaccgagttgctgcagtgccgtgtgcaccctgccgtccagttgccaacctgtggtctgtgaaccttcttgctgtcaaccagtttgtcctactccaacttgcagcgtgacgtccagttgccaggctgtgtgctgcgacccaagtccatgcgagccatcctgcagcgagtcttccatatgccagcccgcaacctgtgtcgccttggtttgtgaacccgtgtgtcttcggccagtctgctgtgtgcagtcctcatgcgagcctccgagcgtcccatccacctgccaggaaccctcttgttgtgtgagctccatttgccaacccatttgctctgaaccctccccttgcagtcctgctgtttgtgtgagttctccatgtcagcctacttgctatgtggtcaagagatgccccagtgtgtgcccagagcctgtctcttgcccatcaacaagttgccggccactcagctgctctcctgggtcaagcgcctctgctatatgcagacctacatgcccacgtacattctacataccgagcagttcaaagcgaccttgtagcgcgacaatttcctatcggcctgtttcacggccaatttgcaggccaatttgttccggactgctcacataccggcagccctatatgacttccatcagttatcggcctgcctgctatcgtccttgttacagcattttgaggcggcctgcatgtgtgacttcctattcttgccggcctgtatattttcgcccaagctgtactgaaagtgactcatgtaagcgggactgcaagaagagtaccagcagccagctggattgtgtggacaccacgccatgtaaagtggacgtgtcagaggaggcaccctgccaacctactgaagccaagcccatcagcccgactacccgcgaggccgctgccgcacagcccgctgcttcaaagccagccaactgctag

SEQ ID NO: 29318 - DNA, 1026 bp, synthetic construct
  source 1..1026: mol_type = other DNA; note = Synthetic coding sequence
atggccgacggttgttgtccaggaaatacaacagctatccccgctgttcccacaatcactacctatcccgtcaaaggaggattcaggcacgcactgtgcttgccgagcagctgccactccagaatgtggcagctcgtgacatgccaggaatcctgccagccctcgattggcgcaccaagcgggtgcgaccctgctagctgtcagcctaccagactgccagccacgagttgcgtgggtttcgtgtgccaaccaatgtgctctcacgccgcatgctaccagtcaggcactgggcagtctccgtgcttggtgtcttcatgccagccatcctgcagtgaaagtacgtgctgtcaggagaaatgctgtgatgccagtccatgtcagcagtccagttgccaggaatcagtctgcatgtcaggctcctgtcaagctgcctgcggccagtcagtgtgctgcgacgcaggctcctgtcagcctagctgtagtgaggtaacatcttgcccagaaacatcgtgcctgccaaccatctgcaccgcttcaccatgtcaacctacttggtgtcagggaagctcttgtcaacccgtgtctggcgaggggcagccgtgcaaaagtacctattaccagcctatctgctatattttcaagccctgtcagtcagccctctacatgccagtgccatgtcagccctctacctgcgtttttagcagttgtaacaccacatgctgcgtcccttcgcattgccagccccctcactgtcagcttgtcccttcaacgtgtttcatttaccaacccgtggctaactgccaggcaccctgttctactaagaattgttgtaaacccgcatcttgcgataccgtcatctctggccagcctacctgcgatggaccaccatcctataatcagagtgggtgcaaatccgcctgctgcgttacaggactcggaacaagcccgtcttctggtagtaactgtcttccaacctcctgccagccttcctgcgaaagttccttttgcaaagctactctctgctag

SEQ ID NO: 29319 - DNA, 588 bp, synthetic construct
  source 1..588: mol_type = other DNA; note = Synthetic coding sequence
atggtgtctagttgctgtggttctgtctgtagcgatcagtcttgtggtcagggtctgggccaggagagttgctgcagaccaagttgttgccaaaccacatgctgtcggacgacctgctgtcgaccaagctgttgcattagttcgtgctgtcgccctagctgttgcatctccagttgctgtaaaccatcatgctgtagaactacttgctgtcggccttcatgctgcatcagcagttgttgtcggccatcctgttgcattagctcatgttgcaaaccctcttgttgccgcacgacctgctgccgcccatcgtgttgcatttccagctgctgccggccatcttgctgtatctcttcttgttgcaagccgtcatgttgccagacaacgtgctgtcgaccatcatgttgtatctctagttgctataggccacagtgttgccagcctagctgttgcagaccagcttgctgtatctctagctgttgccacccgagttgttgtgttagctcttgcagatgtcctttctcctgtccgactacgtgctgtcgcacgacttgcttccacccaatttgctgtggctcctcttgctgctag

SEQ ID NO: 29320 - DNA, 588 bp, synthetic construct
  source 1..588: mol_type = other DNA; note = Synthetic coding sequence
atggtcaacagttgttgtggctccgtatgcagtcatcaaggttgcggacgagatctttgccaggagacatgctgccggccaagttgctgcgagacaacgtgctgtcggaccacttattgcaggccctcttgctgcgtgtctagctgctgcaggccccagtgttgtcagtctgtctgctgccagcctacctgctgccggcctcggtgttgcatttctagctgctgtaggccatcctgttgcgtgtcttcttgttgcaagcctcaatgttgccagtctatgtgttgtcagcctacctgttgcaggcctcgctgttgcatctcatcctgctgcagacctagctgttgcgttagctcttgttgtagaccacagtgctgtcagagtgtgtgctgtcaacccacatgttgtcacccctcatgttctatctcttcctgctgcaggcccagttgctgcgaatcttcttgctgtcgtccctgttgctgtctgcggcctgtgtgcggtagggtgagttgccataccacttgctaccgacccacatgcgtcatcagtagttgtcccagacccctatgctgcgccagttcatgctgttag

SEQ ID NO: 29321 - DNA, 633 bp, synthetic construct
  source 1..633: mol_type = other DNA; note = Synthetic coding sequence
atggtgtccagctgctgtgggagcgtgtgcagcgaccagggctgcgggcaggacctatgccaagagacatgttgtcgaccctcttgttgtgaaacgacatgttgccgcacgacttgttgtagaccgtcctgctgtgtctcaagctgttgccgcccacaatgttgccagagtgtgtgctgtcagccaacctgctctcggccatcttgctgccagacaacctgttgtaggacaacgtgctacaggccgagctgttgcgtcagcagctgttgcagaccacagtgctgccaaccggcatgctgtcagccaacttgttgtagaccgtcatgctgtgagactacctgttgccacccaaggtgttgtattagtagctgctgcaggccctcctgttgtgtttcgagctgctgcaagccacagtgctgccagtccgtctgctgtcagccgaactgctgccgccctagctgctcgatcagctcttgttgcagaccaagctgctgtgagtcttcgtgttgtaggccctgttgctgtgtccggcctgtatgtgggagggtttcttgccataccacctgctacagaccaacctgcgtaatttctagttgtccccgaccattatgttgcgcaagttcttgctgctag

SEQ ID NO: 29322 - DNA, 387 bp, synthetic construct
  source 1..387: mol_type = other DNA; note = Synthetic coding sequence
atgactggttcctgctgcgggtccactctctccagtttgtcctatggcggaggatgttgtcagccttgttgctgcagggacccctgctgttgtcggccagtgacctgccagaccacggtgtgcaggcctgtcacttgtgtgccacggtgcacacggcctatctgtgagccctgtcggaggcctgtgtgctgtgacccctgttccctgcaagaagggtgttgtcgcccaataacttgttgccccagtagttgcacggctgtggtgtgtagaccatgttgctgggcaacaacttgttgtcagccagtgagcgtgcagagcccttgctgtcgccctccttgcggacagccaaccccttgtagtacaacatgtcggacctctagttgttag

SEQ ID NO: 29323 - DNA, 387 bp, synthetic construct
  source 1..387: mol_type = other DNA; note = Synthetic coding sequence
atgactggtagctgttgcgggtcgaccttttccagcctgagctatggagggggttgctgtcaaccgtgttgctgtagagatccatgttgctgtagacctgtaacttgccagacaacggtttgtcgacctgtcacctgcgtgccacgatgcacgcgacctatctgtgaaccctgccggagaccggtgtgctgcgatccctgtagtcttcaggaaggctgctgtagaccaattacatgttgcccgtctagctgcaccgctgtcgtgtgccgaccatgctgctgggccaccacctgttgtcagcccgtgtcagtgcaatccccctgttgcagaccgccttgtggtcaacccacaccatgctccaccacttgcagaacgtcctcatgctag

SEQ ID NO: 29324 - DNA, 297 bp, synthetic construct
  source 1..297: mol_type = other DNA; note = Synthetic coding sequence
atggattgctgcgcaagccgaggctgcagcgtcccaaccggcccagccacaaccatatgcagctctgacaagagttgtcggtgcggtgtttgcctgccaagcacttgtcctcatactgtttggctgctggaacccacttgctgcgacaactgcccgccaccctgtcacataccgcaaccgtgcgtcccaacctgttttctgctaaactcatgtcaaccaactcctgggttggagacgctgaatctgaccaccttcacacaaccttgttgcgagccgtgcctccctagaggatgttag

SEQ ID NO: 29325 - DNA, 297 bp, synthetic construct
  source 1..297: mol_type = other DNA; note = Synthetic coding sequence
atggattgctgcgcgtcacggagttgtagtgtccccaccggcccagccacaacgatctgcagctccgataaatcttgtcggtgtggcgtttgtctaccatctacctgcccccacacagtttggctgttggagccaatttgctgcgacaactgtcctcctccatgccatatcccacagccatgtgtgcctacatgtttccttcttaattcttgccagcctacccctggtttggagaccctgaatttgacaacctttactcaaccttgctgtgagccatgtctgccccgaggatgctag

SEQ ID NO: 29326 - DNA, 297 bp, synthetic construct
  source 1..297: mol_type = other DNA; note = Synthetic coding sequence
atgtattgctgcgccctgcgtagctgtagtgtgcccactgggcctgcaactactttttgctcattcgacaagagctgtaggtgtggtgtttgcttgccttccacttgtccacacgagatctctctgctgcagccaatttgctgcgatacatgccccccaccctgctgcaaacccgacacctatgtgccaacttgttggttacttaacaactgccatccaacgccaggacttagcgggattaatcttacaacttatgtgcagcccggatgcgaatccccctgcgagccacggtgttag

SEQ ID NO: 29327 - DNA, 291 bp, synthetic construct
  source 1..291: mol_type = other DNA; note = Synthetic coding sequence
atgtgtcataccagctgttcttctggatgccaaccggcttgttgcgctccttctccttgtcaggcctcctgctacatccctgtcgggtgtcagagctctgtatgtgtgcccgtatcctttaagcctgcagtgtgcgtgccagtaaggtgccagtcctcggtctgcgtgcctgtgagctgtcgacctgtcgtttacgccgcaccttcgtgccagagctccggatgttgtcagccaagctgtaccagtgtcctctgtcgtccaatttcatgttctaccccaagttgttgctag

SEQ ID NO: 29328 - DNA, 339 bp, synthetic construct
  source 1..339: mol_type = other DNA; note = Synthetic coding sequence
atgtgtcatactagtcattcaagtgggtgtccaatggcttgcccgggaagcccttgttgtgttcccagcacttgctaccctcccgaaggatatggcactagctgctgttgctcggctccttgcgtcgctttgttgtgtcgcccactgtgcggagtgagcacttgctgccagcctgcttgttgcgtgcccagcccctgccaggtcgcatgctgtgtccccgtgtcctgcaagcctgtgctgtgcgtggcgtctttctgccctacatctgggtgttgtcaacctttttgtcctactctggtctacaggcccgtcacttggtcgacccccacagggtgttag

SEQ ID NO: 29329 - DNA, 666 bp, synthetic construct
  source 1..666: mol_type = other DNA; note = Synthetic coding sequence
atggctactagcacaatgtctgtatgtagttcagcctacagcgactcatggcaggtggacgcatgccccgagtcctgttgcgagccaccgtgctgtgccactagctgttgcgcgcctgcgccatgtctaaccctggtctgcaccccagtctcttgtgtgtcttcaccgtgctgtcaggccgcttgtgagccctccccttgtcaaagtggctgcacaagtagctgcacaccatcctgttgtcaacagtcttcttgtcagcctgcctgctgcactagtagcccgtgccaacaggcatgttgcgtgccagtatgttgtaagccggtgtgttgtgtccccgtatgctgtaaaccagtgtgttgcaagcctatctgttgcgttcccgtgtgctcaggcgcttcttctagctgttgtcagcaaagctcacgacagccagcttgttgcactacatcctgctgcagaccatccagttccgtttcattgctttgcagaccagtgtgtcgatcgacgtgttgcgttcccattccttcttgctgcgctccagctagcacttgtcaaccatcctgctgccgacccgcaagttgcgtgagtttgctgtgtcggccaacttgtagcagactgtcttctgcctgttgcgggttgtcttctggacagaaatcatcctgttag

SEQ ID NO: 29330 - DNA, 768 bp, synthetic construct
  source 1..768: mol_type = other DNA; note = Synthetic coding sequence
atggcggcttctaccatgagtatatgcagctctgcttgcactaattcttggcaagttgatgactgccctgaatcctgttgcgagttaccctgtggcaccccatcgtgctgcgcaccagcaccatgtctcacacttgtctgcacgcctgtgtcctgtgtgagttcgccttgctgccaggcggcatgcgagccttccgcatgtcaatcaggatgtaccagctcctgcacaccttcttgctgccaacagagttcttgccagcctgcttgttgtacatcgtccccttgccagcaagcctgctgcgtgcccgtctgttgcaaacctgtctgttgcgttcccgtgtgttgcggtgcctcctcatgttgccagcagtcctcttgccaacctgcctgctgcgcctcaagcagttgccagcagagttgcagagtgccagtttgctgcaaggccgtgtgttgcgtgcctacctgttctgagtcttccagcagctgttgtcagcaatcaagttgccagcccgcttgctgcacatcctccccctgccaacagagctgttgcgtgtcagtgtgttgcaagcctgtgtgttgcaagtcaatctgctgtgtgcccgtgtgttccggggctagcagcccgtgctgtcaacaaagctcttgccagcctgcatgttgcacctcctcttgttgtcggccttctagttccgtgtccctcctgtgtcggccagtttgctcacgcccagctagctgttctttctctagtggtcagaagtcctcttgttag

SEQ ID NO: 29331 - DNA, 312 bp, synthetic construct
  source 1..312: mol_type = other DNA; note = Synthetic coding sequence
atgtgtggctcctattaccggaactacaatggcggtcacggctacggatgctgtggctatgggggtctgggttgcggatacgggggttgtggatatggctgctgcgggtacggcggtcttgggttcggatatggtggtctggactgtggctatggcggtctcggctgtggatatggatccttttgcggctgcggctaccgcggattagactgtgggtacggatgtggctacggatatgtttcccacagtttctgtgggtgtggttacagatgtggcagtggctacggcagttcctttggatattactactag

SEQ ID NO: 29332 - DNA, 3117 bp, synthetic construct
  source 1..3117: mol_type = other DNA; note = Synthetic coding sequence
atggtgagctctgcgcagatgggatttaacctgcaggcacttctcgagcagcttagtcaggacgagctttctaagttcaagtaccttataactacgttttctttggcacacgaactgcagaaaattccgcacaaggaagttgataaagcggacggtaagcagctggtcgagatattgacgacccactgcgattcatattgggtggagatggcatcgctccaggtcttcgagaaaatgcacagaatggatctctctgagagagcgaaggatgaagtccgagaggccgcattgaagagctttaataaaagaaagcccctgagtctggcatttaccgagaccaaggggaacgtgatctgccttgggaaagaggtcttcaaaggaaaaaaacccgataaagacaatagatgtagatacattcttaagacaaagttcagagaaatgtggaagagctggccaggcgatagtaaggaggtccaggttatggccgaacggtacaagatgctgatacctttctctaacccgcgagtactgcctggacccttctcttatactgtagtgttgtatggaccggctggactggggaagaccacacttgcccagaaactcatgctggactgggcagaggacaatctgatccacaagttcaagtacgccttttacctgagctgtcgcgaactgtctaggctcggaccctgcagttttgccgaactggtattccgggactggcctgagttgcaagatgatataccacacatcttggcacaggcgaggaagatcctgttcgtgatagatggattcgatgaactaggagctgccccaggcgctttaatcgaggatatctgcggggactgggagaagaaaaaaccagtcccagtccttctaggatcactgctcaatagggtaatgctccccaaggccgctctgctcgtgacaacacgacccagagcactgcgggatctgcgtattttggcggaggagcccatttacatcagggtggaaggctttctggaggaagacaggcgagcatacttcctgagacactttggggatgaagaccaggccatgcgggcttttgaactcatgagatcgaatgccgcattgtttcagctgggcagcgcccctgctgtgtgttggatcgtgtgcacaacactcaagctgcagatggagaaaggggaagatccggttcccacctgtctaactaggacggggctctttttgcgtttcctgtgttcccgattcccccagggtgcccagctgaggggcgctttaaggaccctttcgcttttagcggctcagggcctgtgggctcagactagtgtactccacagggaagaccttgagagactcggcgtgcaagagagcgacctcaggctcttccttgatggcgacatcctcagacaggacagagtgagtaagggctgttactcattcatacacctcagtttccagcagttcctgacagccttgttctataccctggaaaaggaggaagaggaggacagggatgggcatacttgggacatcggggatgtgcagaagttactctcgggcgtggagcgactcagaaatcctgacctgatacaggccggatactattcattcggactggctaacgagaagagggcaaaggagctcgaagctaccttcggatgccgtatgtcccccgatatcaagcaggaactcctgcgctgcgacatcagttgtaaaggaggccactccacggttactgatctccaagagctgcttgggtgcctctatgaaagccaggaagaggagcttgtgaaagaggtcatggcacagttcaaggagatcagcctccatctgaacgctgtcgacgttgtgccaagctcattctgcgtgaaacactgtcgcaatcttcagaaaatgagccttcaggttattaaagagaacctccccgagaacgtgactgcgagcgaaagcgacgcagaggttgagagatcacaggatgaccagcacatgctgcccttttggacagatctttgctctatctttggctcaaataaagacttaatgggattggcaatcaatgatagctttctgtctgcttccctggtgcgcatcttgtgcgagcaaattgcttccgatacatgtcatctccaaagagttgtgtttaaaaatatctctccagcggatgcacatcgaaacttgtgcctggctttacgagggcacaagaccgttacgtatctgacattacagggcaacgatcaagatgacatgttccccgcattgtgtgaagtgttacggcatcccgagtgtaatctccgttatttgggcctggtgagctgcagtgccacgactcagcagtgggccgatctgtctctggccttggaggtgaaccagtcattgacatgcgtgaacctgtcggacaatgagctcctcgatgaaggcgcaaaactcttatatactaccttgagacaccccaagtgcttcctgcaaagactcagtctggaaaattgtcacctgacagaagccaattgcaaggacctggccgctgttctcgtggtgagtagagagctaacccatctgtgccttgctaagaaccccatcgggaacaccggtgtgaagtttctgtgtgagggcttacgataccccgagtgtaaactccagacccttgtgttgtggaactgtgatattacttctgatggctgttgcgatttgaccaagctcctgcaagagaagtcttcactgttatgtctcgacctgggcctgaaccacattggcgtgaagggcatgaaattcctctgtgaggcgctgaggaagcccctatgcaatttgcggtgcctttggctatggggatgctcaatccctcccttctcgtgcgaggacctttgcagtgccctttcgtgcaatcaatctctggtcacacttgatctcggccaaaacccgctcggctcttctggcgtgaaaatgttatttgaaacactgacctgttcctccggcacactcaggaccttaagattaaagattgacgactttaacgatgaactgaacaaattgcttgaggaaatcgaggaaaagaatccacagttgatcatcgacaccgaaaaacaccatccatgggcagaaagaccaagttcccacgattttatgatctag

SEQ ID NO: 29333 - DNA, 762 bp, synthetic construct
  source 1..762: mol_type = other DNA; note = Synthetic coding sequence
atggagctcgagcagagggaaggtactatggcagcagtgggcttcgaggaattctcagcaccgcctggctccgagttggcgctccccccactatttggcggtcacatcctggagtcagagctagagacggaggtggaattcgttagcggaggtttggggggaagcgggctgcgcgagagggatgaggaagaggaagccgctcggggacgccgaagaagacagcgggagctcaacaggcggaaataccaggcactggggagacggtgccgcgagattgaacaggtcaacgagagggtgcttaaccggcttcatcaggtgcaaagaataacacgaaggcttcagcaggagagacgattcctcatgcgcgttctggactcatatggggacgactaccgcgctagccagtttactattgtgctggaggacgagggctcgcagggcactgacgcgcctacccccggtaatgccgaaaatgaacctcccgaaaaggagacactgtccccacctagacgaacacccgctccaccagagccgggatcacccgctcccggagagggacctagtggaaggaagaggcgacgcgtgccgagagatggtcggcgagccggaaatgctctcactcctgaactcgctccagttcagattaaagtcgaggaagactttggctttgaggcagatgaggcactcgacagcagttgggtatcgaggggaccggataaactgttaccctaccccacactcgccagcccagctagcgattag

SEQ ID NO: 29334 - DNA, 2679 bp, synthetic construct
  source 1..2679: mol_type = other DNA; note = Synthetic coding sequence
atgcttcgaacggctggaagagacggcctgtgcaggctgtcgacctacctggaggaactcgaggcggtagaactcaaaaagtttaagttataccttgggaccgccaccgagctgggcgaggggaagatcccctggggaagtatggagaaagccggaccattagagatggcccagttgcttataacccactttgggccagaggaagcctggagacttgccctctctacattcgaacggatcaaccgaaaggacctgtgggagcgtgggcaacgtgaagatctggtaagagatactccgcctggcggtccatcatccctaggtaaccagagtacatgcctgctcgaagtcagtctcgtcactcccagaaaggacccacaggagacataccgggattacgtgagacggaaattccgtcttatggaggatcgtaacgcgaggctgggagaatgcgtcaacctgtcacatcgatatactcggttgctgctggttaaggagcattccaatccaatgcaagttcagcagcagctcctggataccgggagaggccatgctagaaccgtaggtcaccaggcgtcaccaattaaaatcgagactttgttcgaacccgacgaagaacgacccgaacctcccaggaccgtcgtaatgcagggagctgccggtatagggaagtcaatgctggcccacaaggtaatgttggactgggccgacggtaagctttttcagggcaggtttgactatctgttctatatcaactgtcgcgaaatgaaccaaagcgcgactgaatgctccatgcaggaccttatatttagctgttggccagagcctagcgcacctctgcaggaactgatacgcgtaccagagcggctcctgtttatcatcgatggttttgacgagttaaaaccctcctttcatgatccacaggggccttggtgtctgtgctgggaagaaaagcgcccaaccgagttgctgttgaactccctaatcagaaagaagctcctgcctgagctctctctgctgataaccacaaggcctaccgcccttgaaaagctccatcgactcctggaacaccccagacacgtcgagatattaggatttagtgaagcagagcggaaggagtatttttataagtacttccataacgccgagcaggccggtcaggtattcaactacgttcgcgataatgaacccctctttaccatgtgtttcgtgcccctcgtgtgctgggtggtgtgtacttgcctgcagcagcagcttgaggggggaggcctgcttaggcaaacctcgcggacgactaccgctgtttatatgctgtaccttctgagtttgatgcagccaaagccgggagcaccccgtcttcagccaccaccgaaccagcgagggctatgtagcctagctgcagacggactgtggaatcagaaaatcttgtttgaagagcaggacctgaggaagcacggcctggacggcgaggacgtgtccgcatttctgaacatgaacatttttcagaaggacattaactgcgagagatattattcattcattcatcttagtttccaagagttcttcgctgccatgtattacatcctggatgagggagaaggtggagctggacctgaccaggacgtaacccgactattaacggagtatgctttttctgaacgcagttttctcgccctgacgtcacgcttcctctttggactgttaaatgaggaaacccgtagtcatttggaaaaaagcctttgttggaaggtgtcaccccatattaagatggatctcctccaatggattcaatccaaagcccaaagcgacggttctaccctgcagcagggatccctggaattttttagctgtctgtatgagatccaggaagaggaattcatacagcaagccctgtcccacttccaggttatcgtagtgagcaacatcgcctccaaaatggagcatatggtctctagcttttgccttaagcgctgccgctccgcccaagtactgcacctttacggagcgacttatagtgcggacggggaggatcgcgctcggtgttccgccggagctcatacgttactagtgcaattacgcccagaacgcacagtgctgctggatgcttacagtgagcatttggcagcagccctgtgtaccaatcccaatctgatagagttaagcttgtatagaaacgccctgggatccagaggagtgaagctgctctgtcagggattgcgacatcccaactgtaagctgcagaaccttaggctgaagagatgtcgcataagttccagtgcctgcgaggacttatccgccgcactgatcgccaacaagaacctgacccgcatggatttgagtggcaacggagttggattcccaggaatgatgctgttatgtgaagggctcagacacccacagtgccgattacagatgatccagctgcggaagtgccagttggagagcggtgcctgccaggaaatggctagtgtgctcggaacaaatccacacctagtggagctggaccttaccggcaacgcgctggaagatttgggtctaaggctcttgtgccagggactgaggcacccggtatgccggcttagaacactgtggtggctgttcggcatggacctcaacaaaatgactcacagtcgtctagcagctcttagggttactaaaccgtatctcgacattggctgttag

SEQ ID NO: 29335 - DNA, 3189 bp, synthetic construct
  source 1..3189: mol_type = other DNA; note = Synthetic coding sequence
atgctgcgaacagcgggaagagacgggttatgccgactttctacctacttggaggaactcgaggccgtagagttgaaaaagttcaagctgtacctgggcacagctactgaactgggtgagggcaagatcccttgggggagcatggaaaaggcgggaccgctcgagatggcccagcttctgatcacccacttcgggcctgaggaggcgtggcggttggctttgtccacatttgaacgtattaatagaaaggatttgtgggagcgcggtcagcgggaagatctggtcagagatacccctcctggaggcccttcctcactcgggaatcagtccacgtgcttgctcgaggttagcctggttacaccccgaaaggacccacaggaaacctacagggattacgtgcgcaggaaatttagacttatggaagaccggaacgcccgacttggagaatgcgtcaatctttctcacagatacactaggctattattagtaaaggaacactccaaccccatgcaggtccaacaacaactcctggataccggaaggggacacgccaggaccgttggtcaccaggcttcgcctatcaagatcgagactctgtttgagcctgatgaagagagacctgaacctccgagaacggtggtcatgcagggagctgccggaatcggcaaaagcatgctggcccacaaagtgatgctggattgggctgatgggaagctgttccaaggaaggttcgattacctattctatattaattgtcgcgagatgaatcagtctgcaaccgagtgttctatgcaggacctgattttctcatgttggccagagccatctgcacccctccaggaactgattagagtaccggagaggctcctgtttattatcgacgggtttgacgaactgaaaccgagttttcacgatccccagggtccgtggtgtctgtgttgggaagaaaagaggcccaccgagctgctcctcaatagcctgattcgcaaaaaactgctgcccgaacttagcctgttgattacaacacggcctactgcgctggagaaacttcaccggctgttggagcaccccagacacgtggagatcctcggtttctccgaggccgagagaaaggaatacttttataagtacttccacaatgctgagcaggcagggcaagtgtttaattacgtgagagacaatgagccactgttcactatgtgctttgtgcctctggtatgttgggttgtctgtacctgcctgcaacaacagcttgagggcggtgggctgctcagacagacctctagaaccaccacagcagtgtatatgctttatctactgtccctgatgcaacccaagcctggggctcctaggcttcagcctccaccaaatcagcggggattatgcagtcttgctgccgacggactgtggaaccaaaaaattctttttgaagagcaggacctgcgaaaacacgggttggacggagaggacgtgtctgccttcttgaatatgaacatcttccaaaaagatatcaactgtgaaagatactactccttcattcacctatctttccaggagttttttgccgcaatgtactatattttggacgaaggggagggcggtgcgggtcccgatcaggacgttaccaggctgttgaccgagtatgcattcagtgagagatctttcctcgccttgactagtcggtttttgttcggcttactgaatgaggagaccagaagccatctcgagaaatccctgtgttggaaagtctccccccatatcaagatggacctgcttcagtggatccaatcgaaagcccagtctgatggatctacgctccagcaaggttccctggaatttttctcttgcctgtatgagatccaagaagaagagttcatccagcaagcactctcacactttcaggtgatagtagtgtctaacatcgcgtccaaaatggagcacatggtgagctctttctgcctgaagagatgcagatccgcccaggtgcttcacctgtatggtgcaacatactcagccgatggggaagatagagcgagatgctctgctggcgcacacactttgttggtgcagctcaggcctgaaagaactgtgctcctggacgcctatagcgagcacttggccgcagccctgtgcaccaatcccaatctgattgaactttccctgtatcgtaacgcgctgggttcccgtggggtcaagttgctttgtcaggggctgagacatcccaactgcaagctacagaatctgagattaaaaagatgcaggatttccagttctgcttgcgaagatttgtctgccgcactgatcgctaataagaatcttactaggatggatctcagtgggaatggagtcggctttcccggaatgatgttgctgtgtgaaggactgcggcacccgcagtgtcgattgcagatgatccagctcaggaaatgccaacttgagagcggagcatgccaggaaatggccagtgtgctgggcaccaatccacatctggtggagcttgatttgacaggcaacgcactggaggatctgggcctccggctgctctgccagggattgaggcatccagtgtgccggctgaggacattatggctgaaaatatgccgactgacagccgcagcgtgcgatgagctggcatccactctgtctgtgaaccagtctctgagagagttagatttgagcctgaacgaactcggcgatttgggagtcctgctgctgtgcgaaggtctacgtcatccaacctgcaagttgcaaacactccggcttggtatctgccgactggggagcgctgcttgcgaagggttgtctgttgttctgcaggcaaaccacaatctccgggaactggatctctctttcaacgacctgggagattgggggctgtggctgcttgcagagggcctccagcatccagcgtgtcgcctgcaaaagctgtggctcgacagctgcggactgacggctaaagcatgtgagaacttatattttacacttggaattaaccagactctgaccgatctgtatctgactaataacgctttaggtgataccggcgtgcgacttctgtgtaagcgattgtcccaccccggatgtaaacttagagtgctatggctgtttggcatggatctgaacaagatgactcattctagactggcggcacttcgcgtgaccaaaccttacctagacatcgggtgttag

SEQ ID NO: 29336 - DNA, 3015 bp, synthetic construct
  source 1..3015: mol_type = other DNA; note = Synthetic coding sequence
atgctgaggactgctggccgtgacgggttgtgccggctctccacctatctggaggaactggaggctgttgaattgaaaaaatttaagctgtacctgggcaccgctactgaactgggcgaaggtaaaatcccatgggggagtatggaaaaggccggaccccttgagatggcacagctgctcattacccacttcgggcctgaggaagcctggcgcctggcactatctacattcgagcggatcaacaggaaggacctctgggaacgaggacaacgggaagaccttgtccgcgacacacccccagggggaccgtcaagcctcggaaaccaatccacatgcttgctggaagtgagcctggtaactcccaggaaggatccccaggagacttatagggactatgtaaggagaaaatttaggcttatggaagaccgcaacgccagattgggggaatgtgtaaacctgagccatcggtacacccggctcctgctggttaaggaacattctaacccgatgcaagtccaacagcagctgctggataccggcagggggcatgctagaactgtcggacaccaggcttcccccatcaagattgaaactctgtttgagccggatgaggagcggcctgagccgccacggacagtagtgatgcagggggctgcgggtatcggaaagtccatgctagctcacaaggtcatgttggactgggccgatggaaagctgtttcaggggagattcgactatctgttctacatcaattgtagggagatgaaccagagcgcaacagagtgttccatgcaagatctcattttttcttgctggcccgagccgtctgccccactgcaggagctgatccgggtgccagagagattgctgttcattattgatgggtttgatgagctgaagcctagtttccatgatccccagggaccctggtgcttatgctgggaggaaaagcggccaacagagttactcctgaacagtctcattcgcaagaaactgttacccgagctgagtctgctcatcacaaccaggccaacggccctggaaaagttgcataggctgctggagcacccgcgacatgtcgagattctcgggtttagtgaggccgagcggaaggagtatttctataaatatttccataacgccgagcaggccggtcaggttttcaattatgtgagagataacgagcccttatttaccatgtgttttgttcccctggtttgctgggtcgtgtgcacctgtttgcagcagcagctcgaaggcggaggactgttgagacaaacatcgcgcactacaacagccgtgtatatgctctacctgctgtctctgatgcagcctaaaccaggtgccccaagactgcagccacctcctaatcaacggggtctctgctcactggccgcagatggtctgtggaaccagaaaatattattcgaggaacaggatctccgaaaacacgggctcgacggggaagacgtatcggccttcctgaatatgaatatttttcagaaagatatcaactgcgaaaggtattactcgtttattcacctttcctttcaggagttttttgccgctatgtactatattttagatgaaggtgaagggggagccggaccagatcaagacgtcacgcggctgctgacagaatatgccttctccgaacggagtttcctggccctgacttcaaggttcctgtttggtctcctcaatgaggagacacgttcacatttagagaaatccctctgctggaaggtcagcccccacatcaagatggacttactccagtggatccaatccaaagcccagtccgacggaagcacccttcagcagggctccctggaattcttcagctgcctgtatgagatccaggaggaggagttcatccaacaagccctgtctcacttccaggtcatagtggtctccaatatcgcatcaaaaatggagcacatggtgagctccttttgcctgaaaagatgcagatctgcccaggtgctccacctgtacggggcaacgtattcagcggacggggaagatcgcgctcggtgtagtgcaggagcccacacactgctcgtgcaactacccgagagaacagtgctccttgatgcatacagcgagcacctggccgctgccctttgtaccaatcctaacctgatcgagctgtccctgtatcgcaacgccctggggtccaggggcgttaaactgctctgtcaggggttaaggcatcctaactgtaagttacagaacttgcggctgaagcggtgtagaatctcctcctctgcctgtgaggatctttctgccgcactgatcgccaataagaacctcacaaggatggatctgtccgggaatggagtcgggtttcctgggatgatgctgctttgcgagggcctacggcacccacagtgccggctacagatgattcagttacggaagtgccagctggagtccggagcttgtcaggagatggcctcggtgctggggacaaatcctcatctcgttgagctcgatttgactggcaatgcactggaggacctcggtcttcgacttctatgccagggactgcggcatccggtctgtcggcttaggactttgtggcttaaaatctgtagactgacagcagccgcatgcgacgagctcgcaagcaccctctcagtgaaccagtcgctgagagaattagatctgtcactcaatgagctaggggaccttggagtgctgcttctgtgcgagggtctgagacatcctacctgcaagttacagacactgaggctggacagttgtggcctaaccgccaaggcatgcgaaaatctgtacttcacactggggatcaatcagacgttaaccgatctctacctaaccaataacgccctgggcgacactggagtgcgactcctctgtaagcgtctgtcgcatcctggctgtaagctgcgggttctgtggctctttgggatggatctcaataaaatgacacattccagactcgctgctctccgggtgaccaaaccttacttagacattggatgttag

SEQ ID NO: 29337 - DNA, 327 bp, synthetic construct
  source 1..327: mol_type = other DNA; note = Synthetic coding sequence
atggcctctggacgtccagaggagctgtgggaagccgtggtgggagcagccgagcggttccgggcacggacgggtactgaactggtccttcttacagctgctccgcctcctcccccaaggccaggaccgtgcgcgtacgccgcacacgggcgaggcgctttagcggaggccgcacggcgatgcctgcatgacattgcattagcccatcgtgccgctacagccgcaaggccccctgcaccaccccctgccccacagcccccatctcctaccccatccccaccacgcccaacactggcgagggaagacaatgaggaagacgaggactag

SEQ ID NO: 29338 - DNA, 771 bp, synthetic construct
  source 1..771: mol_type = other DNA; note = Synthetic coding sequence
atggcctccggacgccctgaggagctctgggaggccgtggtgggggctgctgagagattcagagcccgaaccgggactgagctagttttgctgaccgccgctcctcccccacctccaagacccggaccttgcgcgtacgccgcacacggcaggggcgctctggccgaggcagccaggagatgcctgcacgacatcgctctggcccacagagcggctactgccgctcggccacccgcacctccccctgctccccaacccccttccccaacccctagccctccccgacccaccctggccagggaagacaacgaagaagatgaggatgagcccaccgagacggaaacgtcaggcgagcaattgggaatcagcgataacggaggactcttcgtcatggatgaagacgcaactttgcaggacctaccccctttttgcgagtcagacccagagagcaccgacgacggatcactgagcgaggagaccccagccggaccacccacgtgtagtgttcctccagcttccgcactgccaacacaacagtatgccaagtctctgccagtgagcgttccagtgtggggcttcaaagaaaagcggacagaggcacgctctagtgatgaagaaaatggacctccctcctcaccagacctggataggatcgctgcatccatgcgggcactggtgctcagagaggcagaggatactcaggtctttggggatctccccagacccaggctcaacacgagtgattttcaaaaattgaaacgaaaatactag

SEQ ID NO: 29339 - DNA, 771 bp, synthetic construct
  source 1..771: mol_type = other DNA; note = Synthetic coding sequence
atggccagcggcagaccagaggagctgtgggaggccgtggtaggcgctgcggaaaggttcagagccaggactgggaccgagctggtgctgttgacagccgctccacccccacccccacgccctggcccttgcgcttacgcagcccacggtcgcggagctttggctgaggccgctaggaggtgtctgcatgacatcgcgcttgctcaccgcgctgcaacagctgcccgacctcccgctcccccacccgcaccacagcccccatcccctacgccaagtccgccacgcccaaccttagcacgcgaggacaatgaagaggatgaggatgaaccgaccgagacagaaacgagcggcgagcagctgggcatttctgacaacggcggactgttcgttatggatgaggatgccaccctccaggatctcccaccgttctgtgaatccgatcccgaatcgacagacgatggtagtctgtccgaggagacccctgccggaccgcctacatgctccgtgcctccagctagtgctcttccgacccagcagtatgcaaaaagtctgccggtatcagtccccgtctggggctttaaagaaaaacgtaccgaagccaggtccagtgacgaggaaaatggccctcccagcagccccgacctcgataggatcgctgccagtatgagggcattagttctaagagaagccgaggacactcaggtgtttggtgatctgcccagacctagattgaatacctcagactttcagaagctgaagaggaaatattag

SEQ ID NO: 29340 - DNA, 771 bp, synthetic construct
  source 1..771: mol_type = other DNA; note = Synthetic coding sequence
atggctagcggcaggcccgaggaactttgggaagcggtggtcggggctgccgaaagattccgcgcacggaccgggaccgaactggttctcttaactgcagcaccccctccccctcctcgccctggcccatgcgcctacgcagcccacggcaggggtgcgttggccgaagctgccagacggtgcctgcacgatatcgcactagctcatcgggcagcgacggccgcacgtccccctgcccctcctcccgctcctcagcccccttccccaaccccatccccaccaagaccaacactcgccagagaggataatgaggaagatgaagatgagccaactgagaccgaaacgtccggtgaacagctggggatttcagacaatggaggactctttgtcatggacgaggatgccacactgcaggacctgccccctttctgtgagtcagatcctgaaagcaccgatgatggcagcctgagcgaagagacacccgcaggaccaccaacctgctctgtacccccagcctctgcgctgcctacacagcagtacgcaaaaagcctccctgtgagtgtgccagtgtggggctttaaagaaaagcgaactgaagccagaagttctgatgaggaaaatggacccccttccagtcccgacctggataggatcgcagctagcatgcgggctctcgtgctgcgggaggcagaggacacacaggtatttggtgacctacctcggccaagattgaacactagcgactttcagaagctgaagcgtaagtattag

SEQ ID NO: 29341 - DNA, 771 bp, synthetic construct
  source 1..771: mol_type = other DNA; note = Synthetic coding sequence
atggcctcagggaggcctgaggaactctgggaggccgtagtgggtgctgctgagcgttttagggcgcgaaccggcaccgagctggtactcctgacagctgctcccccaccccctccccgacctggcccttgtgcctatgccgcacatggccgtggcgcattggctgaggccgcaagacggtgccttcacgatatagcactggctcaccgggctgccacggctgcacggccaccagcacctcctcccgctccccagcctccaagcccaacaccctctccaccccgaccgacattggcccgagaggataacgaagaagatgaggacgagccaaccgagaccgagacctcaggcgagcagctcgggatttccgataacggaggtctgttcgtcatggacgaagatgcgactctgcaggacctgccaccattttgtgagtctgatcctgagtccacagatgatggcagcctgtcagaggaaacccctgccggaccccctacttgctctgttcctcccgcatcagcacttccaacccagcagtatgctaaaagcctacccgtctctgtgccggtgtggggttttaaggaaaagcgtactgaggctcgctcttccgatgaggaaaatggccctccatccagccctgatctcgataggatcgccgcatcaatgcgggctctggttctgcgcgaagccgaagacacccaggtgtttggcgatctgcccagacccagacttaacacttccgatttccagaaattgaaaagaaagtactag

SEQ ID NO: 29342 - DNA, 831 bp, synthetic construct
  source 1..831: mol_type = other DNA; note = Synthetic coding sequence
atgtccttcgaaggcggtgatggggcaggaccggcaatgctggcaaccggcaccgctaggatggcctccggaaggcctgaggaactgtgggaggcagtcgtgggggctgcagaaagatttcgtgccaggactggcacagagttagtgctacttaccgccgcaccccctcctcctcccagaccaggcccttgtgcttatgctgcacatggcaggggagcccttgccgaagccgctcggaggtgcctacatgatatcgctctcgcacacagagccgcaacagccgctcggcctccagcaccgccacccgctccccagcccccaagtcctactccctctcctccgagacccaccttggctcgagaagacaacgaagaagacgaagacgagcccaccgaaacagaaactagcggcgaacagctcggcataagcgataacggaggcctctttgtcatggacgaggatgccactctgcaggacctccctccgttctgtgagtcagatcctgagtctactgatgatggaagtctatcagaagaaacacccgcaggcccaccaacgtgctccgtgccgcctgcgtccgctctccccacgcagcagtacgctaagtccctccctgtaagtgttcccgtgtggggattcaaggagaaaagaaccgaggctcggtccagtgacgaggagaatggcccaccctccagtcccgatctggaccgaattgctgccagcatgcgcgctctggttttgagggaggcggaagacacccaagtgttcggtgacctccctaggccacggttgaacacctctgacttccagaaactcaagagaaaatactag

SEQ ID NO: 29343 - DNA, 906 bp, synthetic construct
  source 1..906: mol_type = other DNA; note = Synthetic coding sequence
atgacgaggcacggcaagaattgtaccgccggagctgtttacacgtatcatgagaagaaaaaagataccgccgcttccgggtacggcacacagaacatacggcttagcagggacgccgtcaaagactttgattgttgctgtttaagcctacaaccatgccacgaccccgtggtcacccccgacggttatctctacgagagggaagccatccttgagtatatactgcatcaaaaaaaagagatcgcacgccagatgaaagcttacgaaaagcagagaggtactaggcgagaagagcagaaggagctccagagggcagcctcccaggatcacgtgaggggtttcctagagaaagagtctgcaatcgtgagccggccactcaatccgtttacggcgaaggcactttctgggacctcccccgacgacgtgcagcctgggccatcagttggacctcctagtaaggacaaagacaaggttctgccatccttctggattccaagccttactcctgaagctaaggcaactaagctggagaaaccaagcagaacagtgacatgtcccatgagtggtaaaccactgaggatgtccgatctcacccccgtgcacttcacacctctggattcatcagtagacagagtcgggttgataacgcggtctgagaggtacgtctgtgccgtaacccgcgactccctctccaacgctacgccttgcgccgtcctcaggccatctggggcagtcgttactttagaatgcgtggagaagctgattagaaaggacatggttgaccccgtaactggggacaaactgactgacagggatattatagtcctgcagcggggagggacgggattcgccggttctggagttaaactccaggcagaaaaatcacgccctgtaatgcaggcctag

SEQ ID NO: 29344 - DNA, 612 bp, synthetic construct
  source 1..612: mol_type = other DNA; note = Synthetic coding sequence
atggcagaggttcaggtcctggtgctcgacggacgcggacacctgctcgggagactggccgcaatcgtggccaagcaggtgctgctcggccgtaaggtggtcgtggtgaggtgtgaggggataaatatctccggcaacttctacaggaataaactaaagtacctcgcctttcttcgaaagagaatgaacacaaacccctcaaggggaccataccattttcgtgcaccttcccgcattttctggagaacggttcggggaatgctgcctcataagacgaagagggggcaggccgcactagatcgcctcaaggtgtttgacggcataccacctccctacgacaaaaaaaagcgaatggttgtgcccgctgctctcaaagttgtacgactaaaacctacccgcaaattcgcatacctaggtcgtctggctcatgaggtcggatggaagtatcaggctgtaaccgctacactggaggagaagcggaaggagaaagccaagatacactatcggaagaaaaagcagttaatgaggttgcgaaagcaggctgaaaagaacgtagagaagaaaatcgataagtatactgaagtcctgaaaacccacggcctgcttgtgtag

SEQ ID NO: 29345 - DNA, 690 bp, synthetic construct
  source 1..690: mol_type = other DNA; note = Synthetic coding sequence
atgacctgttgcagtcaggtccctcccagaagaaggccaagcttagctttatctcccagactggactgtaacggactaaatggggtgcccggtagcatttgggatttcgtttccggaagcttctcaccttccccttctcccatcctctctgcgggacccccttcttcaagcagtgcgagccccaacggagccgaacttgcaagagttaggagacagctggacgaagccaagcggaagatccgacagtgggaggaatcctggcaacaggtcaagcaagtgtgcgatgcgtggcagcgcgaggcacaggaggcaaaggaacgagctcgcgtcgcagatagcgaccggcagctggccctgcagaaaaaggaggaagtcgaggcacaggtcaaacaattacaggaggaattggaagggctgggtgttgcctccaccctgcccggattacgagggtgcggggacatcgggaccatcccactgcccaagctgcacagtctgcagtcgcaactgagactggacctcgaagctgtggacggcgtgatattccagttgcgggctaaacaatgcgtggcttgtagggagcgggctcatggcgctgtgctgcggccttgccaacaccatatcctgtgtgagccttgcgcagcaaccgccccagagtgtccgtactgcaaaggccaaccactccaatggtag

SEQ ID NO: 29346 - DNA, 2283 bp, synthetic construct
  source 1..2283: mol_type = other DNA; note = Synthetic coding sequence
atgatggaagagagagcagctgccgcagtcgctgccgcagcctcatcttgcagacctctcggcagcggtgcaggaccaggaccaacgggtgccgctcctgtgtccgccccagcgccaggccctggacccgctggtaaaggagggggaggtggcggttcccctgggccaaccgcaggccctgaacccttgagccttcccggaatcttacatttcatacagcacgagtgggcacgtttcgaggctgaaaaggccaggtgggaggccgagcgggcagaactccaggctcaggtcgcatttctccagggggagcgtaaaggccaagaaaacctcaagaccgacctggttcgacggattaagatgctcgaatacgcgttgaagcaggagcgcgctaaataccacaaactgaagtttgggactgacctgaatcagggcgagaaaaaagcggatgtgtccgagcaggtgtctaacggcccagtagagagcgtaactctggagaattctcccttagtctggaaagaaggtaggcagctactgcgacaatacctcgaagaggtgggctatacagatactattttggacatgagatctaagagagtgcgctctcttctgggtagatctctcgagctgaacggcgctgtggagccaagcgaaggagcccctcgggctcccccagggccagctgggctcagtgggggtgagagccttctcgtcaaacagattgaggagcagatcaagaggaacgcagccggaaaggatggaaaggaacgcctgggcggtagcgtacttggccagattccattcctgcagaattgtgaagacgaggattcagacgaagacgatgaactggacagcgtgcagcacaaaaaacagcgggttaaactaccctccaaggccctagtgcccgaaatggaggatgaggacgaggaagatgacagcgaagacgccattaatgaattcgactttctaggctccggcgaggatggcgaaggcgcacctgacccaaggaggtgcacggtggatggctcaccccatgagttggagagccgcagagtgaagctccagggaatactggccgatcttcgggatgttgacggtcttcctcctaaagtgactggtccacctcccggaacaccccaaccaaggccccacgagggatccttcggattctccagtgatgtattcataatggatacgatcggcggtggtgaggtcagcctgggcgatcttgccgacctgacggttaccaatgacaatgacctgagctgtgatctttccgattctaaagacgccttcaagaagacctggaatcctaaatttacattaaggagccactatgacgggatccgatcactggcattccatcactcccagtcagcactgctgacagcgagcgaggatgggactctcaaactttggaacctccagaaggcagtgacagctaaaaagaatgccgcactcgatgtagagcccattcacgcattcagagcgcaccggggtccagtactggctgtggccatggggagcaattccgagtattgttatagtggaggtgccgacgcgtgcatccatagttggaagattccagacctctccatggacccatacgatggctatgatccctccgtcttgtcccatgttctggaaggtcacggcgacgccgtctggggtcttgccttctctccgacctctcagaggctggcctcatgttcagccgacgggaccgtgagaatttgggatccgtcatcctcgtcccctgcctgcttgtgcactttccccaccgcctctgaacatggcgtgcctaccagtgtggccttcacctctactgagcccgctcacatcgtggcatctttccgctccggtgataccgtgctgtacgatatggaagtgggcagtgctctactcaccctcgagagccgcggaagctcaggccctacccagatcaatcaagtcgtgagtcacccaaatcagccgttgaccatcactgcgcacgacgatcgtggtatcagatttctcgacaaccgcacaggtaagcctgtgcatagcatggtggcacacctggacgcagtcacttgcctggccgtcgaccctaatggagcttttctgatgtctggatcgcacgactgctcgcttcgtctgtggtccctagataacaaaacctgcgttcaggaaattacagcacacagaaaaaaacacgaagaggccatccacgctgtagcatgccatccctccaaagctttgatcgcctcagcgggagcggacgcgttggctaaggtgtttgtttag

SEQ ID NO: 29347 - DNA, 327 bp, synthetic construct
  source 1..327: mol_type = other DNA; note = Synthetic coding sequence
atgactcccgaagagcttcagaaacgcgaagaggaggaattcaataccgggccacttagcgttttaacacagagcgtaaagaataatacccaggtgctgataaattgtcggaataacaagaagctactcggcagagtgaaggccttcgaccgacactgcaatatggtgctggagaacgtgaaggagatgtggaccgaggtccccaaatcaggcaagggaaagaagaagtccaaacccgttaataaggaccggtatattagcaagatgtttctgcgtggtgacagcgtgattgtagtgttaaggaacccgttaatagccggaaaatag

SEQ ID NO: 29348 - DNA, 1275 bp, synthetic construct
  source 1..1275: mol_type = other DNA; note = Synthetic coding sequence
atggtgcagactctgtattactccgcagaccataagctcctggatggtaatctgttggacggacaggcagaggtgtttgggagtgatgacgaccacatacagtttgtgcagaagaagcccccacgtgaaaatggccataagcagatttccagctccagcacaggatgcctgtcctctccaaacgctactgtgcaatctcccaagcacgagtggaagatagtggcctcggaaaagacatctaataacacttatctgtgtcttgcagtgctggacggaattttttgcgttattttcctccatggcaggaatagcccccagtcgtctcccacctctaccccaaaactgagcaaaagtctatcctttgaaatgcagcaggacgagttgatagagaaaccaatgtctcctatgcaatatgctcggagcggcctggggacagctgaaatgaatggtaagcttatagccgctggcggatataacagagaggagtgtctgaggacagtggagtgttacaacccacatactgaccactggtcttttctcgcacccatgcgaactccaagggcacgttttcagatggccgtgcttatgggtcagctgtacgtcgtgggcggaagcaatgggcacagcgacgacctgtcatgcggcgaaatgtacgactctaacatcgatgactggatccccgtgcccgagctgcgaaccaaccgctgtaatgctggagtgtgtgcacttaatggcaagctgtatatcgtggggggtagtgacccctatggtcagaaggggttgaaaaactgtgatgtcttcgaccctgtgactaaactgtggaccagttgtgcccctctaaacatcagaaggcatcagagcgctgtgtgtgaattaggagggtacctatacatcatagggggtgcagagagctggaactgtctcaatacagtggaaaggtacaaccccgagaacaacacttggactcttattgctcctatgaatgtcgcgcgacgcggagctggtgtcgcggtcctaaatggcaaactcttcgtctgcggcggattcgacggcagccatgcaatttcttgtgtcgaaatgtatgaccccaccagaaatgagtggaaaatgatgggcaacatgacttcaccacgctctaacgctggcatcgcgactgtgggcaacaccatatacgccgtaggaggtttcgacggtaacgagttcctgaacacagtcgaagtctacaatttggaatcaaatgaatggtccccctacacaaagatttttcagttctag

SEQ ID NO: 29349 - DNA, 483 bp, synthetic construct
  source 1..483: mol_type = other DNA; note = Synthetic coding sequence
atgaacaacgccaggtacttgtggaagagaatacctcctgccattaaatcggcaaatagtgagcttggaggcatatggtcagtcggccagcgcatttggcagcgcgatttcccgggtatttatacaactatcaacgctcaccagtggtccgagactgttcaacccatcatggaggccttgcgcgatgctaccagaagacgggctttcgctctcgtcagccaggcatatacttccataattgcggacgattttgctgcctttgtcgggctgccagttgaggaagctgtgaagggcatcctagagcagggctggcaagcagactccacaactcgcatggttctgcctcgaaagccagtggccggagccctggatgtctcatttaacaaattcatcccgctcagtgaaccagcccctgtgccaccgatcccaaatgaacagcagctggcacgattgacagactatgtagcttttctcgaaaattag

SEQ ID NO: 29350 - DNA, 927 bp, synthetic construct
  source 1..927: mol_type = other DNA; note = Synthetic coding sequence
atgatggaagagataagtataatggtagcttacgacgctcacgtgttctcacagcttcatgatgaagactttcttaccagcctggtcgctatttctaagccccgatcgatggtgccaacaaagaagcttaaaaagtacgagaaggagtaccagacaatgagagaatcccagctacaacaggaggaccccatggatcgttacaagcgggagaacagaaggcttcaggaggctagtatgcggctggagcaggaaaacgacgatctggcccacgagcttgtcacctcgaagatcgctctccgcaacgatctggatcaggccgaagataaggccgatgtcctgaacaaagagctgcttctgaccaaacagaggctggtggaaacggaagaggaaaagcgcaagcaagaggaagaaactgctcagctcaaggaggtctttcgcaagcagcttgaaaaggccgaatacgaaattaaaaagaccacggctatcatcgccgaatacaaacagatttgttctcagttgagtacccgcttggagaaacaacaggctgcctccaaggaggaactcgaagtggtgaaaggtaagatgatggcctgtaagcattgctctgatatcttctccaaagaaggtgccttgaagctcgccgctaccggtagggaagatcagggcatcgagaccgacgacgagaaggacagcctcaaaaaacaacttagggaaatggagctagagttggcgcagacgaaactacagctggttgaggcaaagtgcaagatacaggaattggagcatcagagaggcgctttgatgaacgaaattcaagccgcaaagaattcatggttttctaaaaccctcaactccattaagactgcgacgggcacccagccccttcaaccggcaccagtgactcagccacctaaggaatctacatag

SEQ ID NO: 29351 - DNA, 3600 bp, synthetic construct
  source 1..3600: mol_type = other DNA; note = Synthetic coding sequence
atggcatccgccggaactcagcactacagtatcggactgagacagaaaaattcctttaagcagagcggtccatccggaaccgtacccgctacacccccagagaagcctagtgaaggaagggtatggccccaagcccatcagcaagtcaagcctatttggaaactcgagaaaaagcaggtggagacattatctgcaggactggggcctgggctcctcggcgtgccccctcaacccgcatactttttttgtccgtccacattgtgtagctcaggcacaaccgccgtgattgccggtcattccagttcttgttatctgcatagtctccccgatctcttcaattctactttactgtatagacggagctcttaccggcaaaagccctatcagcagctggaatcattttgcctgcgatcatctccatccgagaagagccctttttctttacctcagaaaagtcttcccgtcagcttgaccgccaacaaggctacaagcagtatggtcttctcaatggctcaacccatggccagtagctcaacagagccttacctgtgcctggctgcggctggtgagaatccaagcggcaagtcgttggcttcggctatctctggcaaaataccttctcccctgtcctcgagctacaaacccatgttgaataacaactccttcatgtggccaaactcaacacccgtgcctctactccaaactacacaagggttgaagccggtgtctccaccaaaaatccagcccgtgagctggcaccacagtgggggtaccggtgactgcgctccacagcccgtagatcacaaggtcccgaaaagtattggcactgtacctgctgacgcctcggctcacatagctctgtccacagcgtcttctcatgacactagcacaacaagtgtggcctcgtcctggtataacagaaacaacctggccatgcgggcagagcccctcagctgcgctttggatgatagctcagactcccaggaccccacaaaggagatccgctttacggaagcggtgagaaaactcactgctcgcggatttgagaagatgccgagacagggttgccagctggagcagtcaagcttcctcaatccatctttccagtggaacgtgctgaatagatctcgccgttggaagcctccagccgtgaatcagcagtttccccaagaggacgccggttcagtaaggagagttctcccaggagccagcgataccttaggactggacaacacagtattttgcacaaagagaatttccattcatttgttagcgtctcacgcgtctggtttgaaccacaatcccgcttgcgagagcgtgatcgacagctctgccttcggcgaggggaaggctccgggaccgccttttcctcagacgctgggcatcgcaaacgttgctacccgtctgtcgtcgatccagctgggccaaagcgaaaaggaacggcctgaagaggcccgagaactggattccagcgatcgggatatttcgtctgctacggaccttcagcctgaccaggccgagaccgaagataccgaggaggaactggtggatgggctggaggactgctgctcccgcgatgagaacgaggaggaagaaggcgattccgaatgcagttccctgtcagcagtgtccccgagcgagagtgtggccatgatctcccggagctgcatggaaatcctcaccaagcccctcagtaaccacgaaaaggtcgttagaccagccctgatctactccctgttccccaatgtgccaccgacaatctattttgggacccgagatgagcgagtggaaaagctgccctgggaacagaggaaacttctgcgctggaaaatgagtaccgtgacgcccaatatcgtaaaacaaacaataggccgtagccattttaaaatctccaaaaggaacgacgactggctcggctgctggggccatcatatgaagagccctagcttccgcagtattcgggagcatcaaaagctcaatcacttcccaggttcctttcaaatcggcaggaaggatcgcctgtggaggaacctatctcgcatgcaatcgcgatttggtaaaaaagaattttctttcttcccccaatcttttatcctcccgcaagatgccaaattactgcgaaaggcttgggaatcgtcatcacgccagaagtggattgtcaaacctccggcttctgctagggggataggaatccaagttatccataagtggtcacaactacctaaacgccgacccctgctggttcagagatacttgcataaaccatacctgattagcggaagtaaattcgacctgcgcatctacgtatatgtaacatcctacgaccctctcagaatctatctgttttctgacggactcgttcggtttgctagctgcaagtattccccaagtatgaaaagtctcgggaataaattcatgcatcttaccaattattctgtaaacaagaagaacgccgaatatcaggctaacgccgacgagatggcatgccaggggcataagtgggctttgaaagccctttggaactacctctcccagaagggcgtgaactctgacgcaatatgggaaaaaatcaaggatgttgttgtgaaaaccattatctctagtgaaccttatgtcaccagcctgcttaagatgtacgtgaggcgaccttacagctgccacgaactctttggctttgacattatgttagacgaaaatctcaagccgtgggtacttgaggtgaatatcagtccctccctgcacagctcttcccctctggatatctcaatcaaagggcagatgatccgtgatctgttaaatctggccggattcgtgttgccgaacgccgaggatattatttcatcgccatcttcgtgcagtagtagtaccacctctctacccacgtcgcccggtgacaaatgccgcatggcccctgaacacgtaactgctcagaagatgaaaaaagcgtattacctcacacagaaaatacctgaccaggatttctatgcttccgtcttggatgttctgacaccagatgacgtcagaattctggtagaaatggaagacgaattctcccggagaggccagtttgagagaatctttcctagccacatatcctcccgatacttgcggttctttgagcagcctaggtactttaacattctgacgacccaatgggagcaaaagtaccacgggaataagttaaaaggcgttgatttacttaggtcttggtgctataaaggatttcacatgggcgtggtctccgacagcgctcccgtgtggagcctgccaaccagtcttctgacaatcagtaaagacgatgtgattttaaatgcatttagtaagagtgaaacctccaaattaggaaaacagtcttcctgcgaagtgtcgctgctcctctctgaggatggtacaacacctaagtccaaaaaaacccaagctggcctgtcaccttatccacagaagccctcttctagcaaggatagcgaggatacaagcaaggaaccttccctcagtacacaaacccttcctgttattaagtgttctgggcagacatcaaggttatctgcaagcagcacttttcagtctatttccgatagccttcttgcggtcagtccatag

SEQ ID NO: 29352 - DNA, 2337 bp, synthetic construct
  source 1..2337: mol_type = other DNA; note = Synthetic coding sequence
cgtattcaggaacagttggaatcctcattcacaggactgaccgatgaaaaggtgaaggcctacttaagtctgcacccacaagtactggacgaattcgtgtctgaatctgtttctgcagaaacagtggagaagtggctgaaaagaaaaaataataaatcagaggatgagtcagctccaaaagaggtcagccgttatcaggacactaacatgcagggggtggtttatgaactgaacagttatattgagcagcgacttgatacgggcggagacaaccagctgctgctctatgaactgagttcaattattaagatagcaactaaagccgacggattcgccctgtattttttgggggagtgtaacaattccctctgtatctttactccccctggaattaaggaaggaaagcccagactgatccccgcaggtcctatcacacagggcaccacagtctctgcatatgtggctaagtcaaggaagaccctgcttgtggaggacattttaggcgacgaacggtttccgagaggaacggggctggagagcgggacgcggatacaatcggtgctctgtttaccaatcgtcaccgcaattggagacctgataggcatcctcgagctttatcgacattggggaaaagaagcattttgtctgtctcaccaggaggtcgcaactgctaacttagcgtgggctagcgttgctatccaccaggtccaggtatgcagaggcctggcgaaacagaccgagctgaacgattttctgctggacgtctctaagacctacttcgataacattgtggcgattgatagtctgctagagcatataatgatttacgccaaaaacctcgtaaacgccgaccggtgcgccttgtttcaggttgaccacaaaaacaaagagctgtatagcgacctctttgatattggggaggagaaggaaggcaagcctgtgttcaaaaagaccaaagagattaggttcagtatcgagaagggaatagcaggccaagtagcgcgaacgggcgaagtactcaacatccccgacgcttatgctgatcctaggttcaaccgggaagtggacctctataccggatatacaacaagaaacattttgtgtatgccgattgtgagcagaggatctgtcatcggtgtagtacaaatggtgaataagattagtggtagcgctttttcaaagaccgatgaaaataacttcaaaatgtttgccgttttctgcgccttggccctgcattgcgctaacatgtatcacaggattcgccactcggaatgcatctatagagttaccatggagaaactctcataccacagtatctgtacctccgaggaatggcagggattaatgcagtttacgttgcctgtgagactgtgtaaggagatagaactgttccatttcgatattggaccgttcgagaacatgtggcccggaatctttgtctatatggtgcaccggtcttgtggcacaagctgcttcgagctcgagaagctgtgtagattcatcatgtcagtcaaaaagaattacaggcgggtgccataccataattggaagcatgctgtgactgtggcccactgcatgtatgccattctgcaaaacaaccacaccctttttaccgaccttgaacgtaagggcttgctgatcgcgtgtttatgtcatgacctggaccaccggggattctctaattcctacctgcagaaatttgatcatcctttggctgcgctatattcaacaagtactatggagcaacaccacttcagtcaaacagtttctatactgcagttggaaggacacaacattttcagtactctctccagcagcgaatatgaacaagtgctggaaatcatccgcaaggctatcattgcaacggacctggcgctgtactttggcaatcgcaaacagttagaggagatgtaccagaccgggtcattgaacttgaacaatcagtcgcacagagatcgggtaatagggctgatgatgacggcatgtgatctgtgctctgtgactaagctgtggcctgtgactaagctgaccgcaaatgacatctacgccgagttttgggccgagggggatgaaatgaagaaactgggcatacaacctatcccaatgatggatcgtgataagaaggatgaggtcccccagggccagctcggattttacaacgccgttgctattccgtgttacaccacactgactcagatcctgccacctaccgagcctctgctgaaggcctgtcgagacaatctgtcacagtgggagaaagttatacgtggtgaggaaaccgcaacatggataagttcaccctccgttgcccagaaagcagctgccagcgaagactag

SEQ ID NO: 29353 - DNA, 1281 bp, synthetic construct
  source 1..1281: mol_type = other DNA; note = Synthetic coding sequence
atgtggccgctcacagcgttgttgttactggtcccctctagcgggcaggctgccacattagagaaaccaatcctgagcctccacccaccttggaccaccatcttcaagggggaacgtgtgaccctgaaatgcgatggctaccacccactgcttctggagcttcagccaatcagtactttatggtacctgggtcaccttctcctgcctagccataagaagagtatcgaggtgcagacacccggagtttaccgttgtcagacccggggtgccccagtcagcgatcccatccacctaagtgtctccaacgactggctgattttgcaggtgccttacgcacccgtttttgaaggagagccattggtgctgcgatgtcggggatggtatgacaaggtggtctataagttacattattatcatgacggccaggcagtcaggtatttccattcatctgccaactatactgttctgcaagccagagcaagcgactcaggtcggtaccagtgctctggtaccatgcgcattcccgtcgagagcgcaccaatgtttagcgcgaaggtggccgtgacagtacaggagctttttagggcacccgttttaagggtgatgggtcctcgcgaagccaggggggcagcactcggcggtgttgtgttaaggtgcgatacccgcctgcacccgcagaaacgggatacccccttgcagttcgctttctataagtacagcagagccgtgcgaagattcgactggggtgccgagtacacggtccctgaaccagaagtagaggagttagaaagctattggtgcgaagctgcgacggcaaccaggtcagtgcgaaaacgcagcccctggcttcagctccccggacccggatctcccctggacccggctagcacaacagcccctgcgccatgggccgcagcactcgcccctggcaacagaccactgtcatttcggaagcctcccgtttccaggtctgtcccgctggttacatcggtgagaaatactaccagcaccggtctgcagtttcctgctagcggagcaccgacagccggtcctcctgcttgcgcccctcccacccccctcgaacagtctgccggagccctgaagcctgatgttgacctgctactcagagagatgcaattgctgaaggggttgctatccagggttgttctagagttaaaggagccccaggctcttcgggagctgaggggcacccccgagactcctacctctcattttgctgtttcgccgggaacccctgaaactactcccgtggagagctag

SEQ ID NO: 29354 - DNA, 1779 bp, synthetic construct
  source 1..1779: mol_type = other DNA; note = Synthetic coding sequence
atggatgttatgctggaaaactactgccatctgatctcagtgggctgccacatgaccaagccagatgttatactcaagttagaacgcggagaagagccgtggacctcattcgcaggccacacatgtttggaagagaactggaaggccgaagactttttagtcaaattcaaggaacatcaggagaagtattccaggtcagtggtgtccattaaccacaagaagctggtcaaggagaagtccaagatctacgaaaaaaccttcaccctgggcaagaatccagtgaactcaaaaaatctgccgccagaatacgatacacacggtcggatcctcaagaatgtgtccgagctgatcatctctaatctgaaccccgctcgcaagagactctcagagtacaacggatacggaaagtcgctgttatcgacgaaacaagaaacaacacatcctgaggtcaagtctcacaatcagtctgcgcgagccttcagccacaatgaggtcctcatgcagtaccaaaaaaccgaaactccagctcagtcatttggatataacgactgtgaaaaatctttcctgcaaagagggggattgatcactcacagtcggccttacaaaggcgagaatccctcagtttacaacaagaagagacgcgctactaacattgagaaaaaacacacctgcaacgaatgtggcaaaagtttttgcaggaaatccgttctgattctgcaccaaggaattcattccgaggaaaaaccataccagtgccaccagtgcggcaacgccttcagacgaaagtcctaccttattgaccaccagaggacacatactggcgaaaaaccgttcgtctgtaatgagtgcggaaaatccttccggctcaaaaccgcactgaccgatcatcagcgcactcatacgggcgagaagtcctatgaatgtctccagtgtagaaacgccttccggctgaagtcacacctgattaggcaccagagaacccacactggtgagaagccctatgaatgtaacgattgtggaaaatccttccgccagaaaacaactctgtcgctgcaccaacgcatccatactggcgagaagccctatatctgcaaagagtgcggtaagtcttttcatcagaaggctaacctaacagtgcaccagcgaacccacactggcgagaagccctatatttgcaacgagtgtgggaagtcctttagccagaagacgacccttgctcttcacgaaaaaacgcacaatgaggaaaagccgtatatttgcagcgaatgtgggaagtcctttcggcaaaagactacactggtcgcacaccagaggacccacacgggcgagaaatcatacgagtgtccacactgcggaaaagcttttaggatgaaatcatacctaatcgatcaccacaggacacataccggcgaaaaaccttatgagtgtaatgagtgcgggaaaagcttttcccagaagacaaacctgaatttgcatcagagaatccacactggcgaaaagccctatgtttgtaacgaatgcggcaaatcatttcggcaaaaagcaacgttgactgtccatcagaagatacatacaggacagaagtcttacgaatgcccccaatgtggaaaggcattttccagaaagagctacctgatccaccaccagcgtacgcacaccggagagaaaccatacaagtgtagtgaatgtgggaaatgctttcggcagaaaacaaacctaatcgtgcatcagagaacccataccggtggagaggacggcctcacaggatgtctctcctag

SEQ ID NO: 29355 - DNA, 645 bp, synthetic construct
  source 1..645: mol_type = other DNA; note = Synthetic coding sequence
atggaagtgactggggtatccgccccaacagtcacagtctttattagcagcagtctgaatacgttcagaagtgagaagaggtacagtcgatctcttaccatcgcggagtttaagtgtaaactcgagcttctcgtggggtctcctgcaagctgtatggaactggagctgtacggcgtggacgacaaattctactccaaattggaccaggaagacgcacttcttggcagctatccagtggatgatggatgtcggatacatgtgattgaccactccggtgctcgcctaggtgaatatgaggacgtgagccgcgtggagaaatatacaattagccaggaggcgtatgatcagcgacaggataccgtgcgttcttttttgaagagatctaaactggggagatacaacgaagaggaaagagcgcagcaggaagccgaggctgcccagcggctggccgaagagaaagctcaagccagctcaatccctgttggctctaggtgcgaggtacgcgcagctggacagagccctcggagagggactgtgatgtatgtcggtgcgtggctggctggcccagttccagggagtagagctcccaggcctgggggtaatgtgggcggtacagtggagccaaggcgaccgagatccgcgtag

SEQ ID NO: 29356 - DNA, 189 bp, synthetic construct
  source 1..189: mol_type = other DNA; note = Synthetic coding sequence
atgtccatccagtggaagacccggcaattgcagtccaagcttcatgaagcagatattgtggtgctgggaagcccaaaacccgaggagattcccctgacgtggatccagcccggaactacggtgttaaattgcagccatgattttttaagcgaatccctgatcatcatcaggaggatggccatcttctag

SEQ ID NO: 29357 - DNA, 1269 bp, synthetic construct
  source 1..1269: mol_type = other DNA; note = Synthetic coding sequence
atgtatccaaaccctctgatttactgcacctgctgggatccgtggaatctggggcctaggaagcttattaagacccctcagttgcccaggaaaaattcaactggatcatctaagttgactcccctggtgccagctcctaagaaccacaattacttgcagcccacaaagccagtagtatctcccaagatgaagatccacagtgcgaggcaggaggaaactaacaagtcgttttacgaggtcatcaatgtgtcaccaggctaccaactggtgaggaaccgggaacagatttcagtgacacttggtgatgaaatgtttgatcgtaagaagcgatgggaatcagaaatccccgataaaggtagattctcacgcactaacatcatatcggatttggaagagcagatatcagaattaaccgcgatcatcgaacagatgaaccgggatcaccaatctgcacagaaattgctgagctccgagatggacctccgttgtgccgaaatgaaacaaaatttcgagaacaaaaaccgcgagctgaaagaggctcatgaagctgagttatctgagctggaaaataattacaaagcagctctcaaggccgagaagttggccgcacaggaaaagctggaagagatgggcaaggagtacaagtaccttaagaacatgttcagaacctatcaggacagtatctatgatgagatggaggagaagtggagcaagcagaaagcaaaatggaagaaggatgagaagttcgaacgagaaaacatcctgttacagcaaaagaagaagatgacaaagaagttcgaaatggaaagtggtgaggaggataagaaaatcaacgagtcctgctcggcagtcttcgagaacttcatccaggagaaagaggagctcctcaaacagcaccagtctgatactctgcagctggaagagctgcggaagactaaagaagtgatgcaggaggagctccatgcccaagcactcatcctggaatccctgaacactaacctgtactatacgcagctcgagctccagaaggaaaaggccattgtaggcaatcttgagaagatgcttcagaccaagttcgctgagaccgaagaaaagtataaacatacaatccagattttaaccgaggagaacatccacctcaagcagaagataatttctaagaatgaagagatctgtgagggctgcagcggacggctggcttccattaccgtatccaaggatgattctgataccgtgcaagacggaagtaaaaaaggtcaagagagttag

SEQ ID NO: 29358 - DNA, 1380 bp, synthetic construct
  source 1..1380: mol_type = other DNA; note = Synthetic coding sequence
atggttcccttcggcccatttgcctttatgcccggaaaactcgtgcacaccaatgaggtcacggtgctattaggggacaactggtttgcaaagtgcagtgcaaaacaggccgtgggcctcgtggagcatcgtaaggagcatgtgagaaaaaccatcgacgatctgaagaaggtaatgaagaatttcgaaagtcgggtagaattcactgaggatctgcagaagatgtctgacgccgcaggtgacattgtggatattcgcgaagagatcaaatgtgattttgagttcaaagcaaagcatcggattgcacacaagccccacagcaaacccaaaaccagtgacatctttgaggccgatatcgcaaacgacgtaaagtctaaggatcttttggcagataaagagctgtgggctcggctggaggaactcgagcgccaggaggagctgcttggagagctggatagcaaacccgacacggtgatcgccaatggcgaggacactactagctccgaggaggagaaagaagatagaaacaccaacgtgaacgcaatgcaccaggtgaccgatagccacactccgtgtcacaaagatgtggcgagcagtgagcctttttccggacaagtgaatagtcagttaaactgcagcgttaatggcagttcctcctaccactcggacgacgacgacgacgacgatgacgacgacgacgatgataacattgacgacgatgacggcgacaacgatcatgaagctcttggggtgggagataactctattccaactatatacttttcccatacagtggagcccaagcgcgtgcggatcaacacaggcaaaaatactactctaaaattctccgagaaaaaagaggaggcaaagagaaaacgcaagaattctaccggctcgggtcacagtgctcaggagttgcccacgattaggacccctgctgatatctacagagcctttgtcgacgtggtgaacggagaatatgttcctcgcaaaagcatcctcaagtcaagatcaagagaaaacagtgtttgctccgatacaagcgagagttctgccgctgaatttgatgatcgtaggggcgtgctgagatcaatctcgtgcgaggaagcaacctgcagcgacacaagcgaaagcatactggaagaagagcctcaggagaaccaaaaaaagctcctccccctgtctgtgacacctgaggctttttccggcacggttatcgaaaaggagtttgtgtctccctccctgactccacccccagctatcgcgcaccctgccttaccaacaattccggagcgcaaggaggtcctgttagaggcatccgaagagacggggaaacgcgtaagtaagtttaaggccgcaagactacagcagaaggattag

SEQ ID NO: 29359 - DNA, 1068 bp, synthetic construct
  source 1..1068: mol_type = other DNA; note = Synthetic coding sequence
atgcgcgagattgtccacattcaagcaggccagtgtggcaaccagattggcgcaaagttctgggaagtcatcagtgatgagcacggtatagatcccaccggttcatatcacggcgacagcgatctgcaactgctaactcactcacttggaggcggaaccggctccgggatgggcacactcttgatcagtaaaatacgagaggaatatccagatcggattatgaataccttctctgtcatgcccagtccaaaggtgagcgacactgtggtggagccttataacgccacgcttagcgttcatcagctagtggaaaacactgatgagacatacagcatcgataatgaggcactgtatgatatttgtttcaggacgctgaagctcacaactcccacctatggtgatttaaatcaccttgtttccgccaccatgagtggggttactacgtgtcttcgatttcctggccagctcaacgcggacctaagaaagttggccgtgaatatggtaccattccctcgcttgcacttcttcatgccaggcttcgccccactgacatctagaggcagccagcagtatagggcgttgaccgtgcccgagctgacgcagcaaatgtttgactccaagaacatgatggccgcttgcgatcctcgtcatggacgatatttgaccgttgccgctatttttagaggccgtatgtctatgaaagaagtggatgagcaaatgctgaacgtgcagaataaaaattcttcctattttgtggagtggatccctaataatgtcaagacagcagtctgtgacatcccacctcggggactgaagatgtctgccaccttcatcggaaactctacagctatacaagagctcttcaagcgcatttctgagcagttcactgctatgtttaggcgcaaggcattccttcactggtacacaggggagggaatggatgaaatggagttcactgaggccgaatccaacatgaatgacctggttagtgaatatcagcagtatcaggatgcaaccgctgatgagcagggggaatttgaagaagaagaaggggaggatgaggcctag

SEQ ID NO: 29360 - DNA, 255 bp, synthetic construct
  source 1..255: mol_type = other DNA; note = Synthetic coding sequence
atgaaagtgaagatcaaatgttggaatggagtcgctacatggctgtgggtggctaacgacgaaaattgtgggatttgcagaatggccttcaatggctgttgtccagactgcaaggtgcccggtgatgactgcccgctggtgtggggccagtgttcccattgcttccacatgcactgtatcttaaagtggctacatgcccaacaggtgcagcagcattgcccaatgtgcaggcaggaatggaagtttaaggaatag

SEQ ID NO: 29361 - DNA, 1416 bp, synthetic construct
  source 1..1416: mol_type = other DNA; note = Synthetic coding sequence
atgaaaatgcaggtgttttgtaaaagcatcgaggatatgactgtgaaagcagagcagtcccagcaggaagcagcaaagaagcacgaagaggagaagaaagagcttgagcggaagctctcggatctagagaagaaaatggagactagccataaccagtgtcaggaactgaaggcacgctatgaacgtgccacatctgagaccaagactaagcatgaggagatcctgcagaacctccagaagactctgctggatactgaagataaactgaagggcgctagggaggagaattccggtctcctgcaggagttagaggagcttaggaaacaggcagacaaagccaaggccgcacaaactgcagaagacgccatgcagatcatggagcagatgacgaaggagaagacagaaactctggcgagtcttgaagacaccaagcagaccaatgctaaattgcagaatgaactggacacgttgaaggaaaacaatcttaaaaacgtcgaggaactgaataagagcaaggaactgttaaccgtcgagaatcagaagatggaggagtttagaaaggagatcgagacactaaaacaggccgctgcccagaaatctcagcaactttctgcactccaggaagaaaatgtgaaactggccgaggagctgggccgatcccgggacgaagtgacaagccaccagaagcttgaagaggagcgtagcgtgctgaataaccagctgctagagatgaaaaagcgagaaagcaaatttattaaggatgcagacgaggaaaaagcttcgctgcagaagtccatttcaatcacaagtgctctactcactgagaaggacgcagaattagaaaagttgagaaacgaggttacagtcttgcgaggtgaaaatgcctcggccaagtccctgcactccgtagtccagacgctggagtcagataaggtcaagctggaattgaaggtcaaaaatctggagctccagctgaaagagaacaagcggcagctttcgtccagtagcgggaacacagacacccaggccgatgaggatgagcgggcacaggaatcccaggtcatgatagactttcttaacagcgtcatcgtcgatctgcagcgcaagaatcaggacttgaagatgaaagtcgaaatgatgagcgaggccgcattaaacgggaacggggacgatcttaacaattacgatagcgacgaccaggaaaagcagtcaaaaaaaaagccccgacttttttgtgacatatgtgactgtttcgacctgcacgacaccgaagactgcccaacacaggcccagatgtcggaggatccgcctcattctacccatcacgggagcagaggagaggaacggccatactgtgaaatctgcgagatgtttggtcattgggccactaattgcaacgacgacgaaactttctag

SEQ ID NO: 29362 - DNA, 1602 bp, synthetic construct
  source 1..1602: mol_type = other DNA; note = Synthetic coding sequence
atgagttcttgcgtgtctagtcagccgtcatctaatcgcgcagcacctcaagacgaactcggcggaagggggtctagcagtagcgagtcccagaaaccctgcgaggctctgaggggactgagttcgctctcgattcacttaggaatggagtccttcatcgtggtcacagagtgcgaaccaggatgtgctgtggacctcggcctcgccagggatcgaccattagaagccgacgggcaggaggtgccactggatacctctggcagccaggccaggcctcacctctctggacggaagctgtctctccaagaaagatcacagggaggtctcgctgcgggtggttccctcgatatgaatgggagatgtatatgcccaagtttaccatactcgcccgtgtctagcccacagtcttctcccaggcttcccaggcggcctactgtggagtcccatcatgtatcgatcacagggatgcaggattgtgtgcagctgaaccagtacactctgaaggacgagattggcaaaggtagctatggtgtcgtgaagctggcttacaatgaaaacgataatacctattacgctatgaaggtgctcagcaaaaaaaaactgataaggcaggccggattcccacgtcgccctccaccgagggggactcgccctgcccctgggggttgtatacaacccaggggacctatagagcaggtgtatcaagaaattgcaattctaaagaaacttgatcacccaaacgtggtgaaacttgtcgaagtcctcgacgaccctaacgaggaccacctatacatggtgtttgagctcgtcaatcaaggacctgtgatggaggtacccacactaaaacctttgtcagaagatcaggctaggttctatttccaagatctcatcaaagggattgaataccttcactatcagaaaattatacatcgagatatcaagccatccaacctgctggtcggggaggatggtcacatcaagatcgccgactttggagtcagtaatgaattcaaaggctcggacgccctactgtctaatactgttggcaccccagcttttatggcaccagaatccctcagtgagactaggaagattttttcagggaaagcactcgatgtgtgggcaatgggcgttacactttattgtttcgtgtttgggcagtgcccttttatggatgagcgcattatgtgtctgcacagtaaaattaaatctcaagcattagagtttcccgatcagcctgatattgcagaggacctcaaagatctaattactcgcatgctcgacaagaatccggaatcaaggatcgttgttcccgaaatcaaactgcatccctgggtcacaagacacggcgctgagccactcccctctgaggatgagaattgcactctggtagaagttaccgaagaggaagtagaaaattccgtcaagcacatcccaagcctggccacggtcatcttagtcaaaacgatgattcgaaaaagatcattcggaaaccctttcgaaggctcaaggcgggaagaacggtctttatccgcccctggaaacctgctgacaaagaagccgaccagggagtgtgagagcctgtcggagctcaaaacgtag

SEQ ID NO: 29363 - DNA, 1671 bp, synthetic construct
  source 1..1671: mol_type = other DNA; note = Synthetic coding sequence
atgagttcctgtgtgtcttctcagccttcctcaaatagggctgcaccacaggacgaattaggcggtcggggaagttccagcagcgagagccagaaaccgtgcgaggcattaaggggcctgtctagtctaagcatccatctaggcatggagtctttcattgttgtgaccgaatgcgagccgggttgcgctgttgatctgggcttggcccgagatagaccgctggaagctgacggacaggaggtgcctttggatacttcaggttcccaggccaggcctcatctgagtggccgaaaactttcccttcaggagcgcagccagggagggctggctgctggcggttctctggacatgaatgggagatgtatctgcccttcccttccctatagtccagtgtcaagcccacagagttcgcctcgtctgccacggaggccaactgtggaaagccatcacgtttctattacgggcatgcaggattgtgtgcagctcaatcagtatacactcaaggatgagattggtaaaggctcttatggcgtggttaaactggcctataatgaaaacgataacacttactacgcgatgaaagtgcttagtaaaaaaaaactaattcgacaggcaggctttccccgtagacccccaccgcgaggaaccaggcccgctccaggaggttgcatacagcccagggggcctattgagcaagtgtaccaggagattgctatcctgaagaaactggaccatccgaacgtggtgaagctggtcgaagtgctggacgaccctaacgaggatcatctatacatggtgtttgagctcgtcaatcaaggcccagtgatggaggtaccgaccctcaaacctctctctgaagatcaggctcggttttattttcaggacctgattaagggcatagagtatctgcattaccagaagatcatccaccgggatatcaaaccaagcaatttgcttgtaggtgaggatggtcacatcaagatagccgactttggcgtgtccaacgagttcaaaggaagcgacgctcttctgagcaacacagttggcacgcctgcattcatggccccagaaagtctgtccgagacccgcaagatcttttccggcaaagcattggacgtgtgggccatgggcgtgactctgtattgtttcgttttcggacaatgccctttcatggatgagaggattatgtgccttcactccaagataaaaagccaggcgctagaattcccagaccaacccgacattgccgaagatctcaaagacctcatcacacggatgctcgataagaatcccgaatcccgcattgtggtgcccgaaataaagcttcacccatgggtgacccgacacggcgctgaacctcttccatctgaagacgagaactgcacactagttgaggtgaccgaggaggaagtggaaaacagtgtaaagcatatccctagtctcgctaccgttatcctggtaaagaccatgatcaggaaaaggtcctttggcaatccgttcgagggttctagacgcgaagaacgctctctctcagccccaggtaatctgttgaccaaaaaacccactagagaatgtgagtctctttcagaacttaagggcaccaaaaagaaaaaaggactggatagcatgacgagcaccgttgcagccggatggctcgacaggcgagtttag

SEQ ID NO: 29364 - DNA, 309 bp, synthetic construct
  source 1..309: mol_type = other DNA; note = Synthetic coding sequence
atgctctccgaggaggagaaagaagaactaaaagccgagttagtgcagttagaggatgagatcacaacactccgccaggtgttgagcgccaaggagcgccacctcgtggaaatcaagcagaagttaggcatgaaccttatgaacgaactgaaacagaacttctcaaaatcctggcacgacatgcagacaactaccgcttataagaagacacacgagactctgtcccatgccggtcagaaggcaaccgccgctttttctaatgtgggaactgcaattagtaaaaaatttggtgacatgaggagaaagtag

SEQ ID NO: 29365 - DNA, 615 bp, synthetic construct
  source 1..615: mol_type = other DNA; note = Synthetic coding sequence
atggaggccgagcccaaaggtctcctagaaacagaaccgctgcaaggcaccgacgaggacgcagttgcctccgctgacttttcctccatgctcagtgaagaggaaaaggaggaacttaaggctgagctggtccaactggaggacgaaatcaccacactacgccaggtgctcagcgccaaagaacggcatctggtggaaatcaagcagaagctgggcatgaacctcatgaacgaactgaaacagaacttctctaaatcatggcatgatatgcagacaactactgcttataaaaaaactcacgagacactgtcacatgctgggcagaaggcaactgccgcatttagcaacgtcggtaccgctatttctaagaagtttggcgacatgtcctactctatacgccactctatttcaatgcctgctatgaggaactctcccaccttcaagtcctttgaggaacgcgtggagacaaccgttacctccctcaaaactaaggtagggggaaccaaccctaatggcggttctttcgaagaagtgttaagctctaccgcacatgccagcgcccagtctttggctggaggctccagaaggacgaaagaggaagagctgcaatgttag

SEQ ID NO: 29366 - DNA, 369 bp, synthetic construct
  source 1..369: mol_type = other DNA; note = Synthetic coding sequence
tgatatctcgtggccctgggttgtatcaagcctctgtgcgacttactcaccgtcatggacagtaagatcgtgcaagtcgcacttaacgggctggagaatattcttcggctgggtgaacaggaatccaagcagaatggaatcggcattaacccctattgtgcactgatcgaagaggcctatggcttggataagatagaattcttgcaaagccacgaaaaccaagaaatttaccagaaggcattcgatctcattgagcactactttggggtggaggaggacgatccgagtatagtgccacaggtggatgagaaccagcagcagtttatcttccaacagcaggaggcacccatggacggattccaactgtag

SEQ ID NO: 29367 - DNA, 1137 bp, synthetic construct
  source 1..1137: mol_type = other DNA; note = Synthetic coding sequence
atggaggtgaagccaccccctgggaggccacagcctgactcaggcaggcggaggagacggcgtggtgaggagggtcatgacccaaaagaacccgagcaactgagaaagctctttattggcggactaagcttcgaaaccaccgatgattctctgagagagcacttcgagaagtggggcacactcacagactgcgtggttatgcgagacccacagactaaaaggagccgtggatttgggttcgtgacctactcctgcgtcgaggaagtggatgctgctatgtgtgccagaccccacaaagtagatggcagagtggttgaaccgaagagggccgtgtctagagaggactcagtcaaacccggagctcatctgacagtgaaaaagattttcgtgggtggtatcaaggaagatactgaggaatacaatcttcgagactattttgagaagtatggcaagatagaaaccattgaggtgatggaagacagacagagcggcaaaaagagagggtttgccttcgtgacattcgacgatcacgataccgtggataagatcgttgtgcagaaatatcacactattaacggccacaattgtgaagtgaagaaagccttgtcaaagcaggagatgcagagtgctggttcccagaggggccgaggtgggggaagcggcaacttcatgggtcgcggtgggaattttggcggtggtggtgggaatttcggcagaggaggtaactttggcggtcggggaggctatgggggagggggaggcggatctaggggttcctatggcggaggagatggcggatataacgggtttgggggagacggtggcaactacggaggcggaccaggatatagtagccggggaggctacggcggtggcggacccggatatgggaaccagggcggagggtacggtggagggggtgggtatgacggctataatgaggggggtaattttggcggtggaaattacggcggaggtggcaactataatgacttcggaaactatagtgggcagcagcaaagcaactacgggcctatgaaaggcggaagtttcggaggacggagctcgggctccccttacggaggcggatacggctctgggggtggctcgggaggttatgggagccgcagattctag

SEQ ID NO: 29368 - DNA, 3063 bp, synthetic construct
  source 1..3063: mol_type = other DNA; note = Synthetic coding sequence
atgcgtcggttcttgcgcccaggacacgatcctgtgcgggagcggctcaaaagagacttattccagttcaataagactgtggagcatggcttcccccaccaaccatcagccttgggatacagccccagcctcagaattcttgcaatcggtacaagatccggagccatcaaactttatggcgcacccggagtggagttcatgggcctccaccaggagaataacgccgtgacccagatccacctccttccaggtcagtgtcagcttgtgactttgctagatgacaattctttacatttgtggagtctaaaagtgaagggaggcgctagcgaactgcaggaggatgaatccttcaccctgcgcggaccaccgggagcagctcccagcgccacccaaataacggtggtcctgccacattcatcttgcgaattgctgtacctgggtacagagagcggcaatgtctttgtggtgcaactgcccgcattccgggcactcgaggaccggaccataagtagcgatgctgtattgcaacgactccctgaagaagcaagacaccgacgagtgtttgaaatggtcgaagccctgcaagagcacccccgagaccctaaccaaatcttaatcgggtattctcgaggcttagttgtaatctgggaccttcaggggagccgcgtgctgtaccactttctctccagtcagcaactggaaaatatctggtggcaaagagacggtagactgttggtttcttgtcattctgatgggagttactgccaatggcccgtgtcttcggaagcccaacagcctgaaccacttaggtcattagtgccctacggccctttcccttgtaaggcaataacaagaattctctggctcaccacgaggcaggggctccccttcaccatttttcaagggggtatgcccagagcgagctatggggatcgtcactgtatctccgttattcacgatggacaacaaacagccttcgacttcacctctcgagttattggttttacggtcttgactgaggctgatccagctgctacgttcgacgatccatacgcactcgttgtgctggcagaggaggagctcgtcgtgatagacctccaaactgcgggatggcccccagtgcagctgccatatctagctagccttcactgttcagccatcacatgctcacatcacgtgtctaatatcccactgaagctctgggaaagaattattgccgcagggagccgacagaacgctcatttttcaactatggagtggcctatcgacggtgggacttcactgacccctgcaccgccacagagggacctcctgcttaccgggcacgaggacgggacagtgaggttttgggacgcctctggagtatgcctgcgcttactctacaaactgtctacggtgcgggtgtttctcacagacacagatcctaacgaaaacttctcggcacagggagaggacgagtggccacctctgagaaaagttgggagcttcgatccctatagcgacgatccaagattgggtattcaaaaaatctttctgtgcaaatattctggatatctcgcggtcgctggtactgcgggtcaggtacttgtgctagaactgaatgacgaggctgccgagcaagccgtggaacaggtcgaagccgatttgcttcaggaccaggagggctatagatggaaaggtcatgaacggctcgccgctcggagtgggccagtaaggttcgaaccgggatttcagcctttcgtgctggtgcagtgccagcctcccgctgtggtcacgtcacttgctctgcatagtgaatggcgcctcgtcgcctttggtaccagccacggcttcggcctgttcgatcatcaacagcgcagacaagtatttgttaagtgcaccctgcatccctccgaccaactcgctctggaaggccctctctctcgagttaagtccttaaaaaagtctctccggcagtcgtttcgccgaatgaggcggtcacgggtgagctcgcgcaaacgccatccggcaggtccacccggtgaagcgcaagaggggtccgccaaggcagagcgcccaggcctgcagaatatggaactggcccctgtgcagagaaaaatcgaagcacgctccgccgaagattcattcacgggatttgtcaggacactgtattttgctgatacctatctcaaagactctagtcgccactgtcctagcctgtgggcagggacgaatggcggtacaatctacgccttcagcctacgcgtcccacctgccgaacgcagaatggatgaacctgttcgggcagaacaggccaaagagatccaactcatgcatagggctccggtggtcggtatcctcgtcctggatggtcattcggttccactccccgaaccattggaggtggctcatgacctttcaaaatccccggacatgcagggcagccaccaactgttggtggttagtgaagaacagttcaaggtgtttactctgcctaaggtgagtgccaagctgaagctaaaactcaccgccctggaaggtagtagagtgagacgggtatctgtcgcccacttcggaagccgcagagctgaagattacggagaacaccatctagctgtgcttacaaatttgggggacatccaagtggtcagtctgccactgcttaagcctcaagtgcggtatagctgcattcgacgcgaggacgtgtccgggatcgctagctgcgtgttcacaaagtatgggcagggtttttatctcatctctccatcagaatttgagcgcttttctctatccacaaagtggttggttgagcccagatgcctggttgactcagctgagactaaaaatcacaggcccggaaatggagcgggacctaaaaaggccccaagccgcgcacgaaactcaggcactcaatccgacggggaggaaaagcaaccagggcttgtgatggagagagcattgctatcggacgagcgcgtcctgaaggagattcagtctaccctggaaggggaccgaggcagcgggaattggcggtcccacagagctgctgtggggtgcagcctgagcaacggtggagccgagtag

SEQ ID NO: 29369 - DNA, 1458 bp, synthetic construct
  source 1..1458: mol_type = other DNA; note = Synthetic coding sequence
atggccgcagagttatacgctccagccagtgccgctgctgccgatttagccaatagcaacgctggtgccgcagtaggcagaaaagctgggccacgtagcccgccttccgcccctgcgcctgcccctccccctcccgctcccgcaccgccaacactggggaacaaccaccaggagtcaccaggctggcggtgttgtcgacccacactccgagaacggaacgccttgatgttcaataatgaactgatggctgacgtccacttcgttgtcggtcctcccggagcaaccagaacagtacccgcacacaagtacgtgttggctgttggctcgtctgtgttttacgccatgttctatggggacttggctgaggttaagagcgaaatccacatccccgatgtagagcccgctgcttttctcatcctgctgaaatacatgtattcagatgagattgacctcgaagcagacaccgtcctggctactctttatgcagctaagaaatatatcgtgcccgctttggccaaagcctgcgtcaacttcctcgaaacctccttggaggccaagaacgcctgcgtgctgctgtcgcagagccgcctattcgaggaaccggagttgactcagagatgctgggaggtcatagatgcacaggccgaaatggcactgagatccgaggggttctgtgaaattgataggcagacactagagataatagtgactagggaagccctgaacactaaggaagctgtggtattcgaagccgtcttgaactgggctgaagcggaatgcaagcggcagggtctgcctatcacccccaggaacaagcgccatgtattgggccgagcactttatctggtgcggatacctacgatgacactggaagaattcgccaacggcgctgcccagtcagatattctcaccctggaggagacccacagtattttcctatggtacacggccaccaataagcccagattagacttcccgttgacaaaacggaagggcttggccccacagcgttgtcataggtttcagtcctctgcatataggtcaaatcagtggcgatatcgagggaggtgcgactccattcagtttgccgtggacagaagagtgtttatcgccggtctcgggctctatggaagctcctctggtaaagctgaatacagtgtaaagatagaacttaaacggcttggggttgtcttagcacagaacttgaccaagttcatgtctgacggatctagcaacacgttcccagtctggttcgagcaccccgttcaggtggaacaggataccttctataccgcaagcgcggtcctggatggcagcgaactgagttacttcgggcaggagggcatgacagaggtgcaatgcggtaaggtggccttccaattccagtgtagttccgattctactaacggaacgggtgttcaggggggacaaatacctgaacttattttttatgcatag

SEQ ID NO: 29370 - DNA, 2883 bp, synthetic construct
  source 1..2883: mol_type = other DNA; note = Synthetic coding sequence
atgagcaggctcatagttaaaaatctccctaacgggatgaaggaggaacggttccggcagctgttcgccgctttcggcaccctgacggactgtagccttaagttcacaaaggatggaaagttccgtaaatttggttttattgggtttaaatccgaggaggaagctcaaaaggctcaaaaacacttcaataagtctttcatagacactagtcggatcactgtggaattttgcaagtcgttcggcgatccagcaaaaccacgagcctggagtaagcacgcccagaagccgtcacagccaaagcaacctcccaaggatagtaccaccccagagatcaaaaaggatgaaaagaagaagaaagtagcaggccaactcgagaagctcaaagaagacacagaatttcaggaattcttgtccgtgcaccaacgaagagcccaggccgctacatgggccaacgatggcttggacgctgagccatcgaagggaaaatcaaagcccgctagcgactatctaaacttcgattccgacagcggccaggagtcagaagaggaaggcgctggcgaggacctggaggaggaagcttccctggagccaaaggctgccgttcagaaagagctgagcgacatggattaccttaaatccaagatggtgaaggccggtagctcatcaagcagcgaggaggaggaatctgaggatgaggccgtccactgtgacgaaggaagtgaggcagaggaggaggacagttccgccacccccgtgctccaggagcgcgactcaaagggagcgggacaggagcagggtatgcctgccggtaagaaacggccaccagaggccagagctgaaacagaaaaaccagctaatcagaaggaaccaaccacttgccacactgttaaattgcgcggagcaccttttaatgttaccgagaagaacgtaatggaattcctcgctcctctgaaaccagtggccatcaggatcgtgcgcaacgcacacggaaataaaacaggatacatcttcgtagacttttctaacgaagaggaggtcaaacaagcactgaaatgcaaccgcgagtatatgggcggtaggtacatcgaagtgttcagagaaaagaatgtgccaactacaaaaggcgctcctaaaaacaccacaaaaagctggcaaggccgtatcctcggagagaacgaggaggaagaggacctcgccgagtctggacggctcttcgtgaggaacctcccctacactagcacagaggaagatctggagaaactattttccaagtacgggcctcttagcgagttgcattatcctattgattctctaacaaaaaagccaaagggatttgcatttatcacattcatgttcccagagcatgccgtgaaggcgtatagcgaggttgacggacaggtgtttcagggtcgcatgctccacgtactgccaagcactatcaaaaaggaggcttctgaagatgcatcagccctgggcagcagctcatataagaagaagaaagaagctcaggacaaggccaattcagcatcttcacacaattggaatactctctttatgggacctaatgccgttgccgatgccatagctcagaaatacaatgcaaccaaatcacaggtttttgaccacgaaactaaggggtctgtggctgtgcgagttgctttgggtgagacccagcttgtgcaagaagtgcggcgattcctgattgacaatggagtctctctggattccttcagccaggccgcagctgagaggtcaaaaaccgtgattctcgtgaagaacctgcctgccggtacattagcagcccagctccaggagacattcggtcactttggatctctggggagggtcctgctgcctgagggaggtataactgcaatcgtggagtttcttgagcctcttgaagctcgcaaggccttccgtcatcttgcctactccaaatttcaccacgtgccactttatctggaatgggccccagtgggggtgttttcatctaccgcacctcagaagaaaaagctccaggacacacctagtgaaccaatggaaaaggatccagcagagcccgaaaccgtgccagacggcgagacaccggaggacgaaaatcccacggaggagggcgctgacaattccagtgctaagatggaggaggaagaagaagaggaagaggaggaagaggagagccttcccggatgtacgctgttcattaagaacctcaactttgacactaccgaggagaagcttaaagaggtctttagtaaggtagggaccgttaagtcctgttctataagtaaaaaaaaaaataaagctggcgtgcttcttagcatggggtttggctttgtcgagtacagaaagccggagcaggcccagaaggctcttaaacagctgcagggccacgtggtggacgggcacaagctggaggttcggatttccgaacgagctactaaaccagcagtgaccctggcccgtaagaagcaggtgcctcgcaaacagactactagtaagattctcgtgaggaatataccatttcaggcccattcccgggagatccgagagctgttcagcaccttcggagaacttaaaaccgtcaggctccctaaaaaaatgaccggaactgggacccacagaggtttcggattcgtggactttctgacaaagcaggacgcaaagcgcgcattcaacgccctgtgtcacagcacacatctctatggaaggcgcctggtcctagagtgggcagactctgaagttacgttgcaagccttacgcaggaagaccgctgcccacttccacgagccccctaaaaaaaagcggagtgtcgtcctggacgagattttggaacagctggaagggtctgacagcgattcagaggaacagactctacaactgtag

SEQ ID NO: 29371 - DNA, 669 bp, synthetic construct
  source 1..669: mol_type = other DNA; note = Synthetic coding sequence
atggagcgcatcgaaggtgcctctgttgggagatgtgccgcttcaccttacttaaggccattaactcttcattaccgacaaaacggagctcagaaatcatgggatttcatgaaaacgcacgactccgtcaccgtactcttgttcaatagctctaggaggagtttagtgttggtgaaacagttccggccagccgtctatgccggagaggttgagaggcgcttccctggatcattagcagcagtcgaccaggacggtcccagagagctgcagcctgctctaccgggtagcgcaggagtcactgtcgaactgtgcgccggactcgttgatcagcctggcttgtctctggaagaagtcgcatgcaaggaggcttgggaggaatgtgggtaccatttagcaccaagtgaccttcggcgtgtggcaacatactggagtggagtcggtctaacaggcagtagacagaccatgttctacaccgaggtcacagatgcccagaggtccgggcctgggggtggccttgtggaggagggtgagctgattgaggtggtgcacctcccactggaaggcgctcaggcgtttgccgatgaccctgatattccgaagacgctgggggtgatcttcggggtcagctggtttctttcccaggtcgccccaaacctggatttgcagtag

SEQ ID NO: 29372 - DNA, 876 bp, synthetic construct
  source 1..876: mol_type = other DNA; note = Synthetic coding sequence
atgaatatgatctggcgaaactccattagttgcttacgccttggaaaagtgccccaccggtatcaaagcggctaccatcctgtcgcacccctgggcagtcgtattctaaccgaccccgcaaaggttttcgaacacaacatgtgggatcacatgcaatggtcaaaggaagaggaagctgcggcacgtaaaaaagtgaaggaaaatagcgcagtacgcgtgctactagaggaacaggtcaagtatgaaagggaagcttccaagtactgggacactttctacaagatccacaaaaataagttcttcaaagatcggaattggctgctgcgagagttcccagagatcctgcccgtcgaccagaagcctgaagaaaaggccagggagtctagttgggatcacgtcaaaactagtgctaccaatcgttttagtaggatgcactgccccaccgtgcccgacgagaagaaccattacgaaaaaagctccggatcgagtgaggggcagtccaagacagaaagcgattttagcaatctggatagtgaaaagcacaagaagggcccaatggagaccggtctcttccccggaagcaacgcgacattcagaattttggaggtgggatgcggcgcagggaactccgtattcccaatcttaaatacactcgaaaactctcccgaaagttttctgtattgctgtgactttgcttcaggcgctgtcgagctcgtcaaatctcacagcagctatcgggcaacgcagtgcttcgccttcgtgcatgatgtttgcgacgacggcctcccctatccctttcctgacggaatactggatgtgatcctcctcgtgttcgtgcttagttccatacatccagataggactctgtttatctag

SEQ ID NO: 29373 - DNA, 630 bp, synthetic construct
  source 1..630: mol_type = other DNA; note = Synthetic coding sequence
atgaagaaggttcggcttaaagagctggaatcacgtctccagcaggttgacggcttcgagaaaccgaagcttctgctggagcaatatcctacacgcccacatatcgccgcttgcatgctctacacaattcataacacgtacgacgatatcgagaataaggtggtcgccgatctggggtgtggctgcggggttctctcgatcggcaccgcgatgcttggggcaggcttgtgcgtgggtttcgacattgacgaggacgctctcgagatcttcaatcgcaatgcagaggaattcgagctgacaaatatagacatggtacaatgcgatgtgtgtttactgtctaatcggatgagcaagagctttgatacggtcattatgaaccccccatttggcacaaagaacaacaaaggaaccgatatggcctttttaaagactgctctggagatggccaggactgcagtgtactccctccacaagagcagcacacgggaacacgttcaaaaaaaggccgcagagtggaaaatcaagattgatattatcgccgaactacgctatgacctgcctgcctcctataagttccataagaagaagtcagtggacatcgaggtggatttgattcgtttcagtttctag

SEQ ID NO: 29374 - DNA, 504 bp, synthetic construct
  source 1..504: mol_type = other DNA; note = Synthetic coding sequence
atgccagcttatcactcgagcctgatggaccccgatacgaaacttattggcaatatggcccttcttcctatccgatcccagttcaaaggaccagcgcctcgtgagacaaaggatacagatatcgtggatgaggctatttactactttaaggccaatgtattttttaaaaactatgagatcaagaacgaggcagaccgtaccctcatatacattactctttacatctccgaatgccttaaaaaacttcagaagtgtaactccaagagtcagggcgagaaagagatgtacaccttaggaataacaaacttcccaatccccggagagcctggttttcccctaaatgctatctatgctaagcctgccaataaacaggaagacgaggtcatgcgtgcctatcttcagcagcttcgtcaggagactggtctgagattgtgtgagaaggtgatcaaaggagacctcaagttctcagccgcactcaagctagccctcaataagaacaagtag

SEQ ID NO: 29375 - DNA, 4074 bp, synthetic construct
  source 1..4074: mol_type = other DNA; note = Synthetic coding sequence
atggctgataccgatttgttcatggagtgcgaggaagaggagctcgagccctggcagaaaatctctgatgtgattgaggacagcgtggtcgaggactataattccgtggataaaacaactacagcaggcaatcccctggtacagcagggaggtcaaccgcttatcctgactcaaaatccagctcccggtctgggaactatggtgactcagcccgtcctacgcccagtccaggtgatgcagaacgctaaccacgtgacatccagccctgtggcaagtcagcccatctttatcaccacgcagggctttccagtgcgaaacgtgcggcctgtgcagaatgccatgaaccaggtcggcatagtgttgaacgtgcaacagggacagactgtacgtcccataactctggtccctgcccctggcactcagtttgtgaagcctaccgttggcgtcccccaagtgttttcgcagatgactcctgtgaggcctggatcaaccatgccggttcggcctacaaccaacacctttacaacagtgatcccggcaacgctcacaattaggtcaacagtgccacagtcccagtcacaacagactaagtcaaccccctcaacctcaacaactcccacagcaactcaacctacttctttggggcagctggcggtgcaatcaccaggacaaagtaatcagactaccaaccctaaattggcacctagttttcccagtcccccagccgtcagcatcgctagcttcgttacagtaaaacggccaggtgtgactggcgagaactctaatgaagtagcaaaactcgtcaacactctgaataccatcccgagcttaggtcagtcaccgggtcccgtggtggtcagcaataacagctccgcacacggtagtcagcggaccagcgggcctgaaagcagtatgaaagtgacatcaagtatcccggtgtttgacctgcaagacgggggacgtaagatttgtcctcggtgcaacgcacagttccgtgtgaccgaggccctgcgaggacacatgtgctactgctgtccagagatggtggagtatcagaagaaaggaaagagcttggattccgaaccatcagtccccagcgcagccaagccacccagtcctgaaaagaccgccccagtcgcctccactccctctagcacccccatccctgctttgagcccacccaccaaggtgcccgagccaaatgagaatgtgggtgacgccgtgcagaccaagctcatcatgttggtggacgatttctactatggaagagatggaggaaaggtggcacaactcaccaactttccaaaagtggcgacttccttccgctgccctcactgcaccaagcgtctgaagaacaatatcaggttcatgaaccacatgaagcaccacgtggagctggatcagcagaacggtgaggtggatgggcatacgatctgtcagcattgctatcgacagttcagtaccccgttccagctgcaatgtcaccttgaaaatgtgcactcaccctatgaatctaccactaaatgtaagatctgcgagtgggcctttgagagcgagccactattcctccagcatatgaaagacactcacaagccaggagagatgccttatgtctgtcaggtgtgccagtacagaagttccctatactctgaggtggacgtccattttcggatgatccatgaggacactcgacacctcttatgcccatactgcctcaaagtctttaaaaacggcaatgcctttcaacaacattacatgcggcaccagaagcgaaacgtataccactgcaataaatgtcgccttcagtttctgttcgccaaagacaagattgagcacaagctgcaacatcacaagacatttaggaagccaaaacagctggagggattgaaacccggaaccaaagtgactataagagcctccagagggcaaccacggaccgttcctgtctctagtaatgacacccccccaagcgcgctgcaggaagctgcaccactgaccagctctatggaccctctcccggtatttttatatccacctgtccaacgatcgatccaaaagagagctgtcaggaagatgtctgtcatgggtcgtcagacttgccttgagtgttcttttgagattcccgatttcccaaaccacttccccacctatgtccattgctccttgtgccgatacagtacctgttgttcacgcgcatacgctaaccacatgattaataatcatgtacctcggaagtcccctaagtatctggctctctttaagaatagcgtcagcggtatcaagctggcttgtacatcgtgcacattcgtgacatccgtcggggacgctatggccaagcacctagtgttcaatccatctcaccgctcctccagtattctgccacgcggactcacatggatagctcattcgcgccacggtcagacaagggatagggttcatgatcgtaatgtgaagaacatgtacccccctccatcttttcctacaaacaaggctgcaaccgttaagagtgccggtgccacccccgcagaacctgaggaactgctgaccccacttgctcctgcactgccttcacctgcaagcactgctacaccaccacccactcccactcatccccaggcattagccctgcccccacttgccaccgaaggggctgagtgcctgaatgtagatgatcaggacgaagggtcaccagtcacacaggaacctgagctagcatcaggtggcggtggatctggcggagtcgggaagaaagaacagttgtctgtgaaaaaattgcgggtggtgttatttgctctgtgttgcaacaccgagcaagccgcagagcattttaggaacccccagcggcgaattagacgttggctgcgcaggtttcaggcctctcagggagagaacctcgagggcaagtacctttcgttcgaggcagaagaaaaactagccgagtgggtgctgacccagcgcgagcagcaactgcccgtgaatgaagaaacgctgttccagaaggccaccaaaattggcagaagcctagaaggcggttttaaaatctcttatgaatgggcagtcagattcatgctacggcaccatttgacgccccatgctagaagagcggtggcccacactctgcctaaggacgtggcagaaaatgccggtttgttcatcgattttgtccagaggcaaatccataatcaggatctgcctctctccatgatagtagctattgatgagatttctctcttccttgacaccgaggtgctgtcatcggacgacagaaaggagaatgcacttcaaacagtggggactggtgagccatggtgcgacgtcgtgctagccatactcgcagacggcacagtgctgccaacactggtcttctatcgtggacagatggaccagccagccaacatgccagatagtattctgttagaagctaaggagtctgggtactccgacgatgaaattatggaattgtggtccactcgcgtgtggcagaaacataccgcgtgtcaacgctccaagggaatgctggtcatggattgtcatcggacccatttaagtgaagaagtcttggccatgctcagcgcctccagtacccttccagccgtggtgccagccggttgttcttctaagatccagcccctcgatgtttgtatcaagaggactgtgaagaattttctacataaaaagtggaaggagcaggccagggaaatggcagacactgcctgtgattctgatgtccttctccagctggtactggtttggctgggtgaagttctgggtgtgattggggattgtcctgagctggtccagagaagcttccttgtcgcatcagttttacccggacccgacgggaacataaacagccctacccgcaatgcagacatgcaggaggaactgatcgcctcccttgaggagcagctgaaactctccggagaacactcagaatcctctactccacgccctagatcttcgccagaggagactatagagcctgagtcgctgcaccaactattcgaaggcgaatcagaaactgagagcttctacggttttgaagaggcggacttggacctgatggagatttag

SEQ ID NO: 29376 - DNA, 288 bp, synthetic construct
  source 1..288: mol_type = other DNA; note = Synthetic coding sequence
atgctgaaaaacaagggacactccagcaaaaaagataatctggccgtaaatgccgtggccctgcaagatcatattctacacgacctgcaactgaggaacctgtctgtggccgaccattccaagacccaagtgcaaaaaaaagagaataaatcgctgaagagagatacaaaagccattattgacactgggcttaagaagacaacacagtgccctaagctagaggattctgaaaaggaatacgtgcttgaccccaaacctcccccactgactctcggctaccacagctag

SEQ ID NO: 29377 - DNA, 708 bp, synthetic construct
  source 1..708: mol_type = other DNA; note = Synthetic coding sequence
atgctcaaaaacaaaggccattcctcaaagaaagataatctggctgtgaatgccgtcgccttacaagaccacattttacacgacctccagttacggaatctgtccgttgccgaccattcgaagacacaagtgcagaagaaggaaaacaagtctctgaagcgggataccaaagcgataatcgataccggactgaaaaaaaccacccagtgtcccaaactcgaagacagcgaaaaagaatatgtcttggatccgaaacccccacccctgacactggctcaaaagctgggcttaatcggcccaccccctcctccactctcaagcgacgagtgggagaaggtcaaacagcgctcactgctccaaggcgacagtgtacaaccatgcccgatctgcaaagaagagtttgaactgcggcctcaagtactcctctcttgcagtcatgtgttccataaggcgtgtctccaagcctttgagaaattcactaataagaagacatgccctctgtgtcgtaaaaaccagtaccagacccgagtgattcacgatggcgctcgcctattccgcataaagtgtgtgacccgaatccaagcttattggagaggatgtgtggtaagaaagtggtatcgaaacctccgtaaaaccgtcccgccaacagacgctaaactgagaaagaagttctttgaaaagaagacccaggactggaaacccgcatag

SEQ ID NO: 29378 - DNA, 1089 bp, synthetic construct
  source 1..1089: mol_type = other DNA; note = Synthetic coding sequence
atgctcaaaaacaaaggacatagctctaagaaagataatcttgctgttaatgctgtggccctgcaggaccacatattacacgatttgcagctaagaaacctgtcggttgcggatcactctaaaacacaggtccagaaaaaagagaacaagtcacttaaacgtgacacgaaggctatcattgacacaggcctaaagaaaaccactcaatgcccaaaactggaagatagcgagaaggagtatgtactggaccctaaaccccctcctttgactctggcccaaaagttggggctcattggacccccaccccctcctctttctagtgatgagtgggaaaaggtgaagcagcgatcactgctgcagggcgactccgtgcagccttgccccatatgcaaggaggagttcgagctccgcccacaggtcctattgtcttgttctcacgtgttccacaaggcctgcttacaggcattcgagaaatttaccaacaaaaagacctgccctctctgtcgaaagaatcagtaccagaccagagtgatccacgatggagccagactgttccggattaaatgcgtgacgaggatccaggcctattggagaggttgtgttgttcgcaagtggtatcgaaacctgcggaaaaccgtgcctcccacagatgctaagctgcggaaaaagttctttgagaagaagtttactgagatctcccatcgcatcctgtgcagctataatacaaatatcgaggaattgtttgccgagattgaccaatgtctcgcgatcaatcggagtgtgttgcagcaactggaggagaaatgcggccatgaaatcactgaagaggagtgggaaaagatacaggtgcaggccctcagacgggaaacccatgaatgcagtatttgtctggctccactctctgccgctggagggcagcgggtcggagctgggaggagatcccgggagatggccttactatcatgttcgcacgtctttcaccatgcatgcctccttgctctggaggagtttagcgtaggcgaccgtccgcctttccatgcatgccccctgtgtagatcctgttatcagaagaagattctggaatgctag

SEQ ID NO: 29379 - DNA, 1278 bp, synthetic construct
  source 1..1278: mol_type = other DNA; note = Synthetic coding sequence
atggataagaatatcggggaacagctgaacaaagcttacgaagctttcagacaggcctgcatggatcgggactccgctgtgaaagaactccagcagaagaccgagaactacgagcaacgaattcgcgagcaacaagagcagctgtctctgcagcagacaataatagacaagctgaaatctcagctgctgttggtgaatagtacccaggacaacaactacgggtgcgtgccactcttggaggatagcgaaacacgcaagaataacttaacgctggaccagcctcaggacaaggtcatttctggaatcgccagggaaaagctccctaaagtgcgtcggcaggaagtgtcgtccccaagaaaggagacatcagcacgatctttggggagtcctcttctccacgagcgtgggaacatcgaaaagaccttctgggatctgaaagaagagtttcataagatatgtatgttagcaaaagcccagaaagatcatttatccaagctgaacatcccggacaccgcaacggagacacagtgctcagtcccgattcagtgcaccgacaagacagataagcaggaagcattgtttaaaccacaagcaaaggacgatatcaatcggggtgctccctccataacaagcgtgaccccccgaggactgtgtagggacgaagaggatacatctttcgaatccctgtcaaaattcaatgtgaagttcccacctatggacaacgatagcacattcctgcactcaactcccgagagacccggaatattgagccccgcaactagtgaagcggtgtgccaggagaagttcaacatggaatttcgcgacaatcctggtaatttcgttaaaactgaggaaactttatttgaaatacagggaatcgaccctatcgcttctgcaatccagaatttaaagaccactgataagacaaagccttcgaacctggtaaacacttgcattcggacgaccctggaccgggctgcatgcctccctccaggagaccataatgccctgtatgtgaattctttccctttgcttgatccctcagatgcaccttttccgagcctggattctcccggaaaggccattcggggtccgcagcagccaatttggaagcccttccccaatcaggattcagatagcgtggtgctgtcaggcactgacagcgagctgcatattccacgtgtttgcgagttttgccaagccgttttccctccatccattacatctagaggagattttctacggcacttgaattctcatttcaacggtgaaacttag

SEQ ID NO: 29380 - DNA, 639 bp, synthetic construct
  source 1..639: mol_type = other DNA; note = Synthetic coding sequence
atggctccgtgggggaagcgcctggctggcgttagaggtgtactactggacataagcggagtgctttacgatagtggcgcaggagggggaactgctatcgcagggtcagtagaagcagttgccagactgaagcgctcgcgcctgaaggtgcgtttctgcacaaatgaatcccagaagtccagagcagagttagtgggccagttgcagagactcggatttgatatcagtgagcaggaggtgacagcacctgcacctgccgcatgtcagatcctcaaggaacagggactgcgcccttacctcctgatacacgatggcgttcgaagcgaattcgatcaaatagacacctctaatccaaactgcgtggtcattgcggatgctggcgaaagctttagttaccagaacatgaataacgcatttcaagtccttatggagctggagaaacctgtgctgatatcgcttggcaagggtcggtactacaaggagacatctggcctcatgcttgatgtcgggccttacatgaaggctctggagtatgcctgcggcataaaggctgaggtagtcgggaaaccatctcccgaattctttaagagcgctcttcaagctattggtgtggaagcccatcagcttctctccgtatag

SEQ ID NO: 29381 - DNA, 2868 bp, synthetic construct
  source 1..2868: mol_type = other DNA; note = Synthetic coding sequence
atggaagttggatctgaggaggaaaagtgggaaaaacttgacgcagagtttgaccacttcgtggtcgatatgaaacctttcgtgctgaaactgccccacagaaccgaacgccagaggtgtgctctgtggatccgcaagctgtgtgaaccaagcgggacaggggctgggattatgggcagaaagaatcgtaatctctacgccaagcttctgttgcatatgctgaaaagaggtgccctggaagggcctttcactcaccgccctgagcctggcaccctgaaaattctgcctagttatatgtctatttactttgacgaacccaaccctgcccgagcgaaagggagctccccagaaggtctccccgcttgggttctgggggaactcgaaacgagcgagcataagttgaatgagagttggaaactatctagcggggaagacaacaccctggtccagagcccgactgatgtatattccagggagcagtacacgggcaaactccgcgttcgaagtcatagtctgtctccgacacatagagaggacggacagaacataactccaaagatttgcgaggtgtacagtaagaagtctccagtgtccttagacgactccgatatagaggccaggcttaattcgtggaacctcggaatcgaaaaccccagatatctgaggcaaaagcctattccggtttccctgatgactccgaagttctcgcttaggaaaagttccagttttcacgatgatcacttcctctctaggatccgagaaaaggagctggacatgaaaactaagatgatggaggccaaatttcacgaggagaaattgaagctacagcaaaagcacgatgctgacgttcaaaaaatcctggagagaaagaataacgaaatcgaagagctgaagaccctgtatcgcagcaaacagcatgaaaccgaggagacgattaggaaactggaaaaaaaagtgcagactctgatccgagattgtcaggtgattagagagacaaaggaagaccagattgcagagctcaagaagatctgtgagcagtccaccgagtccctcaacaatgattgggagaagaagctacataacgccgtcgcagagatggaacaggagaaattcgatctccagaagcagcacacagaaaacatccaggaattgttagaggatacaaatgtccgcctgaataaaatggagtcagagtacatggcccagacacaaagcactaatcatatgatcaaagaactggaagcccgtgtgcagcaattgaccggagaagctgagaatagtaatctgcagcggcagaaactcattcaggagaaggcggaactggagaggtgttaccaaattacttgttccgagctccaggaagtcaaggcccgtaggaacaccctgcacaaggagaaggatcacttggtgaatgattatgagcagaatatgaagttgctgcagaccaaatatgacgcagacataaacctgctgaagcaagagcatgccctaagtgcctctaaagccagttcaatgatcgaggagttagagcaaaatgtgtgtcaattgaagcagcagctccaggaatcagagctgcaaagaaaacaacaactgcgtgaccaggaaaacaagttccagatggagaagtcccatttaaagcatatttacgagaagaaggcgcacgatctgcagagcgaattggacaaggggaaagaggatactcagaaaaaaattcataagtttgaggaagcccttaaagaaaaggaggagcagctcaccagggtcacagaggtccaacgccttcaagcccagcaggccgacgccgcactcgaggagtttaagaggcaggtcgaactcaactcagagaaggtgtatgctgaaatgaaagaacagatggagaaagtggaggctgatttgacaagatcaaagtccctgagagagaaacagtctaaagaattcctgtggcaactggaagatattcggcaacggtatgaacaacagatcgtggagctgaaactcgagcatgagcaggaaaaaacacacttactacagcagcacaatgcagagaaagactcgctcgtgagagatcacgagcgcgaaatcgaaaatctggaaaaacaacttcgggctgccaatatggagcacgagaaccagattcaggaatttaaaaaaagggatgctcaggtaatcgcggacatggaggcccaagtgcacaagctccgagaagaactgatcaacgtaaatagccaacggaaacagcaactggtcgaactcggattattaagagaggaggagaaacaaagagccacacgtgaacacgagattgtcgtgaataagctgaaagccgaatctgaaaagatgaagattgagctgaaaaaaacccatgctgctgagaccgagatgaccctggagaaagcaaattctaaactgaagcaaattgagaaagagtatactcaaaagctggcaaagtcctcccagattattgccgagctccagactacaatcagcagtctgaaggaagaaaactcccagcagcagctcgcagccgaaagacgactgcaggatgtgagacagaagtttgaggacgaaaaaaagcagcttattagggataacgaccaagccattaaagtacttcaggatgagctcgagaacagatcaaatcaggtgcgttgcgccgagaagaagctgcagcacaaggagctggagtctcaggagcaaataacctacattagacaagagtacgagacgaagctgaaaggccttatgccagcttcgcttcgtcaggaactcgaggatactataagcagcctgaagagtcaagttaacttcctgcagaagcgcgcaagcatcctacaggaggaattgaccacttatcaaggccgaaggtag

SEQ ID NO: 29382 - DNA, 1269 bp, synthetic construct
  source 1..1269: mol_type = other DNA; note = Synthetic coding sequence
atgccccgaaaaggcactcagcccagcactgcgaggagacgggaagagggcccaccaccaccttcccctgacggggcatcttccgatgcagagccagagcccccatcaggcaggaccgagtccccagccactgccgcagaaaccgcctctgaggaactcgataatcgtagcctggaggagattctgaatagcatcccccctccaccaccccctgctatgacaaacgaggccggagccccaagactgatgatcacccatattgttaatcagaatttcaagtcgtacgctggagaaaagatcctcggccctttccacaagagattctcatgcattatcggacctaacggatctggaaagagcaatgtgattgattctatgctgtttgtgttcgggtaccgagcacagaaaattcggtccaagaagctgtcggtgctgatccataactctgacgagcataaagacatccaaagctgcacagttgaagtgcactttcagaaaataattgacaaagaaggggatgactacgaggtgatccctaattcgaacttctatgtttctcggaccgcttgtagagataatacctccgtttatcatatttcaggaaagaagaaaaccttcaaggatgtgggcaatctccttagaagccatggcatagatctggatcacaacagatttctgatcctccaaggcgaagttgaacagatcgccatgatgaagccgaagggccagacagagcatgacgagggaatgcttgagtaccttgaagatatcattgggtgcgggcgattgaacgagcccatcaaggttctttgcagacgagtcgagatcctcaacgagcaccgtggagaaaagcttaatagggttaaaatggtagagaaggagaaggatgctctggaaggagagaagaatattgctattgaattcttaaccctggaaaatgagatatttaggaaaaagaaccacgtgtgtcagtattatatttacgagctccaaaagcgtatagctgaaatggaaactcaaaaggagaaaatacatgaggacacgaaggaaattaacgagaagtccaacatcttgagcaacgagatgaaagccaagaataaggatgttaaggacaccgaaaagaagctaaacaaaataactaagtttattgaggaaaacaaagaaaagttcactcagctggatctggaggatgtgcaggtgagagaaaagttgaaacatgccaccagcaaggccaagacgggcgagactacctcaaaacgcaaaaaatag

SEQ ID NO: 29383 - DNA, 303 bp, synthetic construct
  source 1..303: mol_type = other DNA; note = Synthetic coding sequence
atgagaaaacgcctctccgcccctgaattacggctgtctctcactaaaggccctggtaatgacggcgcttcacccacacagtcggcgccttcgtctcccgatggaagcagcgatttggaaatcgatgagctggagacaccatccgattcagagcagttggacagtggccacgaattcgagtgggaagatgagctgcccagagcggaagggttaggcacaagtgagacggcggagcggttgggtaggggttgcatgtgggatgttacaggagaggatggccaccattggagagtcttcagatag

SEQ ID NO: 29384 - DNA, 1059 bp, synthetic construct
  source 1..1059: mol_type = other DNA; note = Synthetic coding sequence
atgggcaaggttgagaacagcaaaagtgctcagggactggctggcttacgaaacctaggcaatacgtgttttatgaactccatcttgcagtgcctgtcaaatacgagagagctccgggactactgtctacagcggttgtatatgcgtgacctgcaccatgggtccaacgcccatacagcgttagtggaagagtttgcaaagctgatccagaccatatggacttcctcccccaatgatgtggtttccccttctgaattcaaaactcaaatacaacgctatgccccaaggtttgtgggttacaatcagcaggacgcacaggagtttctccggtttctactggacggcttgcacaacgaagttaatcgggtgaccctgaggcccaagagcaacccggaaaacttggaccatcttccagacgatgaaaagggcagacagatgtggcggaaatacctcgagcgggaagactcgcggatcggagatctgtttgttggccagctgaagtcctcactcacttgcactgactgtggctattgctctaccgtctttgacccattctgggatttgtccctccccatagccaaaaggggctaccccgaagtgacactgatggattgtatgcgtctgtttaccaaagaagacgtcttggacggagacgagaagcctacctgctgccgctgcagggggagaaaacgttgcataaaaaaattctccatccagagatttcccaagattctggttctgcatttgaaaaggttttccgagagtcggattagaaccagcaagctcaccacctttgtaaacttccctctcagagatctcgaccttcgcgaatttgcaagtgagaacaccaaccatgcagtctataacttgtatgctgtgtcaaaccactcaggaaccaccatgggcggtcactataccgcctattgccgtagcccaggcacaggcgagtggcacacttttaacgattcgtcagttacacccatgagctccagccaagtacgaacctcagacgcctatctccttttctacgagcttgccagcccccctagtcgcatgtag

SEQ ID NO: 29385 - DNA, 1497 bp, synthetic construct
  source 1..1497: mol_type = other DNA; note = Synthetic coding sequence
atggtgatcgaagaagtgaattttatgcaaaatcacctggaaatcgagaaaacctgccgcgagtccgcggaggcactggctaccaagctaaataaagagaataaaaccttgaagagaattagtatgctttacatggccaagctgggcccagacgtcatcacagaagaaataaacatagatgacgaggacagcacaaccgacaccgatggggctgcagagacctgtgtctccgtccagtgccagaaacagattaaggagttgcgcgaccaaattgtgagtgtccaggaggaaaaaaagatcctggccatcgagctcgaaaacctcaaaagcaagctcgtagaagtcatcgaagaggttaacaaggttaaacaagagaagactgttctgaacagcgaagtgttggagcagcgaaaagtgttagaaaagtgtaatcgcgtgtctatgctggcagtggaggagtacgaagagatgcaagtcaaccttgagcttgagaaggaccttcggaaaaaggccgagtcattcgctcaggaaatgttcattgagcagaataagctcaaacggcagtcccacctgcttctgcagagctctatccccgatcagcagttgctgaaagccttggatgagaatgcaaaactgacgcagcagttggaagaggagcgaatccagcatcagcagaaggtgaaggagctggaggagcaacttgagaacgaaaccttgcacaaagaaatacacaatctcaaacagcagctggaactccttgaggaggataaaaaggagcttgaacttaaataccagaattctgaggaaaaagctaggaatctaaagcactccgtcgacgagcttcagaaacgtgtcaaccagtcagagaatagcgtgccaccgccaccccctcccccacccccactgcctcctccccctcccaatccgatcaggtctctcatgtccatgattcgtaagcgctcccatcccagcggaagtggtgccaagaaagaaaaggccacacagcccgagacaacagaggaggtcactgacctgaagcggcaggccgtggaagagatgatggatagaataaagaaaggggtgcatctgcggcctgtaaaccagactgcacgccctaaaacgaagcccgaatcatcaaaaggatgcgagtcggcagtggacgaactgaagggcattctcggtaccctcaataagtcgactagttctaggagcttgaaaagtttggatcccgagaatagcgagaccgagctggagagaattctgaggcgcaggaaagtcacggctgaagccgattcgagttccccaacaggaattcttgctacctcagaaagcaagtctatgcccgtgctggggtcagtctcttccgtgactaagactgcactcaacaagaagactttggaagctgagttcaacagcccaagcccacccaccccagagcctggcgaagggcctaggaaactcgaggggtgcacctcatcgaaagtcacttttcagtag

SEQ ID NO: 29386 - DNA, 1950 bp, synthetic construct
  source 1..1950: mol_type = other DNA; note = Synthetic coding sequence
atgaattcaagcgatgaggaaaaacagctgcagctgattactagcctcaaagaacaggctataggagaatatgaggacctgcgtgccgaaaaccagaagaccaaagagaagtgcgacaaaattcggcaggagcgggacgaggccgtgaagaagctggaggaattccagaaaatttcacacatggttattgaggaggtgaacttcatgcagaaccacctggagatcgaaaaaacatgtcgagagagcgccgaggcgcttgccacaaaactcaacaaagagaataagactctcaagaggatttcaatgctctatatggcaaaactgggacccgatgttattacagaagagatcaacatcgatgatgaagatagcaccacagacaccgacggcgctgcggaaacctgcgtcagcgttcagtgtcagaagcaaatcaaggaactgcgggatcagattgtctctgtgcaggaagaaaagaagattctggctatagaattagagaatctgaagagtaaactggtggaggtgatagaagaagtgaacaaagtaaagcaggaaaaaactgtactcaactctgaggttctcgagcagcgcaaggtgttagagaagtgtaaccgtgtgtccatgctggcagtggaagagtacgaggaaatgcaagtcaacctcgagctagagaaagaccttagaaaaaaggccgagtccttcgcccaggagatgttcattgagcagaacaaactgaagcggcagagtcatctgctgctgcagagctcaattcctgaccagcaactcctgaaagcactggatgagaacgctaagcttactcagcagctggaggaagagcgcattcagcatcagcaaaaagtgaaagagttggaagaacaactggaaaacgagacactgcacaaggaaattcacaaccttaagcagcagcttgaacttctcgaagaagacaaaaaggaattggagctgaagtaccagaattccgaggaaaaggcacgtaatttaaagcactctgtggacgaactccagaaacgcgtgaatcagtcagaaaacagtgtccctcccccacctccaccccctccccctctgccaccccctccccctaaccctattcggagcttgatgtctatgatccggaagaggtcccatccaagtggctctggggcaaagaaagagaaagctacccaaccagagacgacagaggaggtgactgacctcaagaggcaggctgtagaggagatgatggaccgcatcaaaaaaggcgtccacctccgccctgtcaatcagacagctcggccaaaaactaagccagagtcaagcaaaggctgcgagagcgccgttgacgagctgaaagggatactgggaacactgaataagtccacaagttcgaggtctctcaaaagcctggatccagaaaatagcgagaccgagctcgagaggatcctgcgcagacggaaggttactgcagaagccgattcctcaagcccaaccggaattttggccacgtcagaatctaaaagcatgcccgtgctcgggtccgtcagctctgtcacaaaaactgctctcaacaaaaaaactctggaggcagaatttaattctccaagccccccaactcccgagcctggcgaaggaccaagaaagctcgaaggctgtaccagcagcaaagtcacctttcaaccgccaagttctatcggttgtagaaagaagtatattgatggcgaaaagcaggcagagccggtggtggtgttagatcctgtctccactcatgagccgcaaacgaaggatcaggtcgcagaaaaagatccaacccagcacaaggaggacgagggtgaaatccaacccgaaaacaaggaagacagtattgaaaacttcttcccttttcacttcgggttcgagggcgtgctccctctcgccggagtgaccttgagtacgaaggctcgtgaccccaagtag

SEQ ID NO: 29387 - DNA, 837 bp, synthetic construct
  source 1..837: mol_type = other DNA; note = Synthetic coding sequence
atgggcaagtcctctgagtggtgcgaaagaattgcaggcatccaaaagttcgtcttggagaaatggacaaaaaaagcaaagccggaggacacgcttaacctgtgccagctcctgaataacgaccttgccagtactgttgtctcctaccccagaaggttcgtgggcctgggcaccttgccgatgcaagcgccagaacttgcggtaaaggaaatggagagatgcgtaaaggagctcgggttccctggtgtccagatcggcacacatgtcaacgagtgggatctgaacgcacaagagttgttccctgtttacgctgccgctgagcggctgaaatgtagtctttttgtgcatccttgggacatgcagatggacgggcgaatggccaagtactggttgccctggctggtgggcatgccggctgagactactatcgcgatttgcagtatgatcatggggggagtgtttgagaaatttccgaagttgaaagtctgctttgctcacggtggcggagcatttccattcaccgtggggagaatttcccatgggttcagcatgagacctgacttgtgcgcccaggacaaccctatgaaccctaaaaagtacttgggatccttttacactgacgcgcttgtgcatgaccctctgtctctgaaacttctcaccgacgtgatcggcaaggataaggtcatactcggaaccgactaccccttcccattgggagaactcgagcccggtaaattgatcgaatctatggaagagtttgacgaggaaacaaagaataaactcaaggccggaaacgctcttgctttcttgggcctggagagaaaacagttcgaatag

SEQ ID NO: 29388 - DNA, 1368 bp, synthetic construct
  source 1..1368: mol_type = other DNA; note = Synthetic coding sequence
atgtttaccgaaggagaggaaatgtatctgcagggttctacagtctggcaccccgattgtaagcagtcaaccaagacagaggagaagctaagactaccaaacatccggaggtcatcctccgatttcttctatagtaagagcttgattagacgaacaggccgtagtcctagcctacagccgactcgcactagttcagaatccatctattccagaccaggcagctccatccccggttcgccaggtcacaccatctacgctaaagtagataatgaaatcctcgactataaagacctggcagcaattcctaaagtgaaggccatctacgacatagaaaggcccgacctcatcacatacgagcccttctatacctccgggtatgacgacaaacaggagaggcagtctctgggagaatcacctcggaccctttcaccaactccaagcgctgaagggtaccaggacgtgcgagacaggatgatccacaggtccaccagtcagggtagcatcaactcacccgtctactcgcggcattcatatacccccactacttcacgaagcccccagcactttcatcgacctgatcagggaataaacatttacaggaagcctccgatatacaagcagcacgctgctctagccgctcagtccaaatcatctgaagatattattaaattttcaaaattcccagctgcccaggcacccgatccgtccgaaactcccaaaatcgagaccgaccactggcctggcccaccaagttttgctgtggtcggccctgacatgaaaaggcgatcgtccggcagagaagaagatgatgaagagctgctgcgtcgtagacagcttcaggaggaacaactgatgaagttgaactcagggctgggccagctgattctgaaggaagagatggagaaagaatctcgggagcgttcaagcctgttagcgtcacgctatgacagccccatcaattcagcgtcccatattccctcctcgaagacagccagtctgcctggctatggacgcaacgggttacatcgcccagtgagtacagattttgcacagtacaattcgtatggcgacgtgtcaggtggagttcgggactaccagacattgccagatggccacatgccagcaatgcgcatggacaggggagtgtctatgcctaacatgcttgagcccaagattttcccttacgagatgctgatggtgacaaatcgcggacggaacaaaatattgcgcgaggttgatcgaacgcgcttggagagacatttagctcccgaggttttccgcgagatctttggcatgtctattcaagagttcgaccgactacccttgtggaggagaaacgacatgaagaagaaggcgaaactgttttag

SEQ ID NO: 29389 - DNA, 1959 bp, synthetic construct
  source 1..1959: mol_type = other DNA; note = Synthetic coding sequence
tagtctcatgccttcattagtcagtgggtgtgcagacattggcgggaccccgtcgcacatccccaggatcctcaccacccgtccgaaaaaccagtgattcactgccataaatgcggggagccctgtaaaggagaggttctccgggtgcaaacaaagcactttcatattaaatgcttcacttgcaaggtctgcggctgcgatctggcccaaggcggtttctttatcaagaacggcgagtacctttgcacgttagattaccaccctaactgcttcgcctgtaccatatgtaaacgaccattccctccgggagatagagtcacctttaacggacgcgattgcctttgtcaattatgcgcacagccaatgagcagttctcccaaagagaccaccttttcgagtaactgcgcgggttgtggacgggatataaaaaatggccaagccttgctagcacttgacaagcagtggcacttggggtgctttaaatgcaagtcttgcggaaaggtcctaacaggggaatatatcagcaaagacggggctccatactgtgagaaagattaccagggacttttcggggtcaagtgcgaggcctgccaccaatttattaccggcaaagtgctggaggccggagacaagcactaccatccaagttgcgcccgttgtagtagatgcaatcagatgttcacagaaggggaggagatgtacctgcagggtagcacggtgtggcacccagattgcaagcaaagtaccaagactgaggagaagcttcgaccgaccaggactagtagtgaatccatctactctagacccggttcgtctatccctggaagcccgggacacacaatttacgctaaggtggataatgaaatcttagactacaaagatctggccgcaatcccaaaagtgaaagcaatatacgacatagagcggcctgacctgatcacatacgaacccttttacacatctggctacgacgataagcaggaaagacagagcctgggagaaagcccccgaacactttcaccaaccccaagtgctgaagggtatcaggatgtcagggacagaatgatccaccggtcaaccagtcagggatccataaatagcccagtctatagccggcacagctatactccaacaaccagcagaagcccccagcacttccaccgtccggatcagggtataaacatctaccggaaaccccctatctataaacaacacgcagccctggccgctcagagtaagagtagcgaggatatcattaagtttagcaagttccccgcagcgcaggccccagaccctagcgaaactcctaagattgagaccgatcactggccgggtcccccttccttcgctgtggtgggtcccgacatgaagagacggtcgagcggacgggaggaggacgatgaggagctcctgcggagacggcagctgcaagaggagcagctcatgaagttgaatagcggtttggggcaactgatcctgaaggaggaaatggaaaaggagagcagggaaaggtccagccttctcgcctcgcgttatgattctcccattaactcggcttcacatatccctagcagtaaaacagctagcctccctggatatggcagaaacggattacaccgaccagtgtctaccgacttcgcgcagtataattcatatggcgacgtgagcggtggggttagagattaccagacactgcccgacgggcatatgcccgctatgagaatggatagaggggtgtctatgccaaatatgcttgagcccaagatttttccatatgaaatgctaatggttactaacagggggagaaacaagatcctgagggaagttgatcgtacccggctggagagacacctggctcccgaggtttttagggagattttcggaatgagcattcaagaattcgacagactgcccctatggagaagaaatgacatgaagaagaaggctaagctcttctag

SEQ ID NO: 29390 - DNA, 837 bp, synthetic construct
  source 1..837: mol_type = other DNA; note = Synthetic coding sequence
atgacccagcaatggagagaagttaacgaggacagagaggctgttgctcaggctagatcttggcaaagccttaacctcggagatcgagacatgggcgtgtctttcattgagaccgcactggcactgagcgccgctcgtgctcgcagaccattgctcacttcacaccccccaagccgtcctttccagccgccaaaacacacaccgtctccaccacccgctcctagggtcaactcaaggcacccaggtcgcagtgtcagcctgtctttaccttccgccagtcaggccccacccgttcctctggcctctccagagggacgacctcacacagttggtgccccacatgcctcgacatggaaaagaacaaggggacgccagcgggcaaggccacctaaaattgttaaagaagccgaagtgcctcaggccgcattgggagtgcccgctcaagggacaggggacaatggccatacacccgtggaagaagaggtcggagggatccctgtgcctgcaccgggtcttctgcaggtgaccgagcgcagacagcctctatcaagcgtctcttctctcgaagtgcacttcgacctcctcgatctgaccgaactgacagatatgtccgaccaagaactggcagaagtgttcgctgactctgacgacgagaatctcaatactgagagtcctgcaggactccaccctctgccgcgtgcgggatatctaaggagcccttcttggactaggactagggcagagcagtcacacgagaagcagcctctgggtgatcctgagagacaggcaaccgtgcttgatacatttctgacagttgaacggccacaagaggattag

SEQ ID NO: 29391 - DNA, 540 bp, synthetic construct
  source 1..540: mol_type = other DNA; note = Synthetic coding sequence
atgacagacttggttgcggtctgggatgtggctctatcagacggcgtgcacaaaatcgagttcgaacatggtacgacctcaggcaagagggtcgtctacgttgatgggaaggaagaaatacgaaaagaatggatgtttaagctcgtcgggaaagagaccttctacgttggggcagccaaaaccaaagccacaatcaacatcgacgcgatcagtggatttgcttacgagtacactctagagatcaatggtaagagcctgaaaaaatatatggaggaccggtccaaaacgaccaacacctgggtactgcatatggatggcgagaacttcaggattgtactcgagaaagacgcaatggacgtttggtgtaacggcaagaagctcgaaacagcgggagagttcgtggatgatggcacagaaacacactttagcattggcaaccacgactgctacataaaggccgtctccagcggcaagcggaaagagggtataattcatacactgattgtggacaatcgagaaataccggaaatcgctagttag

SEQ ID NO: 29392 - DNA, 540 bp, synthetic construct
  source 1..540: mol_type = other DNA; note = Synthetic coding sequence
atgaccgacctggtagcagtttgggacgtcgcgctgagtgacggggttcataagattgagttcgagcacgggaccacctctgggaaacgagtggtctatgtcgacggtaaggaagagatacgcaaagagtggatgttcaagttagttggcaaggagaccttctacgtcggggctgctaaaaccaaagccaccatcaatatagatgcaatatcaggtttcgcctacgaatacactctggagattaatggcaagtccttaaagaagtatatggaggaccgcagcaagacaaccaacacatgggtgttacacatggacggcgagaatttccggatagtgttggagaaggatgctatggacgtctggtgtaacggcaagaaattggaaactgccggagaattcgtcgatgatggcacagagacccattttagtattggcaaccacgactgctacattaaagcagtgagttccgggaaaaggaaagaaggcataattcacacgcttatcgtcgataatcgagagatccccgagattgccagttag

SEQ ID NO: 29393 - DNA, 1053 bp, synthetic construct
  source 1..1053: mol_type = other DNA; note = Synthetic coding sequence
atggggccttgtaatcttagtagcgcagcgggacccaccgccgaaaagtcagttccttaccaaagaacactaaaagaggggcaaggaacatctgtcgtggcgcagggaccatctaggccccttccttctaccgctaatgtcgtggttatcgggggagggtcccttggatgtcagactctgtatcacttggcgaaactgggaatgtccggagcagtgctgctggagcgggagagactcacaagtgggaccacatggcacactgccggactcttgtggcaactgcgcccttccgacgtcgaggttgaactattagcgcacactcgccgagtagtgtctcgagagcttgaggaggaaaccggattgcacaccgggtggatccagaacggcggactattcatagcctcaaatcggcagaggctcgatgagtataaacggctcatgagtctcggcaaggcgtacggagtagaatctcacgtgctgagccccgctgagaccaaaacattgtaccccttgatgaacgtcgacgacctttatggaactctttacgtgcctcatgacggcaccatggaccccgctggtacttgtacaacactggctcgcgctgccagcgctcgcggagcccaggtgatcgagaattgcccagtgacaggtatacgagtgtggacagatgacttcggtgttcggagggtggcaggagtcgaaacacagcacgggtctatccaaacaccctgcgttgtgaattgcgcaggcgtctgggccagtgccgtggggcgaatggcaggggtgaaggtccccctagttgccatgcaccacgcatacgtggttacagagcggatcgaagggatccagaatatgccgaatgtcagggaccacgatgctagtgtttacctgcggctgcagggggatgccctcagtgtcgggggatacgaggccaaccccattttctgggaggaagcggtgaagtaccgccctagggctgccggaggtctttgtctgaaaaccagcacagagaaggtatgtgctgtgtggtccgacgatctgaggagggcttag

SEQ ID NO: 29394 - DNA, 2001 bp, synthetic construct
  source 1..2001: mol_type = other DNA; note = Synthetic coding sequence
atggccagagcgggaagctgtggaggcgcagccgctggcgcaggaaggcctgagccctgggaattgtcgctggaagaggtcctcaaagcatacgaacaacctttaaacgaggaacaggcatgggccgtgtgtttccagggctgccggggactgaggggaagtcctgggaggcgactgcgagatacaggcgacctcctgctgcggggagacggaagcgttggcgctcgagaacccgaggccgctgaacctgccactatggtcgtccccctggctagcagtgaggctcagacagtgcagagcttgggtttcgcaatctaccgggcactggactggggcctggacgaaagcgaagagcgcgagctgagcccacagctcgagcggctcattgacctcatggctaataacgatagcgaggattctggatgcggcgcagctgacgaaggatatggagggcctgaggaagaagaagaagctgagggtgtgccaagatccgtccgaactttcgctcaggcaatgagactgtgcgccgcaagactgacggacccccgaggggctcaggcacactatcaagcagtgtgtcgcgctctattcgtcgagactcttgaactgagagccttcctcgctcgagttcgggaagccaaagagatgctgcaaaaactgagagaggatgaaccacatctggagacacccagggccgagttggacagcttgggtcatactgattgggctcgactttgggtacagctcatgcgggagttacgcagaggggttaagctgaagaaggtccaagagcaggaattcaatccacttccgaccgagtttcaacttacccctttcgagatgctgatgcaggatatcagggcgagaaattacaaattgagaaaggtcatggttgacggggacatacctcctcgcgtgaagaaggatgcgcacgaactgattctggactttatcaggtcccgccctcctctgaaacaagtctctgagaggcggctccgtccgttgcctccgaagcagcgaagcttacacgaaaaaattctggaggaaatcaaacaagagcgcagattgagacctgtaagaggcgaaggctgggccgctagaggatttggcagcctaccttgtattctgaacgcctgtagcggtgacgctaaatccacgagctgcatcaacttaagcgtcaccgatgccggtgggagtgctcagcggcctcgccctagggtcctcttgaaggctcccacgctcgcagaaatggaagaaatgaatacgtctgaggaagaagaatcaccttgtggagaagtaacattgaagcgggatagatccttcagtgaacacgacttagctcagctacgctctgaggttgcctctggcttgcaatccgccacccaccccccagggggtacagaacctcctcgcccaagggctggctccgctcatgtttggcgcccaggcagcagggaccagggcacttgtcctgcttcagtcagtgatccatcacaccctctgttgtctaatcgcggaagtagtggagatagaccggaggccagtatgactcccgatgcgaaacatttatggctggagttcagccacccagtcgagtctttggctctgactgtagaggaggtaatggacgtgcgcagggtgctggtgaaagccgagatggagaagttcctgcagaataaagaactcttttcatccctgaaaaaaggcaagatatgttgctgctgcagagctaaatttcccctgttctcttggccaccaagctgcctattctgtaagcgctccctccagggacctcaatggcagtcggttgaagaggctttccctcatatttatagccacggatgtgtcctcaaagatgtgtgctccgaatgcacaagctttgtggccgatgtggtgcgaagttcaagaaagtcagtggatgtgctcaacaccacaccacgacggtcaagacaaacccaatccctgtacattcccaatacaagaactctagacttcaaatag

SEQ ID NO: 29395 - DNA, 474 bp, synthetic construct
  source 1..474: mol_type = other DNA; note = Synthetic coding sequence
atggaaaccttacagagtgagacaaagactagagtgcttccatcttggctaaccgcccaagtggccactaagaacgtggctcccatgaaggcgccaaaaagaatgcgcatggctgcagtgcccgtggccgcagccagactgcccgcaactcgtacagtctactgcatgaatgaggctgagatcgtggatgttgcgcttgggatcctcatcgaaagtcgcaaacaagaaaaagcttgcgagcagcctgccctggccggtgcagacaaccctgagcactcccccccttgtagtgtcagtccgcatacatcttcaggttcttcgagcgaggaagaggattctggtaaacaggctttggcacctggcctgagcccttcccaaagaccgggagggtcatcttcagcctgttcccgatctccagaggaggaggaagaggaagatgtgttaaaatacgtccgtgagatcttcttcagttag

SEQ ID NO: 29396 - DNA, 804 bp, synthetic construct
  source 1..804: mol_type = other DNA; note = Synthetic coding sequence
atggccaattgcgagcgcacatttatcgccattaagcccgacggagtacagagaggcctggtgggagaaattatcaagcggtttgaacagaaggggttcagactcgtgggattaaagttcatgcaggcttccgaagatcttctcaaggagcattacgtggatttgaaagatcgacctttcttcgcgggactggtcaagtatatgcatagcggccctgtcgtggctatggtgtgggaaggactgaatgtcgtaaagacaggccgagtcatgctgggcgagaccaatcctgccgacagcaagcccggaacaatccgcggtgatttctgtatccaagtggggagaacaatggctaatctggagcgcacctttatcgctattaaaccggacggagtccaaagaggactggtaggagagataattaaacggtttgagcagaagggattcagacttgtggctatgaagtttctgagagcaagtgaagagcatctgaagcagcattacatcgacctgaaagaccgcccattcttcccaggcctggtcaaatatatgaactcaggaccagtagtcgccatggtttgggaaggcttaaacgtagtgaagaccggtagggtgatgctcggggagactaaccctgctgatagcaagcccggtactatccgaggtgacttctgcatacaggtgggaaggaatatcattcatggttcggactctgtcaagtcggcagaaaaggagatttccctgtggttcaagcctgaagaattggtggattataagagctgcgcccatgactgggtgtacgagtag

SEQ ID NO: 29397 - DNA, 879 bp, synthetic construct
  source 1..879: mol_type = other DNA; note = Synthetic coding sequence
atggtgctcctttccacactgggaatagtgttccaaggggaaggtcctcccatatcttcttgcgacacaggcacaatggcaaactgcgaacgtaccttcatcgccattaaaccggatggcgtgcaaagagggctcgtgggagagattatcaaacgattcgagcagaagggcttcaggttagtaggcttgaaattcatgcaggccagtgaagacctccttaaggaacattatgtggatttaaaggacaggccttttttcgccggactggttaaatatatgcactccggacctgtagtcgccatggtgtgggagggtttgaatgtggtcaaaacggggagggtgatgctgggcgagactaatcctgcggattccaaacccggaacgattcggggagacttttgcattcaggtcggtcgaacaatggctaacctcgagagaacgttcattgccatcaaacctgacggtgtccagaggggtcttgtgggggagatcattaagaggttcgagcaaaagggctttcggctcgtcgccatgaaattcctacgagccagtgaagagcacctcaagcagcattatattgatctgaaggaccgaccattcttccctggcttggtcaagtatatgaactccgggcctgtggtcgccatggtgtgggaagggctgaatgtcgtgaaaaccgggagagtgatgctcggcgagaccaaccccgctgattccaaaccaggcactattcgaggcgacttttgtatccaggtgggcaggaatattattcacggctcagattcagtcaagtccgctgaaaaggagatttccctctggtttaagccagaggagctggtggactacaaatcctgcgcccatgactgggtatatgaatag

SEQ ID NO: 29398 - DNA, 492 bp, synthetic construct
  source 1..492: mol_type = other DNA; note = Synthetic coding sequence
atgaaatcctctcagacattcgaggaacaaacagagtgtatcgtaaatacactactaatggatttcctgtctcccacactccaagtggcctctcgtaacctttgttgtgtggacgaagtggatagtggtgagccttgttctttcgatgttgccatcattgccggacgtctccgaatgctgggagaccaattcaacggcgagcttgaagcttctgccaagaatgtgatcgcagaaaccatcaagggccagaccggagccatccttcaggatactgtggaatctctctctaaaacctggtgtgcccaggacagctcactcgcctatgaaagagctttcctcgctgtgagcgtgaagctgctggagtacatggctcatatcgctccagaggtggtggggcaggtcgcaatcccaatgacgggaatgatcaacggtaatcaagcaattcgtgaatttatccagggccagggtgggtgggaaaatttggaaagctag

SEQ ID NO: 29399 - DNA, 558 bp, synthetic construct
  source 1..558: mol_type = other DNA; note = Synthetic coding sequence
atgggcaagaaacaaaacaagaaaaaggtcgaggaggtgttggaggaggaggaggaagagtatgtcgtagaaaaggtcctggacagaagagtggtgaagggcaaggtagagtacctgctgaagtggaagggtttctcagacgaggacaatacctgggaaccagaagagaatctggactgcccggacctgatcgccgagttcctccagtcccagaagacggcccatgaaaccgacaagagtgaaggcggtaaaagaaaagctgattccgactcggaggataaaggcgaagagtccaaacccaagaaaaagaaggaggaaagtgagaaaccgagaggcttcgccagggggctcgaaccagaacgcattattggtgccacggattcttctggggagctgatgtttttaatgaaatggaaaaattccgatgaggctgacctcgtccccgcaaaagaggccaatgtgaaatgcccccaggtggttatcagcttttacgaagaacggcttacctggcattcctaccccagtgaggacgacgacaagaaagacgataagaattag

SEQ ID NO: 29400 - DNA, 1350 bp, synthetic construct
  source 1..1350: mol_type = other DNA; note = Synthetic coding sequence
atgatgctggggacagagggcggagaaggatttgtcgtgaaagtgagaggcttaccctggagctgtagcgccgatgaggttcagcgctttttcagcgattgcaagatccagaatggcgctcaggggattcggtttatttatacccgcgagggacgacccagtggcgaggcctttgtggaactcgagtcagaagatgaggtgaagctcgccttaaaaaaggatagggaaaccatgggccacagatacgttgaagtatttaagtcgaacaacgtcgagatggattgggttctcaagcatacggggcctaacagccctgatactgccaacgatggcttcgtgcgcctgaggggccttccctttggatgctcaaaagaagagattgttcagtttttcagtggtctggaaattgtgccgaatggcatcactcttcccgtcgatttccaggggcgatccacaggagaagccttcgtgcagtttgcttctcaggaaatagctgaaaaggctctgaagaaacacaaagagcgcattggacatcggtacattgaaattttcaaaagcagcagagccgaagtccggactcattacgacccgccacgcaagctaatggccatgcagcgccctgggccttacgaccggcctggggcagggaggggatataacagcatcggcaggggcgctggcttcgagcggatgcggcgtggtgcttacggcggaggctatggtggatatgacgattacaatggctacaatgatggatacggcttcggttccgaccgcttcggtcgtgacctaaactactgtttctcaggaatgtctgaccaccgctatggcgatggaggaagtacttttcagtctacaactggccactgcgtgcacatgaggggacttccctacagagccaccgagaacgacatctacaactttttctccccgctcaacccagtccgcgtccacatagaaattgggcctgacggaagggtgaccggagaggccgacgtcgaattcgccacacatgaggatgctgtcgcagcaatgtcaaaagacaaagcaaacatgcaacaccggtatgtggaactcttcctcaatagcacagccggagctagtggcggagcttatgagcatcgctacgtcgagctctttctgaattctacagccggagcctcaggaggtgcctacggaagccagatgatgggcggaatggggctctctaaccagtcttcctacggcggtccagctagccagcagctgtccggcggttatgggggtggctacgggggtcaaagctccatgtctggctatgatcaagtgttacaggaaaatagtagtgactttcagtccaacatcgcctag

SEQ ID NO: 29401 - DNA, 741 bp, synthetic construct
  source 1..741: mol_type = other DNA; note = Synthetic coding sequence
atgagcggcgcaggggaggcgctcgctcccggacccgttggcccacagcgggtggccgaagccggaggaggacagctagggagcacggcccaaggtaagtgtgacaaagacaacacagagaaagatattacccaggccactaacagccactttacacacggcgaaatgcaagaccagtctatctggggtaacccctcagacggagagctcatccggactcagccacagagactgccccagctccagaccagcgcccaagtgccaagcggcgaggagatcggcaagatcaaaaatgggcacaccgggctctcaaatgggaacggcattcaccacggcgctaagcacggtagtgccgataacagaaagctgagcgcacccgtcagccagaagatgcatagaaaaatccaatcctctctctctgtaaatagtgacatatcaaagaagtccaaagtgaacgccgtcttcagccaaaagactggctcatctcccgaagattgctgcgtccactgcatcttggcttgtctcttttgtgagtttcttacactctgcaacattgtgctcggtcaggcctcttgtggcatatgtaccagtgaggcgtgctgctgctgctgtggggatgaaatgggtgacgattgcaattgtccttgtgatatggactgtgggattatggacgcctgttgcgagagctctgactgtctagaaatttgtatggagtgctgcggaatctgcttcccatcttag

SEQ ID NO: 29402 - DNA, 30 bp, synthetic construct
  source 1..30: mol_type = other DNA; note = Synthetic coding sequence
atgtcatactatcagcgtccattttcctag

SEQ ID NO: 29403 - DNA, 2001 bp, synthetic construct
  source 1..2001: mol_type = other DNA; note = Synthetic coding sequence
atgaacaccggacgagactctcagtcccccgactccgcaaaggggttcaggtccgtgagacctaacctgcaggacaagaggagccccacgcaatctcaaattaccgtgaacggtaactccggcggtgccgtgtcccctatgtcttactaccagagaccattctcaccatcagcctatagtctgcctgcctctctgaacagttcaatagtcatgcaacacggcacatctctcgacagcacagacacctacccccagcacgcccagtccttggacggcacaacgagcagttcaatacctctgtaccgctcctccgaggaagagaagcgggtcaccgtcattaaggcaccccactaccctggcataggcccagtggatgaaagcgggattcccacagcgattcgaactaccgtggatcgccctaaggattggtacaaaaccatgtttaagcagattcatatggtacataagccggacgacgacactgatatgtataataccccatatacctataacgccggtttgtataatcccccttatagcgctcagagtcaccccgcagcgaagacccagacttacaggccactctccaaatctcattcagacaattcaccgaacgccttcaaagacgcttcttcccccgtaccccctccacatgtgccacctcctgtgccccctctgaggccacgtgatcggagttccacggagaaacacgactgggatccccctgaccggaaagtagatacaagaaaattccggtctgaacctagatctatcttcgagtatgagcctggcaagagttctatattgcagcatgagagacccacggaccgcattaaccccgacgacatcgacctcgagaatgagccctggtacaagttctttagcgaactcgaattcggacggccacctccaaagaagcccctggactatgtgcaggaccatagcagcggggtcttcaatgaagcctccctgtaccagagttctatcgaccggtccctagaacggccaatgtctagtgcttccatggcatccgacttccggaagcggcgaaagtctgaaccagccgtgggccctcctcgaggacttggcgatcagtctgcctcccgcacttctcctgggagagtcgacttgcccggaagttcaactacgttaaccaaatcgtttacatcaagctcccctagctcccccagtagagccaaagatcgtgaatcacctagaagctattcgagtactctcacagacatgggcaggagtgcaccgcgagaacgccgtgggactcccgagaaggagaaactgcctgccaaggctgtatacgattttaaagcccagaccagcaaggagctttcttttaaaaagggggatacagtctacattctgcgaaaaatcgaccagaactggtacgagggtgaacatcatggcagagtgggcatatttcctattagttatgtggagaagctcacaccgcctgagaaggcccaaccagccagaccccctcctcccgctcagccaggagagataggggaagccattgcaaagtacaattttaatgcagatacgaacgtcgagttatccctgcggaagggcgatagggtgattttactgaagagggtagatcagaactggtacgagggcaagattccaggtacaaaccgccaaggaatatttccggtgagctacgtggaggtggtaaaaaagaacacgaagggcgcagaagactatcctgatcctccgattcctcacagttactcttccgatcgcatccactctctgagctcaaataaacctcagcgcccagtgtttacccacgagaatatccaggggggtggcgaaccctttcaggcactgtacaattacacacccaggaacgaggatgagctggagctaagggagtccgatgtcatcgacgtaatggagaaatgcgacgacggctggttcgtggggacatcaaggcgcaccaaattcttcggcacattccctgggaattacgtcaagcggctgtag

SEQ ID NO: 29404 - DNA, 2472 bp, synthetic construct
  source 1..2472: mol_type = other DNA; note = Synthetic coding sequence
atgacactgctgtcgtctcagagcagcagcctggtggccccatccgggagcgtttctgcagagaaccccgagcagaggatgcttgagaaaagagctaaggtcattgaagagctgctccagactgaaagggactacatcagagacttagagatgtgtatcgagcgtattatggtgccaatgcagcaggcccaggtgcccaatattgattttgagggcctgttcggcaacatgcagatggtgatcaaagtgtcaaagcagttattagccgctctcgagatcagcgatgctgtcgggcctgttttcttaggtcatagggacgaactcgaaggaacctacaagatctactgccagaatcacgacgaagcgatcgccctgctagagatctacgagaaggacgaaaagatacagaagcatctgcaagattccctcgccgatctaaattcactcgtgttgaagaaggggtgcaccaactatatcaacctgggctccttcttgatcaagccagttcaacgtgtgatgagataccctttgctcctcatggagctgctgaacagtacacccgagtcacaccccgacaaggtgcccctgaccaacgcagtccttgcggttaaggagatcaacgtgaatattaacgaatacaagaggcgaaaggacctggttctgaaatacagaaaaggggacgaagactcacttatggaaaagattagtaaacttaacattcactcaatcattaaaaaaagcaacagggtgtcaagccatctgaagcatctgacgggattcgcccctcagatcaaggacgaggtctttgaagagacagagaagaactttcggatgcaggagaggcttatcaaaagttttattcgagacttgtcgttgtacttgcaacacattcgcgaatctgcctgcgtcaaagtcgttgccgcagtgagtatgtgggacgtctgcatggaaagaggacacagagacctggaacagtttgaacgggttcatagatacatctctgatcagctgtttaccaactttaaagaaagaacagaacgactggtaataagtccacttaatcagttactgagcatgttcaccggaccacacaaactggtgcagaagagattcgataaattactggacttctataattgcacggaacgtgccgaaaaactgaaggacaagaaaaccctggaggaattacagagcgctcggaacaactatgaggctctcaacgcgcagctcctggacgagttgccaaagtttcatcagtacgcccaaggcctgttcaccaattgtgtgcacggctacgccgaggcccattgcgactttgttcaccaggcactcgaacagctcaagccccttctttcattactgaaggtcgcaggacgggagggaaacctgatcgccatatttcacgaagagcattctagagtgctacagcagctgcaggtctttacttttttccccgagagtcttcctgcaactaagaagccgttcgaacgaaagactattgatagacagtctgcgagaaagcctctgctgggtctcccttcatatatgttgcagtccgaggaactgcgtgcttccctcctggcaagatatcctccagagaagctgtttcaggcagagcgtaacttcaatgcagcccaagacttggatgtgtctctcctagagggagacctcgtcggtgtgataaagaaaaaggatcccatgggatcccagaacagatggctcatcgacaacggcgtcactaaaggattcgtgtactctagcttcttaaaaccttacaatcccaggaggagccacagcgacgcgagcgtgggatcccactcaagtactgagtctgagcatggatcctcaagccctcggttcccgcgtcagaattccggatcgaccctgaccttcaacccgtccagcatggccgttagcttcacctctggaagctgtcagaaacaacctcaggacgctagccctccccctaaagagtgcgaccagggcactcttagtgcttcactgaatccttcaaatagcgagagcagcccatccaggtgcccctccgatcctgacagcacaagccagcctagatccggagattctgctgatgtggcccgtgacgtgaaacagccaaccgctacgcctagatcctatcgaaactttcggcaccccgaaatcgtcggttattctgtgcctggaaggaacggccagagccaggatttggtgaagggctgcgcgagaaccgcccaagcacctgaagacagaagtaccgaacctgatggatcagaggccgagggaaaccaggtctacttcgcagtttacaccttcaaggctagaaaccctaatgaactgtctgtcagcgccaatcagaagcttaaaatcctggagttcaaagacgttaccggcaacacggagtggtggctcgccgaggtgaatggaaagaagggatatgtccccagcaattatattcggaagacggagtatacctag

SEQ ID NO: 29405 - DNA, 2964 bp, synthetic construct
  source 1..2964: mol_type = other DNA; note = Synthetic coding sequence
atggcagagtcgagtagtgagagtgatcacttcaggtgtagagaccgactttcaccttgggcagccaggtctacccatcgagggacaagatccttgcccacagtggaggtaactgagaaggtgaatactatcacatccacactgcaagacacgtcacgaaatctccgccaggtggatcagatgctggggagatacagagagtacagtaatggccaggcaggcgcaatcgagcacttgaaggagagcttggagcaatcaattgaccagctcagaagccagaggcttctccgcaactcaggaggtagatcaataagcgtgacatccttatcagcctcggacttggatgggggaacagggagtgaacttcaccacttccccccaacatccccattgaaggattatggtgatccccaggggattaagaggatgcggtctaggacgggagtcagattcgtgcaggaaaccgatgatatgactcagcttcacggctttcaccaaagtctcagggacttaagttctgagcaaattcgattaggtgacgatttcaatagggaattaagtcggcgtagccgatccgatgccgaaacgaaacgggctttagaagagctgaccgaaaagcttaatgaggcccagaagcaggaagtcgtgagcgacagggtggaacgcagacttcaggaactggagcgcgagatgaggaccgagagggagttggtcgaaaggaggcaggaccaactggggcttatgagcctgcagctccaagaggcactcaaaaagcaggaagccaaggccgacgaacacgaaggcgctattaaaaataaacttagacagaccgaaactgaaaagaaccaactggaacaagagctggagctgtctaggcgtttactaaatcagtccgaggggtctcgggagacgttgctccaccaggtggaagagttaaggacacagctaaccaaagctgaaggagaccgaaagggcctccagcaccaggtgtcacagatcagtaagcaacagagcaactaccaagacgaacaaggcgaggactggaggttcagaagaggtgtcgaaagggaaaagcaggatttagagaagcagatgagcgacttgcgggttcagctcaacttttctgcgatggcgtctgaacttgaggaggtcaaacggtgtatggagcggaaagacaaggagaaggcccaccttgcctctcaagtggagaacctgactagagagctggaaaatggggaaaagcagcagttgcaaatgctggacaggctcaaagaaattcagaaccacttcgacacttgcgaagctgagcgtaagcatgccgacctgcagatttcagaattgacacgccatgctgaggacgcaactaagcaagctgagcgctacctgagtgaattgcaacagtctgaggcactcaaggaggaggctgagaaacggagagaagatcttaagctgaaagcccaagaatccataagacagtggaaattaaagcataagaagcttgagagagctctcgagaaacagtcagagacggtggatgagcttaccggcaagaataaccagattctcaaggagaaggatgaactaaaaactcaactgtatgccgctcttcagcagatcgagaacctgagaaaagagctgaatgacgtgctgactaagagggccctgcaggaagaggagctgcattctaaggaggagaagttgagggatattaagtctcatcaggcggatctagagctggaagtgaagaactctttagacacaatccatcgcctcgagagcgagctgaagaagcagtcaaaaatccagtcacagatgaaggtggaaaaggcccatcttgaggaggagatcgcagaactcaaaaaaagccaggcccaggataaagccaaactacttgagatgcaggaaagtatcaaggacctgtccgccattcgggctgacctcgctaataagctcgcagaggaggaacgcgcaaaaaaggcagttctcaaagacctaagcgacctcactgcacaagcaaaatcccgcgatgaggaaacggctacaattatcacgcagctcaaactggagagggacgtccaccagcgcgagctgaaagacctgacgtcatctttacagtcggtaaagaccaagcacgagcagaacatccaggagctaatgaaacactttaagaaggaaaaaagcgaagcagaaaaccatatccgaacgctgaaggccgaatctctggaagagaaaaacatggccaagatccataggggtcaactcgagaagctcaaatcccagtgtgatcgtcttaccgaagaattaacacagaatgagaacgagaataagaagctaaaacttaaatatcaatgtctaaaagatcagctggaagaaagggaaaagcatatttcaattgaggaggaacatctacgcagaatggaagaagcacggttacagctgaaagaccaattactgtgccttgagactgaacaggagtcaattctgggcgtcatcggcaaagagatagacgctgcgtgtaagaccttctccaaggattcagttgagaagctgaaagtttttagctcgggacctgacatccattatgatccacataggtggctcgccgaatccaagacaaaactgcagtggctgtgtgaggagttaaaggaacgtgagaacagagagaaaaacctgcggcatcagctcatgctatgcaggcaacagctgaggaaccttacagagaataaagagagcgaactgcagtgcctgttccagcaaatcgagcggcaggaacaacttctcgacgagatccaccgcgaaaagcgggaccttctcgaggagacacagagaaaagacgaggaaatgggtagcctgcaggaccgggtcattgcactagaaaccagcacacaagtggctctggatcatctggaatcggtgcctgagaagctgagcttattggaagactttaaggactttcggagatag

SEQ ID NO: 29406 - DNA, 5156 bp, synthetic construct
  source 1..5156: mol_type = other DNA; note = Synthetic coding sequence
atgtcagggacttcctcccccgaggccgtgaagaagctcttggagaacatgcagtctgacctgagggccctgagcctagagtgtaagaaaaagtttcccccagttaaagaagccgctgaatcgggaatcatcaaagtgaaaactattgccgctagaaacacggaaatcctggctgcccttaaggagaatagcagcgaagtcgtgcaaccatttctcatgggttgtgggaccaaagaacctaagatcacccagctttgtctggcagccatacagagactgatgagccacgaagtggtaagcgagaccgctgccggaaacatcattaatatgctgtggcagctgatggaaaacagcctggaagaactgaaattactccagactgtgctcgttctcctgaccacaaacacagtggttcacgacgaggccttgtctaaagccattgtgctgtgctttcgcctgcactttaccaaagacaacattacaaacaacactgccgctgccaccgtccgccaggtcgtcacagtggtcttcgagcgaatggtcgctgaggatgagaggcatagggacatcatcgagcaaccagtactcgtgcaagggaactccaacaggaggtccgtgagcacccttaagccctgtgcaaaggatgcatacatgctgttccaggacctgtgccagctagtcaatgccgatgccccttactggctagtgggcatgaccgaaatgactcgcactttcggactggaactcctagaatccgtgctcaatgactttccccaggtgttcctacagcaccaggaattcagctttctcctcaaagaacgcgtgtgtccattggtgatcaaacttttttcccctaacatcaagttccggcagggcagctctactagttcatctccagcaccagtggagaagccatacttcccaatttgtatgagactgctgagggtcgtgtcagtcctcattaaacagttttactctctgctggtgaccgaatgtgaaattttcctaagtctcctggtgaagtttctggacgctgacaaaccacagtggctgcgcgctgtggccgtagagtccatacacagattttgcgtgcagccacaactcttacgcagcttttgtcagtcttacgatatgaaacagcactccacgaaagtctttcgagatatcgtgaatgcactgggatcctttatccagtccctttttttagtgccacctactggtaacccggctactagtaaccaggccggtaataataacctcggtggcagtgtgagtgcaccagccaatagcggcatggttggtatcgggggaggagtaaccttactgccagccttcgaataccgcggtacatggataccgatcctcacaatcaccgtgcagggttccgcaaaagccacttacctagaaatgctggacaaagtagaaccacctaccataccagagggatatgctatgagtgtggcgtttcactgcttattagacctggtgagagggatcacatctatgatcgaaggagagctgggggagcttgagaccgaatgtcagacaactacggaagaaggaagttcccctacccagtctacagagcagcaggatctgcaatccaccagcgaccagatggataaggagatcgtctcccgcgcagtgtgggaggagatggtgaatgcttgttggtgtggcctgttggccgctctgagtctgcttctagatgcctcaacggatgaggcagccacggaaaatatcctgaaggccgagctcaccatggccgcattgtgcggtagactcgggctcgttacttcgagggatgcattcatcacagcaatctgtaaggggtccctgccaccccactacgcgctaacggtgttgaatactaccacggccgcaactctctcaaataagtcctactccgtccaggggcagagcgtcatgatgatcagcccatcatccgaatctcaccagcaggttgtggctgtgggccaacctctcgcagtgcaaccccaggggaccgtaatgttgaccagcaagaacattcaatgtatgcgcacgctcctcaatctggctcactgtcatggagctgtgcttggcacctcgtggcaattggtgcttgccactctccaacatctggtttggatactaggcctgaaaccctctagtggcggtgccctgaagccaggccgagcggtggaagggccaagcactgtgctgaccacagccgttatgactgacctgcctgttatcagtaatatactgagccgactctttgagagcagccaatacctggatgacgtcagcctacatcatctgattaatgctttatgttctctgagcttggaggcaatggacatggcctatgggaacaacaaggaaccctctctgtttgccgtagcaaaacttctggaaaccgggttagtcaatatgcaccgcattgaaatcctgtggagaccactgacagggcacctgttggagaaggtgtgccagcacccaaattctcgtatgcgcgagtggggcgctgaagcactcacaagtctcattaaagctggactgacctttaatcacgaccctcccctctcccagaatcagagattgcaactgcttctcctaaaccccctaaaggaaatgtctaacataaatcacccagacatacgactgaagcagctcgagtgtgttttgcagatcctccagtcacagggcgactctctgggccctggctggcccctggtgctaggggttatgggagcgattcgaaacgatcagggcgagagcttgattcggactgctttccaatgtctgcagctcgttgtgactgacttcctccccactatgccttgtacctgtctgcaaattgttgttgacgtggccggttcatttgggctacataatcaggaactgaacatctcccttacatccataggattactgtggaacataagcgactacttttttcagcggggtgaaactattgaaaaggaattgaataaggaggaggcagctcagcagaagcaagccgaggaaaagggagtcgtattgaacaggccattccatcctgctcctccctttgattgcctgtggttatgtctttacgccaaactgggggagctttgcgtcgatccccgaccagctgtgcgaaaatccgcaggacaaaccctttttagcactatcggcgcacacggcacactgctccagcacagtacctggcacacagtcatctggaaggtacttttccacctgctcgatcgcgtgcgggagtcttctaccactgcagataaggaaaaaatcgagagcggtgggggaaacattctgatacaccatagcagggataccgccgaaaagcagtgggccgagacatgggtactgactctggctggggtggctcgcatcttcaacacgcgccgttatttattacaaccattgggggacttcagtcgggcatgggacgtgctgttggaccatattcagtccgctgccctctccaaaaacaacgaggtgtccctcgccgctctcaagagtttccaggagattctacagatcgtgtcacctgtgagagatagtgataagcccgaaacgccgccagtggtgaatgtgccagtgcccgtgctgataggaccgattagtgggatgtctagaccctttgtcagaaccgactctatcggggaaaaactcgggaggtatagctcttccgaaccacccatcgttactgacgagttagaagatctgaatttatggtgggcagcctggaatacctggtacagaatagggagcgaaagcaccaagccccctataacgtttgataagctgacgtttatacctagtcaaccattcttaacagccctaatccagatatttccagcgctttatcagcatatcaagactggatttaatatggacgatctgcagaaactgggggtaattttgcattctgctatttcagtgccgataagcagcgacgcaagccctttcattctgccatcctacaccgaagctgtactgaccagcctgcaagaagctgtgctcactgctctggatgtgctacaaaaagcgatatgcgtgggtcctgaaaatatgcagatcatgtatccagcaatctttgaccaacttctggctttcgtggagttcagttgtaagccccctcaatacggccagctggaaaccaagcatattgccaacgctaagtacaaccaaattcagcttttcgcaccagctgaatgggtcgctctgaactacgtgcccttcgccgaacgctcactggaagttgtggtggacctctaccaaaaaactgcttgtcacaaagcagttgtaaatgaaaaggttctgcagaatattatcaaaactttgagggtcccgctgagcctgaagtactcatgtccgagtgagagcacttggaaactggccgtctccagtctgctgcgcgtcctatccatcgggttgcccgtcgcaagacagcacgcgagctccggtaaatttgatagcatgtggcctgagctggccaacacatttgaggattttttgttcaccaaatcgatacctcccgataacctgagcatccaagagtttcagcgtaacgagaacattgatgtcgaggtcgttcagctgataagcaatgagatcctcccttatgcaaatttcattccgaaagagttcgtgggtcagatcatgaccatgctaaataaagggagtatccattcccagtccagctcctttacagaggcagagatcgatataagacttagagaggagttcagcaaaatgtgcttcgaaacactcctgcaattcagcttcagcaacaaagtcactactccgcaagaggggtacatctcccggatggcactctccgtgcttttgaagcgttcacaagacgtgctccaccgttacatcgaggatgagcggctgtccggtaagtgtcccctgcccaggcaacaggtcacagaaattatttttgttctgaaagccgtgtccacattaattgactcactaaagaagacccaacccgaaaatgtggacgggaatacatgggcccaggtgatcgcactgtaccccaccctggtggagtgtatcacttgttcctcctcagaagtctgctccgcgctgaaggaggcacttgtccccttcaaggactttatgcaacctcctgcctcaagagttcagaacggagagtctta

SEQ ID NO: 29407 - DNA, 2100 bp, synthetic construct
  source 1..2100: mol_type = other DNA; note = Synthetic coding sequence
atgagtagcagaaaggtgctcgccattcaagcacgcaaacgacggcctaagagggaaaaacatcctaagaagccagaacctcagcaaaaggcccctttagttccccctccccctccacccccacctccacctccgccacctttaccagacccgacgccacctgagccggaagaggagatcctgggaagcgacgatgaagaacaggaggaccctgccgattactgcaagggagggtaccatccagtgaagatcggagacttgttcaacggcaggtaccacgttataagaaaactcgggtggggtcatttcagcaccgtgtggttgtgttgggatatgcaggggaaacgctttgtggccatgaaggtggttaagtccgcgcagcactataccgagacagccctggacgagatcaagctgctgaaatgcgtgcgagagtcagacccgtcagatcctaacaaggacatggtggtgcagttaattgacgacttcaaaatcagtggtatgaatggcatacatgtatgtatggtgtttgaggtcctcgggcatcaccttcttaagtggattattaagtccaactaccagggcttgccagtgagatgtgtcaagagtatcatacgccaggtcttgcagggcttggattatctgcattccaagtgtaagattatacacacggatatcaaacctgagaacattttgatgtgtgtggatgacgcatacgtgagacgaatggcagccgaagccactgaatggcagaaggctggagcaccacccccatcagggtcggccgtcagtaccgcccctcagcaaaagcctatcggaaagattagcaaaaacaagaagaagaagttaaagaagaaacagaagcgacaagccgagttactcgagaagagacttcaggaaatagaagaactggaaagagaagccgaaagaaaaattattgaggagaatatcaccagtgcagctccgagcaacgatcaggacggagaatactgccccgaggtcaaacttaaaacgacaggacttgaggaggctgcggaagctgagactgctaaagacaatggcgaggctgaggaccaggaggaaaaggaagatgccgaaaaggaaaatattgaaaaggacgaagacgacgtagatcaggaactggcaaacatagaccctacgtggatagagagtccaaagacaaacggtcatatagagaacggccctttctctttggaacaacagcttgatgacgaggatgatgatgaagaggattgtccgaatcccgaggagtacaacctcgacgaaccaaatgccgagtcagattacacctactcctccagctatgaacagttcaatggcgaattgcccaacggcaggcacaaaatcccagagtctcagtttccagagttttctactagtttgtttagtggctctctggagcctgtcgcctgcggctcagtgctcagtgagggaagccctctgacagagcaagaagaatcctcccccagccacgatagatcgagaaccgttagcgcttctagtaccggggatctacccaaggcaaagactcgggctgccgatctgcttgtgaatcccctggatcccagaaacgctgataagattagagtgaagatagccgacttggggaatgcctgttgggttcataagcactttacagaggatatacagacaaggcaataccggtcaattgaagtgcttataggagcaggatacagtactcctgcggacatctggagtaccgcatgtatggccttcgagctggctaccggggactacctttttgaaccccattctggcgaggattactcaagagacgaggaccacatcgctcacataatcgaactactaggtagcattccaagacactttgcactcagcggaaaatatagtcgcgaattctttaacaggaggggagaactcagacatataactaagctgaagccttggagcttgttcgacgtgctcgtcgaaaaatacgggtggccacacgaggatgctgctcaattcaccgattttttaatcccgatgctagagatggtacccgaaaagcgagctagcgctggcgaatgtctgaggcacccatggcttaattcatag

SEQ ID NO: 29408 - DNA, 1113 bp, synthetic construct
  source 1..1113: mol_type = other DNA; note = Synthetic coding sequence
atggggttcaatcggcctagcaagatccaagaaaacgcgctcccgcttatgctcgcagagcctccgcagaacctaattgctcagtctcagagcggaaccggtaagaccgccgcatttgttctagcaatgctttctcaggtggagccagcaaataaatatccacagtgtctgtgcctctccccgacatatgaactcgcactgcagaccggcaaggtcatcgagcagatggggaagttctacccagaactcaagctcgcctacgctgttcgaggaaataagctagaaagaggccaaaagatctcagagcagattgtcatcggaacccctggcactgtcctggactggtgctctaagctgaaattcattgatcctaagaagatcaaggtcttcgtgctcgatgaggctgacgtcatgattgcgacgcaaggccaccaggatcagtctattaggattcaacgaatgctgcctcggaactgtcaaatgctgctgttcagtgcaacattcgaggacagcgtgtggaaattcgctcaaaaagtggtgcccgaccccaacgtcattaaacttaaacgggaagaggagacgctagatacaattaaacagtattacgtcctgtgctctagcagggatgaaaaatttcaggccctgtgtaatctctacggggcaatcacaatcgcccaggctatgattttctgccataccaggaaaacggccagttggctcgccgctgagttaagtaaagaagggcaccaggtcgctctgctatccggtgagatgatggtcgaacaaagggccgctgtcattgagcgatttcgggaaggcaaagaaaaggtcctggtgactactaacgtctgcgcccgtgggatagatgtcgagcaggtcagtgtcgtgattaattttgatctccctgtcgacaaggatggaaaccctgataacgagacctatctccaccggattggcagaaccggcaggtttggcaaacgaggtcttgccgtgaacatggtcgatagcaagcactcaatgaatatcctgaatcgcatccaggagcatttcaataaaaagatcgagcgtttggacacagatgatttagatgagattgagaaaatcgcgaattag

SEQ ID NO: 29409 - DNA, 2640 bp, synthetic construct
  source 1..2640: mol_type = other DNA; note = Synthetic coding sequence
atgttttggaagtttgatctgcactcttccagccacatcgatactcttcttgagcgagaggacgtgactctcaaggagctgatggacgaggaagacgttttgcaagagtgcaaggcccagaatagaaagttaatagaattccttctgaaagcagaatgtctcgaagatctggtgtctttcatcattgaggaacctccacaagacatggacgagaaaatcaggtataagtaccctaacatcagttgtgagctgctcaccagcgatgtttcacaaatgaatgataggctgggagaggacgaaagtctcctgatgaagttgtattcatttctcttaaatgacagcccactgaatcccctgctggcatcattcttctcaaaggtcctctccatcttgatcagtcgcaaacccgagcaaattgttgactttctgaagaaaaaacacgatttcgtggacctgatcataaagcatattggtacgagtgccatcatggatctgctgcttaggctgctcacctgtatcgagccgcctcaaccgcgacaggacgtcctgaattggctcaatgaagaaaagattattcagcgcctcgtagaaattgtgcaccctagccaagaggaggatagacattccaacgcgtctcagagcctgtgcgagatcgtcagactctctcgcgaccagatgttgcagatccaaaacagcacagaaccagacccactgctggccaccctggaaaagcaggagattatcgagcagctgctctccaacatctttcacaaggagaaaaacgagtccgcaatagtaagtgccattcagatcctgttgacacttctggagacccgtcgtccaacctttgaaggccacattgagatatgtcctcctggcatgtcccattctgcatgttctgtcaataagagcgtgctagaagctatcagggggcgtctaggctcgttccacgaattgctgctggagccacccaagaagtctgtcatgaagacgacttggggtgtcttggaccccccagtgggcaatacacggctgaatgtcatcagactgatctctagcttgcttcagaccaatacctcttcaatcaacggcgacttgatggaactgaattctatcggggtaatcctcaacatgttctttaagtatacctggaataacttcttgcatacccaagtcgagatctgcatagcactgattttagccagcccttttgagaacacagagaatgcgacaatcaccgaccaagactctacgggggataacctcctgctgaagcacctctttcagaagtgtcaactcatcgaaaggatccttgaagcctgggaaatgaatgagaaaaagcaggcagaaggaggaaggagacatggttacatggggcacttgacccgtatcgccaactgtatcgtgcatagtactgacaaaggaccaaacagcgcgctggtgcagcagttgattaaggacctgcctgacgaggtgcgtgagcgatgggagaccttttgcacgtcctcccttggtgagactaacaagcggaatactgtggatcttgtcaccacctgtcacattcatagttctagcgacgacgagattgacttcaaggagactggtttttcacaggattccagtctgcaacaggccttcagcgactatcagatgcagcagatgacctccaacttcatagaccaattcggctttaacgacgaaaagttcgccgatcaggatgacatcggaaatgtcagctttgatcgggtgtcagacatcaacttcacgcttaataccaacgaatccggaaacatcgctctctttgaggcctgctgcaaagaacggattcaacagtttgatgacggcggttctgatgaggaggatatatgggaggaaaagcatattgcctttacaccagaatcccagaggaggtcatcctcgggttcaaccgactctgaagagagtaccgactccgaggaggaggatggtgctaagcaggacctgtttgagccatcctctgccaacaccgaagataagatggaagtggacctgagcgagccccctaattggtcagctaatttcgatgtgcccatggaaacaacacatggagctcctctagattcggtgggatcagacgtatggtccacagaagagcctatgcctacaaaggaaacaggctgggcctctttcagcgagttcacctcctcactcagtaccaaggacagtctgagatctaatagccccgtcgagatggagacgtccacagagcctatggatcccctgacaccttccgcggcagcactggccgtgcagccggaggctgccggaagtgtagccatggaggccagtagtgacggagaggaagacgcggaaagcactgataaggtgacggagacggtaatgaatggagggatgaaggagacactgtccctcactgtggatgccaaaactgagactgcagtgttcaagcgcctcctcgggggatgcagcgaggagggaaagctaagtacctcacaagacgctgcatgtaaggatgctgaggaatgccccgagactgccgaggccaagtgtgctgctccgcgacccccttcttcttcgcccgagcagcggacagggcagccaagtgctcccggtgatacctccgtgaatggccctgtgtag

SEQ ID NO: 29410 - DNA, 2622 bp, synthetic construct
  source 1..2622: mol_type = other DNA; note = Synthetic coding sequence
atgttctggaagtttgatctccactcttcaagtcacatcgataccctgctcgaacgggaagacgtgacgctcaaagagctcatggatgaggaggatgtgctgcaagagtgtaaggcacagaacagaaaacttatcgagttccttctgaaggccgaatgccttgaagacctagtcagctttattatcgaggagccaccccaggacatggacgagaaaattagatacaaatatcccaatatttcctgcgaactcctgacatcagacgtgtcccagatgaacgaccgtctgggcgaggacgaaagcctgttaatgaaactgtacagtttcctattaaacgactctccgctgaatcctctcttggcttctttcttctctaaggtgttgtctatccttattagccgtaagcccgaacagatagttgattttctgaagaaaaagcacgactttgttgacctgataattaagcatatcggcacatcagcaattatggatcttctcttgaggctcctgacttgtatcgaaccccctcaaccgcgtcaggacgtgttaaattggcttaatgaggaaaagatcatccagcgcctggtcgaaatcgtacatccgtctcaggaagaagatcgacattctaacgcttcccaaagcctatgcgagatcgtcagactttcgagggaccagatgcttcagattcaaaacagtactgagcctgaccccctgctggcgacgctggaaaagcaggagatcattgaacagctgttgtcgaatattttccacaaagaaaagaatgagagtgcaattgtcagcgccatccagatcctcctgactctgttagagacccggcgtccaacatttgagggccacattgagatatgtcctcctggaatgtcacatagtgcctgctcagttaataagagtgtgctggaggccatcagaggccgactgggttcatttcatgaactgcttctggagcctcctaagaagagtgtgatgaaaactacctggggcgtccttgatccacctgtgggcaacacgcgactaaacgtcattcggcttattagttccctgttgcagacaaataccagctcgatcaacggcgaccttatggagctgaactccatcggggtcattctgaatatgttcttcaaatacacctggaacaacttcctacatacccaggtggaaatttgtattgccttgatcctggcatctccctttgaaaatacggagaacgccaccattacagatcaagattcgactggcgacaatctcttgctcaaacacttgtttcagaaatgccaactcatcgagaggattctggaggcctgggagatgaatgaaaagaagcaggccgaggggggtcgacgccatggttatatgggccacctaactaggattgctaactgtatagttcatagtactgacaaggggccaaacagtgccctagtgcagcagctgataaaggaccttcccgatgaagtgagagaacggtgggaaaccttctgtaccagtagcctgggggagacgaataaacgcaacaccgtggacttagttacaacctgtcatattcacagctcatccgacgatgaaatagattttaaagagactgggttctcgcaagattcctcgttacaacaggcattcagcgactaccagatgcaacagatgacgtctaattttattgaccagttcggttttaatgatgagaaattcgccgaccaagatgacatcggtaatgttagttttgaccgtgtctccgacattaattttaccctgaatacaaacgaatctgggaatatagccctgtttgaggcctgttgcaaggaacgtatccagcagtttgacgacggtggtagcgatgaagaggacatttgggaggagaaacatattgcttttaccccggagagccagaggcggtcaagctctggctcgacagattctgaggagagtaccgatagtgaggaagaagatggggcaaaacaggacttgttcgagccatccagcgccaacacagaagacaagatggaagtagacctgtccgagccgccaaattggtctgccaattttgatgtacctatggaaactacccatggcgcacctcttgatagcgttggcagtgatgtttggtccaccgaggaacccatgcccaccaaggaaacgggctgggcaagcttttccgaattcacttcttctctctccaccaaggactcccttaggtctaattctcccgtggagatggagacctccacagagccaatggatccattgacaccgagcgccgcagcactggccgttcaaccagaagcagccggaagtgtcgccatggaagcttcatccgatggggaagaggacgctgagagtacagacaaagtgactgagactgtgatgaacggaggcatgaaggagactctctcgttgacagtggacgctaaaactgaaaccgcggtcttcaagtcggaagagggcaaactgtccacgagccaagatgcggcttgcaaggatgccgaggagtgtcccgagacagcagaagccaagtgtgctgcccctagaccacctagttcgtcgcccgagcagcggacagggcagccctcagccccaggcgatacttccgtgaacggcccagtctag

SEQ ID NO: 29411 - DNA, 2640 bp, synthetic construct
  source 1..2640: mol_type = other DNA; note = Synthetic coding sequence
atgttctggaaattcgaccttcattcctcttcacacattgacacactgctcgaacgggaagacgtgactctaaaagagctcatggatgaggaggacgtgctgcaggagtgtaaggcgcagaataggaaattgatcgaatttctgttaaaagctgagtgcttagaagacctggtgtctttcattatcgaagagccaccacaggacatggatgaaaagatccggtataaatatcccaatatatcttgtgaactccttaccagcgacgtgtcacaaatgaatgatcggcttggtgaagatgagagcctccttatgaagctttacagttttctgcttaatgattctcctctgaaccccctgctcgcatctttttttagcaaagtgctctccattctaatctcacgtaaacctgaacaaattgtcgatttccttaaaaagaaacatgatttcgtggatctcattattaagcacatcggaacttctgcgattatggatctgcttctgaggctgctgacctgtattgaaccccctcagccacggcaagacgtgcttaattggttgaacgaggagaaaataatccagcggctggttgaaatagtccatccctcacaggaagaggaccgacactccaatgcatcgcagagcctgtgcgaaatagtgaggttatctcgggatcagatgttgcagattcaaaactccacagaaccagaccctctgctcgcaaccttagaaaagcaggagatcatcgaacagttgctcagcaacatattccacaaagagaagaacgaaagtgctatcgtcagtgctatccaaattttgctcaccctgctggaaacccgaaggcctactttcgaaggccatatcgaaatatgccctcccggaatgtcgcatagcgcatgctctgtgaacaaatcagtgcttgaggccattagaggcagactcggctctttccatgaactgctgctagaacccccaaaaaaatccgttatgaaaaccacctggggggtgttggacccaccagtcgggaatacacggctgaacgtgatcagattgatctcctctttgctgcaaactaatacttcgagtatcaatggcgacttgatggagctcaatagcataggagtcattctgaatatgttcttcaaatacacctggaataatttcctgcacactcaagtggaaatttgtatagcgttgatcctggctagcccatttgagaataccgagaacgccactatcactgaccaggattcaacaggagataatctgctgctgaagcatttgtttcagaagtgccaattgattgaacggattcttgaagcgtgggagatgaatgaaaagaagcaggcagagggagggagacgccacggctatatggggcatctgaccaggatcgctaactgtattgtccattcaaccgacaagggcccaaacagcgcgttggtgcagcagctcatcaaagatttgcccgatgaagttagagagaggtgggagacattttgcacctccagcctgggtgagactaacaagcggaacacagttgatttggtcacgacttgccacattcattcttccagcgatgatgaaatcgacttcaaggagaccggcttctcacaagattcctcactccagcaggcattctccgactatcagatgcagcaaatgaccagtaactttatcgatcagttcggatttaacgacgagaagttcgccgaccaagacgacatcgggaatgtttcatttgatagagtctctgacattaactttaccctgaatacaaatgagagtgggaatatcgcactgttcgaggcatgttgcaaggaacggatccagcaatttgatgatggcggttccgacgaagaggatatatgggaggaaaagcacatcgccttcaccccagagagtcaacgccgatcatccagcgggtcaaccgactctgaagaaagcaccgattccgaggaggaagacggcgcaaagcaggacctgttcgagccttctagtgccaatacagaggacaagatggaagtcgacctgagtgaacccccaaactggagcgccaacttcgacgtccctatggagactacacacggcgctccactggattctgtaggctccgatgtgtggtccacagaggaacctatgccaaccaaggagaccggatgggcctctttttcggaattcaccagtagtctatctaccaaagactctctccggtcgaattctcccgtggagatggaaacaagtactgaacctatggaccccctgaccccctctgccgcagcattggcggtgcagcccgaagcagcagggtccgtggccatggaggccagcagcgacggagaggaggacgccgaatcgaccgacaaggttacagaaaccgtgatgaatggagggatgaaagagactctgtcactcacagttgatgcgaagactgagacagccgtgttcaaacgcgtcctgaagtcataccgggaagaagggaagttgtcaacaagccaggacgccgcttgtaaggatgctgaagaatgtccagagacggccgaggccaaatgcgcagccccaaggcctccaagctccagtcccgaacagcgcactggacagccctctgccccaggtgataccagtgtgaacggaccagtatag

SEQ ID NO: 29412 - DNA, 1134 bp, synthetic construct
  source 1..1134: mol_type = other DNA; note = Synthetic coding sequence
atgtctgacgaggtcttttctactactctggcatatacaaagagccctaaggtgactaagaggactacctttcaggatgaactgattagagcaattaccgctaggtcggctcgccagaggtcttccgaatatagcgatgactttgattccgacgaaattgtaagcctgggagattttagcgacacctctgcagatgaaaatagcgtcaataaaaaaatgaacgactttcacattagtgatgatgaggagaagaatccaagtaagttactgtttctgaaaacaaacaaatctaatggaaacataaccaaagatgagcccgtgtgcgcgatcaagaatgaggaggagatggctccagatggctgtgaggatattgtggtcaagtccttctctgagtctcagaataaggacgaggagttcgaaaaagacaagataaagatgaagcctaaaccccgtatcctatctattaagagcacctcttctgctgagaataacagcctagacacggatgatcactttaaaccttcacctcgcccacgatccatgcttaagaagaagagtcatatggaagagaaagatggactcgaagataaggagacggccctgagtgaagaattggagctgcattccgccccaagtagcttgcccactcccaatgggatccagctggaagccgagaagaaagcatttagcgaaaatttggatccggaggactcctgtctgacatcgctggctagcagctctctaaagcagatcctgggcgacagcttttcccccggttcagagggcaatgcctctgggaaggatcccaacgaggagatcactgagaatcacaattctctcaagagcgatgaaaataaagagaactctttcagcgccgatcatgttacaacagcggtggagaagagcaaagaaagtcaggtgacagccgatgacctcgaggaggagaaggccaaggctgaactgatcatggacgatgacagaaccgtggacccgttgctgtccaagtcacagtcgatactgatttctacgtcggccacagcgtcatccaaaaaaacgatcgaagacagaaacatcaaaaacaaaaaatctaccaataatagagctagtagtgcgtctgccagtaaggcctcctag

SEQ ID NO: 29413 - DNA, 576 bp, synthetic construct
  source 1..576: mol_type = other DNA; note = Synthetic coding sequence
atggggaagagctgtaaggtggttgtgtgtggacaggcctccgttgggaaaacgagcattttggagcaacttctctatggtaatcatgtggtggggagcgaaatgatcgaaacccaagaagacatttatgtaggaagtatcgaaaccgaccgtggtgttagagagcaggtgcgtttctacgacactcgagggcttcgcgatggcgctgagctgcctcgacactgtttttcatgcacggacgggtatgtcttggtttattctactgattcacgagagtcctttcagagggtcgaactgctgaagaaggagattgacaagagcaaggataagaaggaagtaaccatcgttgtactcggaaacaagtgcgacctacaggagcaaagaagggtggacccagatgtagcacaacactgggctaagtctgaaaaggtgaagctgtgggaggtgagcgtggccgaccgccgaagcctgcttgagcccttcgtgtaccttgcttccaaaatgacccagccgcagtccaagtccgcatttcctcttagccggaagaataagggaagtggctctttggatggatag

SEQ ID NO: 29414 - DNA, 576 bp, synthetic construct
  source 1..576: mol_type = other DNA; note = Synthetic coding sequence
atgggcaaatcttgtaaagtggtggtgtgtgggcaagccagtgtcggaaagactagcatactggaacagcttctgtatggcaatcacgtagttgggtcagagatgatcgaaactcaggaagacatttacgttggttcgattgaaaccgatagaggggtccgcgaacaggtcaggttttatgatactcgtggactcagggatggagccgagctacccagacattgcttttcatgcaccgacggttacgtacttgtgtattctacggactccagggagagctttcagcgcgtcgaactgctaaagaaagaaatcgacaagtctaaagacaagaaagaagtgaccattgtagtattggggaataagtgcgacctgcaagaacagcgtcgtgtggatccagacgtagctcaacactgggcaaaatccgagaaggtcaaactgtgggaggtgtcagtcgcagatcgacgatctctcctggaacccttcgtgtatttagcatctaagatgacacagccccagagcaaatcagcttttccccttagcagaaagaataaaggcagcggatccttggatggctag

SEQ ID NO: 29415 - DNA, 570 bp, synthetic construct
  source 1..570: mol_type = other DNA; note = Synthetic coding sequence
atggggaaatcctgtaaggtggtcgtgtgtgggcaggccagtgtgggaaaaacctctatactggagcagctactgtacggcaaccacgtcgtggccatgatcgaaacgcaggaggatatctatgtgggaagtatcgagaccgaccggggtgtgcgcgaacaggttcgcttttacgacacacgagggttacgcgatggggctgagctgcctcggcattgtttctcatgcaccgacggatacgtactagtttatagcaccgacagtcgtgaatctttccaacgggtggagcttctaaagaaagagatcgataaaagtaaagacaagaaggaggtcacaatcgttgtgttgggcaataaatgcgacctgcaggaacaaagaagagtagacccggacgtcgcccaacattgggctaaatccgagaaagtcaagctctgggaggtttcggtcgccgacaggcggagcctcctcgagccgtttgtttaccttgcttctaaaatgacccagccacagagtaagtctgcctttccactgtcacgcaaaaacaaaggaagcggttccctagatggctag

SEQ ID NO: 29416 - DNA, 576 bp, synthetic construct
  source 1..576: mol_type = other DNA; note = Synthetic coding sequence
atggggaagagctgcaaggtggtggtgtgcgggcaagcctctgttggcaagactagtatcttggagcagctgctctatggaaatcacgtggttggatctgaaatgattgaaacccaggaggacatatatgtgggttcaattgagactgatcgtggcgtgagggagcaagtgagattctatgacacacggggtctcagagacggggcagaactgccccgacactgctttagctgtaccgatgggtacgtcctggtctactccacagactccagggagagcttccaacgtgtggaactgctcaagaaagaaatcgacaaatccaaggacaaaaaggaggtgaccatagtagtgctgggaaataagtgcgaccttcaagagcagcgccgagttgaccccgacgtcgcccagcactgggcaaaaagtgaaaaagtaaaattgtgggaggtctccgtggccgatcgcaggtccctgcttgaaccgttcgtttatctcgctagtaagatgactcagcctcaaagcaagagcgcctttcctcttagtagaaagaacaagggaagcggctccctcgacggatag

SEQ ID NO: 29417 - DNA, 1005 bp, synthetic construct
  source 1..1005: mol_type = other DNA; note = Synthetic coding sequence
atggcagaagaggtgcgacgggaggaagcaagtggcgtgggaagagccagaacccctacccctggcgcactgagagcacctcaattggtgaccgaagcaccccctcttcatcctggtcacacgttgatgaaagcaacagtactgatgcgacagccaggacgcgtgcaggagatcgtgggcgcattgcgtaagggtgggggagacagattgcaggttatcagcgatttcgacatgactttgtctcgcttcgcctataatggaaagaggtgcccaagctcttacaacatactggataatagtaagattatcagcgaagaatgtcgaaaagagcttaccgcgctcctgcatcattactatccaattgaaatcgacccacatcgcactgtgaaagaaaagttgccacatatggtggaatggtggacaaaagcccacaatctgctgtgccagcagaagattcagaagttccagattgcgcaggtggtgcgggaatctaacgcaatgctgagggagggctacaagacgttctttaataccctctatcacaataatatcccactttttatcttctccgccggaattggagatattctggaggagattattcggcaaatgaaggtatttcaccccaatattcacatcgtgtctaattacatggactttaatgaagacggtttccttcagggatttaaaggccagttgatacatacatacaacaaaaatagctcggcttgtgaaaatagtgggtattttcagcagctggaaggcaaaacgaatgtcattctcttaggggacagcattggcgacttgaccatggctgatggggtgccaggggtgcaaaacattctgaaaattgggttcctaaacgacaaggtggaggaaagacgggagcggtatatggattcctatgatattgtgttggagaaagacgaaactctggacgtggtgaacggattactccaacacatactttgccagggtgttcagctagagatgcaggggccttag

SEQ ID NO: 29418 - DNA, 531 bp, synthetic construct
  source 1..531: mol_type = other DNA; note = Synthetic coding sequence
atggccgcatccactgacatggctggtctggaagaatcgtttcgcaaattcgccattcatggagatccaaaagcgagtggccaggagatgaacggaaagaattgggccaaactctgtaaggactgcaaagttgctgacggtaaatcagtgaccggtaccgatgtagacatcgtgttctctaaggttaagggtaaatcagcccgtgtgatcaattacgaggaatttaaaaaggccttagaagagctcgctacaaaacgattcaagggtaagagtaaggaggaggctttcgacgccatttgccagttggtggccggtaaagaacctgctaacgtcggagtgaccaaagccaaaacaggtggcgctgtagacagacttacagataccagccggtacacgggttctcacaaagagcggtttgatgagtcagggaaaggcaagggtatcgctggacgtcaggacatactagacgactcagggtatgtctctgcctataaaaacgcaggaacttacgacgcgaaagtgaaaaagtag

SEQ ID NO: 29419 - DNA, 912 bp, synthetic construct
  source 1..912: mol_type = other DNA; note = Synthetic coding sequence
atggattcactgcccgatgaattttttgtgagacatcctgctgtggaagaccagagaaaagaggagacagagaataagctggagaagtcttcaggacagctgaataagcaagagaacgacattccgactgacctggtgcctgtgaatctactactggaggtgaaaaaattactcaacgctatcaatactcttcccaagggggtggtgccgcacattaagaaattcctgcaggaagatttctcgtttcagaccatgcaaagagaggtggcagctaactcacagaacggcgaagaaattgtgcctgccctcacactgagattcctcatcacccaactagaggcagccctccggaacattcaggcagggaactataccgcacatcagatcaacatcggctattatctgacactgctgtttctgtacggtgtcgctttgactgagcgcggaaaaaaggaagactataccgaagcagagaacaaatttctggtaatgaaaatgatgatacaagagaacgaaatatgcgagaactttatgagcctcgtttattttggtcgcggtctgcttaggtgtgcacaaaagaggtacaacggaggcctcttggaatttcacaaaagtctccaggagatcggcgataaaaacgaccattggttcgatattgatccaactgaggacgaagacctgcccacaaccttcaaggatctgttgaacaacttcattaaaactaccgaatctaatattatgaagcagactatatgctcgtacctcgattgtgaacgatcatgcgaagcagacatcctcaaaaacacaagttataagggcttttttcaactgatgtgcagtaaaagttgttgtgtgtattttcacaagatttgctggaaaaaattcaagaacctaaagtacccaggcttctag

SEQ ID NO: 29420 - DNA, 1869 bp, synthetic construct
  source 1..1869: mol_type = other DNA; note = Synthetic coding sequence
atggacctgctgactcgggaaaatgtggcactgaaggtggaaagcgcccagcagccaaaacaggtccttaagatggaggtggccgtgcttaagaaactgcagggaaaggaccatgtttgcagatttatcggttgcgggagaaacgagaaattcaactacgtcgtgatgcagctgcagggcagaaacctcgcagatctgcgtcggtcccagcctaggggtacctttacactgtccactaccctgagactgggtaagcagattctggagtctatcgaggccatccacagtgtcggctttctacaccgggacattaaaccctccaatttcgcaatgggccgactgccatcaacgtatagaaagtgttacatgttagattttggcctggctcggcaatacactaacacaaccggcgacgtgcgccctcccagaaacgtggccggattccgcggaacagtgaggtacgccagcgtcaatgctcacaaaaaccgcgaaatgggtaggcacgatgatctgtggtctctcttttatatgttggtggaatttgctgtcggccagctcccatggcgtaagatcaaggacaaagaacaagtcggaatgatcaaagagaagtatgagcaccgtatgcttttgaaacacatgccgagtgagtttcatctattcctcgatcatatcgccagtctggactatttcacaaaaccggactaccaactgatcatgtctgtctttgaaaacagcatgaaggaacggggtatcgctgaaaacgaggcctttgactgggaaaaggccggaaccgatgcgctgttgtctacctccacaagtacaccaccccagcagaatactagacaaaccgccgcaatgttcggggtggtgaatgttaccccagtgcccggtgaccttctgcgcgaaaatacagaagacgttttgcaaggagagcatttgagcgatcaggagaacgcccctccgattcttccagggaggccaagcgaaggtcttgggccatctccgcatctcgtcccccatccaggaggacccgaggccgaggtatgggaggaaaccgacgttaatcgcaataagctgcgtattaacatcggaaagagcccctgcgttgaggaggaacagtcccggggtatgggggtcccctctagccccgtacgcgctcctcctgatagccccacaacccccgtgcgtagtctaagatacaggcgggtaaattctccagagtccgagcggctctcaactgcagatggcagagttgaactgcctgaacgaagatcaaggatggacctccctgggtcgccatctcggcaagcctgttccagccagccagctcagatgcttagtgtggatactggccatgcagatcgccaagcaagtggcagaatggatgtgagcgcttcagttgagcaggaagccctgagcaatgcatttcgcagcgttccattggctgaggaggaggattttgatagtaaagaatgggtgattattgacaaggagaccgagcttaaagattttcccccaggcgcagagccttccacatccgggacaaccgatgaggaaccagaggagctgcggccattacctgaggaaggggaagagcgtcgaagactgggagcagagcccccattccctctgactcccgctttgggaactcccccttctaccgagcgtgtcggtccacacagacccactgaaacggtcggcggagggcagacactgggcgctttaccccctgccgttcagcctcccgcaaccacgggtgtgcttcgcgtgctgctcctgcatgcaggcgacggagctcttcctagccctcggcgaagaagattgttaggtctgctcagatttccccactctgcacaacccttgggatag

SEQ ID NO: 29421 - DNA, 447 bp, synthetic construct
  source 1..447: mol_type = other DNA; note = Synthetic coding sequence
atggctgccgctatggttcctggaagaagcgaaagctgggagcgaggtgagccgggacgacccgcactatatttctgtggctctattcggggtggaagagaagaccgcactctttatgagcggatcgtgtctagattgaggcgcttcggtaccgtcctcacagagcatgtagccgctgctgagcttggcgctaggggggaggaagcagccggaggcgatagattgatccacgaacaggacctcgaatggcttcagcaggccgacgtagtggtagctgaagtcacccagccctccctcggtgtcggctatgagctgggcagggccgtggctttcaataaaaggattctctgtctgtttaggccacaaagcggacggggtgagcatccaaaaccccctagttggttgtctatggaccccgcactgagcagcttcccaggcggtttgtag

SEQ ID NO: 29422 - DNA, 606 bp, synthetic construct
  source 1..606: mol_type = other DNA; note = Synthetic coding sequence
atggtgaatagttgttgtggctctgtttgctctgatcaagggtgcgggctcgagaactgctgcagaccctcatgctgtcaaactacctgttgtcgcacaacctgctgcaggccaagctgttgcgtgagctcctgttgtagaccgcagtgctgtcaatccgtgtgttgccagcctacctgttgcagaccttcctgctgccagacaacctgctgtagaaccacttgctgtcggccaagctgctgtgtgagctcctgttgtcgccctcaatgctgccagagtgtctgctgccagcctacctgctgtaggcctagttgctgccagactacgtgttgccggactacttgctgtcggccttcatgttgtgtgagttcctgctgccgacctcagtgctgtcaatctgtgtgttgtcagccgacctgctgccgcccttcctgctgcatatcctctagctgttgcccatcatgttgcgagtctagttgttgccgaccatgttgctgcctgcgtccagtgtgtggccgtgtatcctgccacactacctgttatcggccaacatgtgtaatctccacttgtcccagaccactgtgctgcgccagcagctgctgttag

SEQ ID NO: 29423 - DNA, 387 bp, synthetic construct
  source 1..387: mol_type = other DNA; note = Synthetic coding sequence
atgacaggctcgtgctgtggtagcacactgtctagtctgtcctatggtggaggttgctgccagccttgctgttgccgggatccctgctgctgcagaccggttacctgtcaaaccaccgtctgtcgcccagtgacttgtgtgcccaggtgcactcgacccatttgtgaaccatgcagacgccctgtgtgctgcgacccatgctccctgcaggagggctgctgtagacccataacctgctgtccttcgtcctgcaccgccgtggtatgtcgaccatgttgctgggctactacctgttgccaacccgtgagcgttcagtccccctgctgccgccctccctgcggccagcccaccccttgcagtacgacatgccgcacatcctcatgctag

SEQ ID NO: 29424 - DNA, 1140 bp, synthetic construct
  source 1..1140: mol_type = other DNA; note = Synthetic coding sequence
atgtcgcttcgtttgtctagcgcttcacgccgttcatgtcccaggcccacaaccggctctttacgcctgtacggaggcggaacatcgtttgggacggggaatagctgtggtattagcggaatcgggagcgggttcagtagtgcctttggagggtcttcatccggcggaaacaccgggggtggcaatccatgcgccggattcactgtgaacgagagggggctgctttctggaaatgaaaaggtgacgatgcagaatcttaacgatcggttggcttcctatttagattctgtgcatgccctggaggaggcaaatgccgacctggaacagaagattaaggggtggtatgaaaagtttggacctggctcctgtagggggctggaccacgactacagcagatatttccccatcatcgatgacttaaaaaaccagattatagcaagcacaacctcaaatgccaatgcagtcctccagatcgacaatgccaggttgactgccgatgacttccgactgaagtacgagaatgagctcgcactgcatcagagcgtagaggccgacgttaacgggctgaggagagtgctggatgagatcaccttatgccggaccgacctggagattcagtacgaaacactgagtgaggaaatgacatacttgaagaaaaatcacaaggaagagatgcaggtattgcaatgtgccgctggcggaaacgtcaatgtggagatcgagctccagagtctcctggctaccaaacattcattggagtgttccctgactgaaaccgagtcaaattattgcgctcaactggcccaaattcaggcacagataggagctttagaggagcagctacaccaggtaaggactgagactgaaggacagaaactggaatatgaacaactgctggatataaagctgcatctggagaaggaaatcgagacttattgtctgctgattggcggagacgatggagcttgcaaatctggcggatataaaagcaaagattatggaagtggcaacgtcggaagccaagtgaaggaccccgctaaagccatagtggttaagaaagtgcttgaggaggttgaccagaggtcaaaaatccttaccacgagactgcacagccttgaggaaaagtctcagtccaactag

SEQ ID NO: 29425 - DNA, 768 bp, synthetic construct
  source 1..768: mol_type = other DNA; note = Synthetic coding sequence
atggacaaagatgaggaggctctgaaggcagctcaggccgaacttaaggaggcaagacggcagtggcatcatcttcaagttgaaatcgagtccttgcacgctgtggagcggggactagagaactcactccacgcttctgagcagcattaccagatgcagctccaggatctggaaactgtgatagaaggcctggagaaggaactacaggaagttcgtcgaggaatcgaaaagcagctccaggaacacgagatgttactgaacacaaaaatgagactggagcaagagattgcaacctataggcatctcctggagaaggaagaaattaggtactatggctgcattcaaggcggaaaaaaggataagaagccaacaacgagtcgagtagggtttgttttaccaagtgcaatcataaatgagatctcatttacgaccaaagtcccgcaaaaatacgagaatgagaatgtggagaccgtgaccaaacaagctatattgaatggaagtatcgtgaaggagtcaactgaggcccacggtacaatacagaccgaaaaggtagacgaagtgattaaagagtgggaggggtccttctttaaggacaacccacgactgagaaaaaagtccgtgagcctaaggtttgatcttcatcttgcagctacagatgaaggctgcttagagacgaaacaggacaatttgcccgacatagaagtcagactgatcatgaggaggagttgctcaattcctagtatcaagccaccttcaacagccaattag

SEQ ID NO: 29426 - DNA, 888 bp, synthetic construct
  source 1..888: mol_type = other DNA; note = Synthetic coding sequence
atggaactaagtcaactgctgaatgagattcgcgctaattacgagaagattctgaccaggaatcagattgaaacagtgcttagcacgagaattcagctggaggaagacatatccaagaaaatggataaagacgaagaggctctgaaagccgcacaagccgaattgaaggaagccagacgtcagtggcatcatctccaggtcgaaattgagtcactgcatgctgtggagcgcggtctggagaatagcttacacgcatccgagcagcactaccaaatgcaactgcaggacttagagacagtgatcgagggtttggaaaaggagctgcaggaagtgcgacgcggtatcgaaaagcagctgcaagaacatgagatgctgctgaatacgaaaatgcgattagagcaggaaattgccacttatagacaccttctagaaaaagaggagatccggtactatggctgcattcaggggggtaaaaaggacaaaaagcccactaccagccgagtgggcttcgtgttaccgtctgcgattatcaatgagatttccttcaccaccaaggttccacaaaaatatgaaaacgagaacgttgaaactgtgactaaacaggcgattctgaacggatcaatcgtcaaggagtctaccgaggcacacggcacgatccagaccgaaaaggtcgacgaggtaataaaggagtgggagggctcattttttaaagacaatcccaggttacgcaagaaaagtgtcagtcttcggtttgacctgcatctggccgctaccgacgaaggatgcctcgaaacgaagcaggataatctaccagacatcgaagttagattgatcatgaggcgctcttgtagtatcccttctattaaacctccatctacagccaactag

SEQ ID NO: 29427 - DNA, 1860 bp, synthetic construct
  source 1..1860: mol_type = other DNA; note = Synthetic coding sequence
atgtcagggttggtcctggggcagagggacgagcccgcaggccaccgcctttctcaggaagagatcttagggtccactagactagtgtcccagggccttgaagccctgcgttctgaacaccaggccgtgctccaatccttgagccagacaatcgaatgcctccagcaggggggacatgaggaggggctagtgcacgagaaggcccgacagctgcgaaggtccatggaaaatatcgagctggggctatctgaagctcaagtgatgctggctctggcatcacacctaagtaccgtggagtctgagaagcagaaacttcgcgcacaggtacggaggctgtgccaggagaaccagtggcttagagacgaactagcgggaactcagcaacggctgcaaagatccgaacaggctgtagctcagctggaagaagaaaaaaaacacttggagttcctgggacagctgagacaatacgatgaagacgggcacaccagcgaggaaaaagagggggacgcaaccaaggatagcctcgacgacctttttccgaacgaggaggaagaggacccctcaaacggtctgtctcgcggtcagggcgctactgcggctcagcaaggaggctacgagatccctgcgagactgcggaccctgcacaacctagttatccagtatgccgcacagggacgctacgaggtggctgtgccactgtgtaagcaggcgctcgaggacctggagagaacatccggacgtgggcatcctgatgttgctaccatgcttaacatactcgccctggtgtatcgtgaccaaaataagtacaaagaggccgctcacctcctcaatgatgcattaagtatcagagaatcaaccctggggcctgatcatcccgctgtggcagccaccctgaacaatctggcggtgttatacggaaaaaggggcaaatacaaggaagctgagcccttatgccagagagccttggaaatcagagaaaaggtgctgggcaccaaccacccagatgtagccaagcagcttaacaatctggctctgctgtgtcagaaccaaggcaaatacgaagccgtagaacggtattatcagcgtgcgctggcaatctacgaaggccaattaggcccagataaccctaatgttgccagaacgaagaataacttggccagttgttatcttaagcagggcaagtacgccgaggctgagactctttataaggagatactgacgcgtgcacacgttcaggagtttgggtccgtggatgacgaccacaagccgatttggatgcatgctgaagagcgagaggaaatgagcaagtcaagacaccacgagggaggtaccccctacgccgaatatgggggatggtacaaggcttgtaaggtctcaagtccgacagtgaacaccacattgcggaatctgggcgctttataccggcgacagggaaagctcgaggcagcggaaacactcgaggaatgcgcactgcgcagtagaagacagggtactgaccccatcagtcagaccaaagtggccgaattgctcggtgaatcagacggccgaagaacaagccaggaaggaccaggcgattccgtgaagttcgaggggggagaagatgcttccgtcgccgtcgagtggagcggcgatgggtccggaacacttcagcggtccgggagcctgggcaagatccgagacgttttaaggcggtcgtccgaactcctagtccggaagttgcaagggacagaaccgcgtcctagcagctcaaacatgaagagagcagcttctttgaactatcttaaccagccgagcgcggcaccgctgcaagtgagcaggggtctttccgcctccactatggacctgtctagttcttcttag

SEQ ID NO: 29428 - DNA, 1860 bp, synthetic construct
  source 1..1860: mol_type = other DNA; note = Synthetic coding sequence
atgagcggactggtactgggccaaagagatgaacctgctgggcataggctgtcacaagaagaaattctgggcagcaccagactcgtgtcacagggcttggaagcactgcgctcagaacaccaggctgtcctgcagtcgctcagccagactatagagtgcctgcagcaggggggtcatgaggaagggctggtacacgagaaggctagacagttaagaagaagcatggaaaatatagagctggggctgtccgaagcccaagtcatgctggccctggccagccacttatcgaccgtggaatcagaaaaacaaaaacttcgggctcaggttagaaggctctgtcaagaaaaccagtggttaagggatgagctggccggaactcagcagcgtctccagagatctgagcaagctgtagcacagctcgaggaagagaagaaacatctagagttcttggggcagctgagacaatacgacgaggatggacacacaagcgaggagaaggagggcgacgcaaccaaggactccttggacgacctatttcccaatgaggaagaggaggatccctcaaatggcctgagccgcggtcagggcgctactgcggctcagcaggggggatatgaaattcccgcacggctccggaccctgcacaacctggtcatccagtatgcagctcagggcagatatgaggtggctgtgcctctctgcaagcaggcactggaggatctcgagagaaccagcgggcgtggacatccagacgttgctaccatgctgaacatcctcgcactcgtgtaccgcgatcaaaacaaatataaagaagctgcacacttgctgaatgatgccctcagtattagggaatctaccctgggccctgatcatcctgctgtagccgcaacactcaacaacttggcagtgctgtatggtaagcgcggaaagtacaaggaagccgaaccgctgtgccagcgcgctcttgaaattagagaaaaagtcctcggtaccaatcaccctgacgttgcaaagcaactgaacaacctcgctcttctgtgtcagaatcagggaaaatacgaagctgtagaaagatactatcagcgcgcactcgcgatctatgaaggacagcttggacctgataatccaaacgttgcaaggaccaaaaacaacctggcaagctgttacctgaaacagggtaaatatgctgaggccgaaacgttgtacaaggaaattcttacacgagcccacgtacaggagttcggctctgttgacgacgatcacaagcctatctggatgcacgcagaagaacgcgaagaaatgagcaaaagcaggcatcatgaaggcggtacgccctacgcggagtacggtggttggtacaaggcttgtaaggtatcgtccccaacagtgaacaccactctgagaaatcttggggcactatacagaagacagggtaaacttgaggccgctgaaacactggaagaatgcgctcttaggtcacggaggcaggggaccgaccctatcagtcagactaaagttgctgagctcttgggggaaagcgatggaaggaggaccagccaggaaggtccaggcgactccgtcaaatttgaaggaggggaagacgcaagcgtggccgttgaatggagtggagatgggagcggcacactgcaaaggagtgggtcattgggaaagatacgggatgttttacggcgatcttctgaacttcttgtccgtaaactgcaaggaactgaacctcggcctagctctagcaatatgaagcgggctgcaagtcttaattacttgaatcaaccttccgccgctcctctacaggtgtcccggggactgagtgcctccaccatggatttgagctctagctcttag

SEQ ID NO: 29429 - DNA, 1170 bp, synthetic construct
  source 1..1170: mol_type = other DNA; note = Synthetic coding sequence
atgttacggtggaccgttcacctggaggggggacctagaagggtgaaccacgctgccgttgccgtgggacatcgcgtgtacagtttcggcggttactgttctggagaagactatgaaacactgagacaaatcgatgtgcacattttcaacgctgtgagcttgaggtggaccaagctgcctccagtaaagtcagccataagggggcaggcgcctgtcgtgccctacatgcgttacggtcattccaccgttttgatcgacgataccgttctgctatggggcggtcgaaatgacaccgagggagcttgcaatgtgctatacgccttcgacgtcaacactcataaatggttcacacccagggtttccggtacggtgccaggggcacgggatgggcatagcgcgtgcgtgttagggaagatcatgtatatcttcggcggatatgagcaacaggcggactgctttagtaacgacatccacaagctggacaccagcactatgacctggacgttgatttgtacaaaaggatccccggcacggtggagggacttccatagtgcgacgatgctaggatcacatatgtacgtgttcgggggtagagctgatcggttcggcccttttcattctaacaatgagatttattgtaatcgtataagggtctttgacactagaactgaagcgtggctggattgtccacccactcctgtcctccccgaagggcgaagaagtcatagtgcttttggctacaatggcgaactctacatttttggtggctacaatgctaggctgaatcggcattttcatgatctgtggaagttcaacccggtgtcctttacttggaagaaaatcgagcctaagggcaaggggccttgcccacggaggaggcagtgctgttgtatcgtgggagataaaattgtcctcttcggcggaacttcacccagccctgaggagggcttaggtgacgagttcgaccttatagatcatagtgatctgcacatcctagatttttctccgagcttgaaaaccttgtgcaaactggccgtgattcagtacaatctcgatcagagttgcctgcctcacgatattagatgggagctcaacgcaatgactaccaattcaaacatctctaggccaattgttagcagcccctttgcctaccccctaccctccgcctag

SEQ ID NO: 29430 - DNA, 549 bp, synthetic construct
  source 1..549: mol_type = other DNA; note = Synthetic coding sequence
atgccgattcccccaccaccccctccaccacctggaccgcctccccctcctaccttccaccaagccaatacagaacaacccaagctctcccgagacgaacagcgtggtcggggtgctctgctgcaggacatctgcaaaggaaccaaactgaagaaggtgacaaacatcaacgatcgctccgctcctattttggaaacccctccacccccaccccctgttatccgcaacggcgcacgggacgccccaccaccccctcctccctacagaatgcatggttccgaaccaccatcacggggtaaaccccctcctcccccttctcgcacgcccgcaggcccaccacctccgcctcccccaccacttagaaacggccaccgcgattcgattactaccgtccggtctttcctggatgatttcgaatctaagtacagtttccaccctgtggaagactttcccgcaccagaagaatacaaacactttcagcgaatttatccatctaagacgaacagagcagctagaggagccccacctctgcctcctatcctgaggtag

SEQ ID NO: 29431 - DNA, 831 bp, synthetic construct
  source 1..831: mol_type = other DNA; note = Synthetic coding sequence
atgacatcctttcggctggcactgatccagctacagatatcttccatcaaatctgataacgtgacacgtgcgtgttcttttatccgtgaggccgctacgcagggggcaaaaattgtgtccttgcccgaatgtttcaattcaccttacggagctaaatactttccagaatatgccgaaaagattcctggtgagagcacacagaagctgtcagaagtggcaaaggagtgttccatttatctgatagggggatcaatccccgaagaagacgccggtaagctgtacaatacttgtgcagtttttggacccgatggtaccttgctggccaaataccggaaaattcacctgttcgacatcgacgtcccaggcaagataacattccaggaatctaagacgctgagccccggtgattccttttctaccttcgacaccccttattgtagggtcggcttgggtatctgctacgatatgcgtttcgcagagttggctcagatatatgcccaacgcggatgccagcttcttgtgtatcccggtgcatttaatctcaccacaggtcccgcacattgggagttgttgcagcgaagccgagccgtcgacaatcaggtgtacgttgcaactgcaagtccggctcgcgacgataaagctagctatgtcgcatggggccactctactgtagtgaatccctggggagaggtgctcgccaaagctgggacggaggaggccattgtttatagcgacatagacctgaaaaaattggcagagatacgccagcagatccccgtgtttcggcagaagagaagtgatctttatgctgtggaaatgaagaaaccgtag

SEQ ID NO: 29432 - DNA, 1476 bp, synthetic construct
  source 1..1476: mol_type = other DNA; note = Synthetic coding sequence
atggaggaaatccccgctcaggaagccgcagggtcaccaagggtgcagtttcagagcctcgagactcagtcagagtgtctctccccagaacctcagtttgttcaggatactgacatggaacagggactcacaggtgatggcgaaacaagggaggagaataagctactgattcctaagcagaaaatcagcgaggaagttcacagctacaaggtccgcgtgggccgacttaagcatgatatcacacaggtgccagagacaagagaggtgtataagtccgaagaccggttggagagactccaagagattttgagaaaattcttgtacctggaacgggagttccggcaaatcacaattagtaaggaaaccttcaccagcgagaagaataacgaatgtcatgagcccgaaaagtctttcagcctggactccacaatcgacgctgatcagagggtgttgcggattcaaaataccgacgacaacgacaagtacgacatgtcattcaatcagaattcagcctccggcaaacatgaacacttaaatctcacggaagatttccagtcatcagaatgcaaggagtcgctgatggacctcagccatctcaacaagtgggagtccattccgaacacagagaaatcctacaaatgtgatgtgtgcggaaagattttccaccaatccagcgccttaacgagacatcaaagaattcatacccgtgagaaaccttacaagtgtaaggaatgcgagaagtctttttctcaaagctcttctctctctcggcacaaacggattcacacacgggagaagccgtacaagtgcgaggcaagtgataaatcttgcgaagccagcgacaaatcctgctcgccctcctccggcatcatccagcacaagaagatacataccagagctaagagctataagtgcagttcatgtgagagagtgttcagcaggagtgttcatctgacccagcaccagaaaatccataaagagatgccctgtaagtgtacagtttgcgggtctgatttctgccatactagctatctgcttgaacaccagcgggtgcaccacgaagagaaagcttacgaatacgacgagtatgggttggcttacataaaacagcagggcatccactttagggagaagccatatacctgctctgaatgcggcaaggactttcgccttaattcacacctcattcagcaccagagaattcatacaggggagaaagcccatgaatgcaatgagtgtgggaaagccttcagtcagacaagttgtctgatccagcatcacaagatgcataggaaggagaaaagctatgagtgcaacgaatacgagggttcattctctcactctagtgacttaattctgcaacaggaggttcttacccggcagaaagcatttgattgcgatgtgtgggaaaagaatagctcccagcgcgcacatttagtgcaacaccaaagcatacacactaaagagaatagctag

SEQ ID NO: 29433 - DNA, 1089 bp, synthetic construct
  source 1..1089: mol_type = other DNA; note = Synthetic coding sequence
atggcacattcatcttttttccccgatgagtactttacctgtagctcgctatgcttgtcatgcggagttggatgcaaaaagagcatgaaccatggcaaggagggggtccctcacgaggccaagagccgctgtcgctactcacatcaatatgataatcgagtctacacttgcaaagcctgttacgagcggggtgaggaggtgtccgtggtgccaaagacctcggcctctaccgactcaccctggatgggcctggcaaaatacgcatggtcaggatatgtgatcgagtgtcccaattgcggcgttgtttataggagcagacaatactggttcgggaaccaggatccagttgatactgtcgtccggaccgagatcgtgcacgtgtggccaggcaccgacggctttctgaaggacaacaataatgccgctcagcgcctgcttgatgggatgaactttatggcccaaagcgtcagcgaactctcattagggccaacgaaagccgtaacatcatggctcacagatcagattgcgcctgcctattggcgcccaaatagccagattctgtcttgtaataaatgtgctaccagctttaaagacaacgatactaagcaccattgtcgcgcttgcggcgaaggcttctgcgacagctgctcatcaaagaccagacctgttccagaaaggggttggggtcccgctcccgtacgcgtatgtgataattgctacgaagcccgaaacgtacagctggcagtcaccgaggcccaggtggacgatgaaggagggacactgatcgcgcgaaaagtcggagaggctgtccagaacaccttaggtgcagtggttaccgcgattgatatccctctgggtctcgtcaaggacgccgctcgtccagcatattgggttccagaccacgagattctgcactgccataattgtaggaaagaatttagtattaagctgagcaagcaccactgtagggcgtgcggccaggggttttgtgatgagtgcagccatgaccgtagagccgtgccttctaggggttgggaccaccctgtcagagtgtgctttaactgcaacaaaaagcccggagacctttag

SEQ ID NO: 29434 - DNA, 348 bp, synthetic construct
  source 1..348: mol_type = other DNA; note = Synthetic coding sequence
atgtctggtgagcctgggcaaactagcgtcgctcccccaccggaagaagttgagcctggctcaggagttaggatcgtagtcgaatactgtgagccgtgtgggttcgaggctacttatctcgagctggcctcagcagtgaaagagcagtaccccggaatcgagattgaatcaaggctgggcggtaccggagccttcgagatcgaaataaacggacagctggtattcagcaagttagagaacggcggattcccatacgagaaagacttaattgaagccattaggagggcctctaacggcgagactctagaaaaaattacaaattcaaggccaccatgcgtgatcctgtag

SEQ ID NO: 29435 - DNA, 507 bp, synthetic construct
  source 1..507: mol_type = other DNA; note = Synthetic coding sequence
atgctttttagactgtctgagcacagctctccagaggaggaggctagtccccaccagagggctagcggagagggccaccacctgaagtccaaacgtcctaatccatgcgcatataccccaccctccttgaaagctgtgcaacgaatcgcagagagccatctgcagtcgatttctaacttaaatgaaaaccaggcatccgaggaggaggatgagttaggcgagctccgagaattaggttatcctcgggaggaggatgaggaagaggaggaggacgacgaagaggaggaggaggaagaggacagccaggctgaggttttgaaggttatccgacaaagcgccggacagaagactacatgcggtcagggcctcgagggcccttgggaaagaccaccccctttggacgagtctgaaagagatggcggtagtgaggaccaggtggaagatcccgcactcagcgagccaggcgaggaaccacaacgcccttcgccaagcgaacctggaacgtag

SEQ ID NO: 29436 - DNA, 507 bp, synthetic construct
  source 1..507: mol_type = other DNA; note = Synthetic coding sequence
atgctgtttaggttgagcgaacacagctccccggaagaggaggccagcccccaccagcgcgcatctggagagggacatcatctgaaaagtaaaagacctaacccttgcgcttacacacccccatccctgaaggcagtacaaagaattgcagagagccacctgcaatcgattagcaatttaaacgagaaccaggcgtctgaagaggaggatgagctaggggaactgagagagcttggctacccacgtgaggaagatgaggaggaggaagaggacgatgaagaggaagaggaggaggaagactctcaggccgaagtgttaaaagtaatacgacagagtgctggacagaagacgacctgtggtcagggacttgagggcccatgggaacgtccaccacctcttgacgagtccgaacgtgacgggggatctgaggaccaagtcgaagaccctgcactatccgagcctggcgaggagccccagagaccctctccctcagagcctggcacatag

SEQ ID NO: 29437 - DNA, 648 bp, synthetic construct
  source 1..648: mol_type = other DNA; note = Synthetic coding sequence
atggacccaaaggaccggaagaaaatccagttttccgtgccagctcccccttcccagctggatccacgccaggtggagatgatccgaagacgaagaccgactcccgctatgctgttcagactatcagagcattctagcccagaggaagaagcctctcctcaccaagtgaccccactgacctggcatttcccgtggcagcgtgcatcgggtgaagggcatcacctcaagtcgaagcgccctaatccttgcgcctatactccaccttcactgaaggcagttcagcggatcgccgaatcacatttacagtctatttcaaatctcaatgagaatcaagctagtgaagaggaagacgagctgggcgagctgcgagaattgggttatccaagggaggaggatgaggaagaggaggaagatgacgaagaggaggaggaggaagaagatagccaggccgaggtactgaaggtcataaggcaatcagcaggacagaaaactacgtgtgggcagggattagagggtccttgggaaaggccccctccattggatgagagtgagagggacggaggcagcgaagaccaagtggaggatccggctttaagcgaacccggagaagaaccacagaggcctagccccagcgagccgggtacttag

SEQ ID NO: 29438 - DNA, 5168 bp, synthetic construct
  source 1..5168: mol_type = other DNA; note = Synthetic coding sequence
atggagagcaactttaatcaggaaggagtgcccaggcctagctacgtatttagcgccgacccaattgccagaccaagtgagatcaatttcgacggtatcaagctggatctcagtcatgagttctcgctggtggcaccgaacacggaggcaaattcctttgaatccaaggattatcttcaagtgtgtctgcgaattaggccatttacgcagtccgaaaaggagttggagtcagaggggtgcgtccacatactcgattctcagacagtcgtcttaaaggagccccagtgtatcctgggcaggctgtcagaaaaatcttccggccaaatggctcagaagttttccttctccaaggtattcggccctgccactacccagaaggagttttttcagggctgcatcatgcagccagtcaaggacctgctgaagggccaatcaaggctgatctttacgtatggcctgactaacagcgggaagacatacacattccagggcacagaggagaacattggtattctgcctcggactctcaatgtgttatttgattctcttcaggagagactttacacaaaaatgaatctgaagccccaccgaagcagagaatacctccgcctgtcctctgagcaagaaaaggaagaaatcgccagcaagtccgcgctgcttcggcagatcaaggaggtcacggtgcacaacgatagtgacgatacgctttatggatccttgacaaactcgctgaatattagcgagttcgaagaaagcattaaggattacgaacaggctaatcttaatatggccaactctataaagtttagtgtgtgggtgagcttcttcgagatatataatgagtatatctatgatctgttcgtccccgtgtcaagtaagtttcagaagcgaaaaatgctgcgcctcagccaggatgttaaggggtatagctttatcaaggatcttcagtggatccaggtctcggactcaaaggaagcctaccgcttactgaagcttggaattaagcatcagtcagtggctttcactaagctgaataacgctagcagccgctcacactcaattttcaccgttaaaatattgcagatagaggacagcgaaatgagccgcgtgattcgcgtttcggagctgtccctgtgtgatcttgctgggagcgagcgcaccatgaagacacagaatgagggcgagcgactgagagagacgggcaacatcaacacatcacttctgaccttgggcaagtgtatcaacgtattgaaaaactccgagaagtcaaagtttcagcagcacgtccccttcagggaatccaagttgacccactatttccaatcatttttcaacggtaaggggaagatctgtatgatagtgaacatctcacagtgttatcttgcatatgacgaaaccctcaacgtattgaaattcagcgcaatcgcacagaaggtgtgtgttcctgacacactcaattcatctcaggagaaactgttcggtcccgtgaagagctcacaagacgtatcgcttgactctaattcaaattctaagatcctgaacgtgaaacgggcaaccattagctgggagaatagtctggaggatttgatggaagacgaggacctggtggaagaactcgagaatgccgaagaaacacagaatgtggagaccaagctactggatgaagacctagataagaccctagaagagaacaaggcttttattagccacgaagaaaagcggaagctgctcgatctcatcgaagatctcaaaaagaaactgattaatgaaaagaaagaaaagctcacgctggagtttaaaatccgcgaggaagtaacccaggagtttactcagtactgggcccagagggaggccgacttcaaagagacgctgctgcaagaacgcgagattctggaggaaaacgccgagaggagactcgcgatattcaaggacctcgtaggcaagtgtgataccagagaggaggccgcaaaggacatatgcgcaactaaggtggaaactgaggagacccataactacgtcggtttcgaagatatcatagactcactgcaggataacgtcgcagacattaagaagcaggcggagatcgcccatctgtatatcgcatccctacccgatccccaggaggcgacagcttgtctggagcttaaattcaatcagatcaaagcagagctagccaaaacaaaaggggagcttatcaagacgaaggaggagctgaagaagcgggaaaacgagtctgattctcttattcaggagcttgaaacttcgaataagaaaattatcacacagaaccagcgtatcaaggagctaattaacataatcgaccagaaggaagacactatcaacgagtttcagaatcttaagtctcacatggagaatactttcaagtgtaacgacaaggcggatacgtcaagcctgattattaacaacaagctgatttgcaacgaaaccgtagaggttcctaaagacagcaagtccaaaatctgttccgaacggaagagagtcaacgaaaacgaactgcagcaggacgaaccacctgccaagaagggatccattcacgtgtcaagcgctatcaccgaagatcagaagaaaagcgaagaagtccgtcccaacattgccgagattgaagatattcgcgtgttgcaggagaacaatgaggggcttcgggctttcttactcacaattgagaacgaattgaaaaacgagaaggaagagaaagccgaactcaataagcagattgtacactttcaacaagagctaagcttgtcagaaaaaaaaaatttgaccctgtccaaggaggtccaacagattcagtcaaactatgatattgcaatcgccgaactgcacgtgcagaagtcaaaaaaccaggaacaggaagagaaaatcatgaagctgtctaacgagatcgagacagcaaccagaagcatcacaaacaatgtgtctcagatcaaacttatgcacaccaagatagatgagttgcgtacattggatagcgtatcacaaatctcaaatatagatctgctgaacctgcgagacctgtccaacgggtcagaggaagacaatctgcccaacacacagctggaccttctcggaaatgattacttggtttccaaacaggtaaaggaataccgtatccaagaacccaacagggaaaattctttccactcttcaattgaggcaatttgggaggaatgcaaagagatcgtgaaagcatctagcaagaagtctcatcagatcgaggaactggagcagcagatcgaaaagctgcaagcagaggtaaagggctacaaggacgagaacaatagattgaaagagaaggagcataagaaccaggatgacctgctgaaagagaaggagaccctaatccagcaactcaaggaagaactgcaggaaaagaatgtaactctggatgtccagattcaacatgttgtcgaagggaagcgagctttatctgagttaactcaaggagtgacttgttacaaagcgaagataaaggagttagagacgatcctggagacacagaaggtggagtgctcccatagtgcaaaactggagcaggacattctggagaaagagagtatcattctaaagctggaacggaacctcaaggaattccaggaacacttgcaggactccgttaaaaatacaaaagatcttaacgttaaagagctgaaactgaaggaggaaatcacccagcttaccaacaatctacaggacatgaagcatctgttgcaactcaaggaggaagaggaggaaaccaacagacaggaaacggagaaactcaaggaagagctgtctgcttctagtgctaggactcagaaccttaaggccgatttgcagcggaaagaggaggattacgctgacctgaaggaaaagctgaccgatgccaaaaaacagattaaacaggttcaaaaggaggtatccgttatgagggacgaggataagctgctgcgcatcaagataaatgagctggagaagaaaaaaaaccagtgcagccaggaactggacatgaagcagcggacaatccagcagctgaaagagcagttgaacaatcagaaagtggaggaggccatacaacagtatgaacgagcatgtaaagatctgaatgtcaaggaaaaaatcattgaagacatgcgaatgacgcttgaggagcaggaacagacacaggttgaacaggatcaggtcctggaggctaaactggaagaggtcgaaaggctggccaccgagctagaaaagtggaaggagaagtgcaacgatcttgaaactaaaaataaccagcggtccaataaggagcacgagaataacaccgatgtgcttggcaagctaaccaacctgcaggacgaactgcaagagagtgaacaaaagtacaatgctgatcgcaaaaaatggctcgaagaaaaaatgatgctgataacgcaggcgaaagaagcagaaaacatccgcaataaggagatgaagaagtatgccgaggatcgtgagaggttctttaaacagcagaacgagatggaaattttaaccgcccagctgaccgaaaaagatagcgatctccagaaatggcgagaggaaagagaccagctggtcgcagccctggagattcagctaaaggctctgatcagttctaatgttcagaaggacaatgaaattgagcagttgaaaagaatcatcagtgaaacttccaaaatcgaaacacagatcatggacattaagcctaaaaggatttccagcgccgatcctgataaactgcagaccgaacccctcagcacatccttcgagatctcccggaataagattgaggacggcagcgtggtgttagattcgtgcgaggtgtccacagagaacgaccaatcgaccaggttcccaaaacctgaactagagatacagttcactccattgcagcccaataaaatggccgtcaaacatccaggctgtaccaccccggtcactgtaaagatacccaaggcacgaaagcggaaatcgaatgagatggaggagtcagcatctcccccacctaaggagtgttcatcatcccccgctatggagcaatcttggaaagaaaatgactttgacaagctccgtgaagagggatttagacgcagcaattatagtgaactgcaggaggaaatccagaccaaaggaaaggaagtcgaaaactttgaaaagaacctggacta

SEQ ID NO: 29439 - DNA, 1215 bp, synthetic construct
  source 1..1215: mol_type = other DNA; note = Synthetic coding sequence
atgaggcgcgatgtgaacggggtaactaagagcaggttcgaaatgttttctaacagcgatgaggccgtcattaataagaagctccccaaggagttgctgctgcggattttttcctttctggacgttgtgacactttgccgttgcgcccaggtcagccgggcatggaacgtccttgcgcttgacggaagcaactggcagcgaatcgatcttttcgacttccaacgggacatcgagggtagggtagtcgagaatattagtaagcgatgcggcggtttcctcagaaaacttagtcttagaggttgtttgggtgtaggcgacaatgctctgcggacctttgcacagaattgtagaaacatcgaggtcctgaaccttaatggctgtactaagactaccgatgccgaggggtgcccactgcttgagcaattaaacatctcttggtgcgatcaagtcaccaaggatggaattcaggctctcgtgaggggctgcggtggtctcaaagccttattcctgaaaggctgtactcaattagaggatgaagcgctgaagtatataggtgcccattgtcccgagttagtaaccctgaatctgcagacttgtctgcagattacagatgagggactcatcactatatgtcggggatgccacaagttgcaaagcctctgcgcctccggctgtagcaatataactgatgccatcctcaacgcccttggacaaaattgtcccaggttacggatattggaggtggccaggtgcagtcagctgaccgacgtcggattcacgaccctcgcgagaaactgccacgagctcgagaagatggaccttgaggagtgcgtacaaatcacagacagtacgctgattcagctgagtattcattgcccccgtctgcaggttctctccctctctcactgcgaactcatcactgatgatgggattcgccacttgggaaatggggcttgtgcccatgatcagttggaagtgattgagcttgataattgcccgctgattaccgacgccagtcttgagcatctcaagtcatgtcactccctagaacgcatcgagctatatgattgccagcagatcactcgggctggaataaaacgcctgagaacccacctccctaacattaaagtccacgcctacttcgcccctgttacgccgccacccagtgtgggtgggagccgacagcgcttttgccggtgttgcattatcctgtag

SEQ ID NO: 29440 - DNA, 1251 bp, synthetic construct
  source 1..1251: mol_type = other DNA; note = Synthetic coding sequence
atggcgcactccccagtggcagtgcaggtgcctgggatgcagaacaacatcgccgatcccgaggaactcttcacaaagctggagagaatcggcaagggcagcttcggagaggtctttaagggtattgataacaggacccagcaagtggtggcaatcaagatcattgacctagaggaagctgaggacgagatcgaggatatccaacaggagattacagtcctctctcagtgtgactctagctacgtgaccaaatattatggatcttacttgaagggatcaaagctttggattatcatggaatacctaggaggcggttcagccctggacctgttacgcgcagggcctttcgacgaatttcagatcgcaaccatgctcaaagagatactgaagggactggattacttacactcagagaaaaagattcatcgggacataaaggctgccaacgtcctgctctccgagcaaggagatgtgaagctggctgatttcggcgtcgcaggtcagctgacagacacacagatcaaacgcaatacgtttgttggcacgcccttttggatggctcctgaagtgattcagcagtcagcctacgatagcaaggcagatatttggtctctcggcatcacagccatcgagctcgctaaaggggagccccctaatagcgacatgcatcccatgcgggtgctgttcctgattcctaaaaataacccccctaccctggtcggcgatttcactaagtcctttaaggagttcatagatgcgtgtctcaacaaagatcctagttttcgaccaacagctaaggaactgttaaagcacaagtttatcgttaagaattccaaaaaaacttcctatctgaccgaacttatcgatcgctttaagcggtggaaggcagaaggccattcagatgacgaatccgactcagaaggttcagatagcgagtcaactagccgcgagaataacacccatccagaatggtccttcactaccgtccggaagaaaccagatcccaagaaggtgcagaatggggctgagcaggacttagttcaaacattgtcttgtctgtctatgatcattactcctgcattcgctgagttgaaacagcaggatgaaaataatgcctcacgcaaccaggccattgaggaattagagaagagtatagctgtcgccgaggcagcctgcccaggaattaccgacaaaatggtgaagaagctgatcgagaaatttcagaagtgtagcgcagatgaaagcccttag

SEQ ID NO: 29441 - DNA, 1020 bp, synthetic construct
  source 1..1020: mol_type = other DNA; note = Synthetic coding sequence
atggctcactccccagtagcggttcaagtgcctggcatgcaggggtctaaattatggatcattatggagtatctgggagggggatctgccctggacctactccgggctgggcctttcgacgaattccagatcgcaaccatgctcaaggagattctcaaggggctcgactatctccacagtgaaaagaaaattcaccgggacatcaaggccgctaacgtcctgctgtctgagcagggagatgtgaaattagcggactttggggttgccggacaactgaccgacacccaaatcaagcgcaacacatttgtggggacgccattctggatggctcccgaagtgatacagcagagcgcgtacgactcaaaagccgatatttggtctctcggcatcaccgcgattgagctcgccaagggggagccaccaaatagtgacatgcatccaatgagggttctgtttctgatcccaaagaacaatccccctaccctggtgggtgacttcacgaagagctttaaggaatttatcgatgcgtgcttaaacaaagacccgtctttcaggccgacagccaaggaattattgaaacacaaattcatagtgaaaaacagcaagaaaaccagctacctgacagagttaatcgaccgattcaagcgctggaaggccgagggacacagcgatgatgaatccgattcggagggatcagactccgagtcaaccagccgagagaacaacacgcatccggagtggagtttcactacagtccggaaaaagcctgatcccaagaaagtgcaaaatggggctgagcaggatctcgtgcagacactgagctgcctgtctatgatcattacaccagcatttgctgagctgaagcagcaggatgaaaacaatgcaagccgcaatcaggctatcgaagagcttgagaagagcattgcagtagcggaggccgcttgccccggtatcacagataaaatggtcaagaagctcattgagaaattccagaagtgcagcgccgatgagagcccatag

SEQ ID NO: 29442 - DNA, 2625 bp, synthetic construct
  source 1..2625: mol_type = other DNA; note = Synthetic coding sequence
atggaggtactgagagagaaggtggaggaggaggaggaggcggaaagggaggaggcagcggaatgggccgaatgggcccgtatggagaaaatgatgcgtcccgtggaggtaaggaaagaagagattaccctgaagcaagaaaccctccgtgatcttgaaaagaagctttctgagatacaaattacagtgtctgctgagctacccgcatttactaaggataccatagacatctctaagctccccatctcctataagacgaatactcccaaagaggaacacctgctccaggtggctgataacttcagccgccagtatagtcacctgtgtcccgatcgtgtcccattgttcctgcatcccttaaatgaatgcgaggtcccaaaatttgtgtctaccaccctgcgaccaactctaatgccctatcctgagctgtacaactgggatagctgtgcccagtttgtcagtgactttcttactatggtcccacttccagaccccctgaagcctccatcccatttgtatagcagcacaacagtcctgaaataccagaaagggaactgcttcgacttttctacccttttgtgctcgatgttgatagggtctggatatgatgcctactgcgtcaatgggtacggatctttggatctctgtcacatggacctgaccagagaagtgtgccccctgactgtgaaaccgaaagagaccattaagaaggaggagaaagtgttgcccaaaaagtataccatcaaacctccacgtgatctgtgctccaggttcgaacaggaacaggaggtgaaaaaacagcaagagattcgagctcaggagaagaagcggctacgtgaggaggaggagagactgatggaggccgaaaaggcgaagccagatgctctgcacggtctgcgggttcattcctgggtgttggttctgagcggaaagcgcgaagtgcccgagaattttttcattgacccatttactggccactcctacagtacgcaggacgaacactttctgggtattgaatcactatggaatcacaagaattactggatcaacatgcaggactgctggaattgttgtaaagacctgatattcgatctgggtgatcctgtgagatgggagtatatgctcctgggaaccgacaagagccagttgtcactaactgaagaggatgactccggcattaatgatgaagacgacgtcgagaacctgggcaaagaggatgaggacaaatccttcgatatgccacattcgtgggtcgagcaaatcgagatctcacctgaagccttcgagacccgttgtccaaatggcaagaaagtaattcaatacaagcgtgccaaactcgaaaaatgggccccttacctcaacagcaatggcttggtatcacggctgaccacatacgaggatctgcagtgcaccaatattctcgagatcaaggagtggtaccagaacagggaagatatgctggagttgaagcatatcaacaaaacgacagacctgaagactgactactttaaacctggccatcctcaggctctgcgggtacatagctataagagcatgcagccggagatggatagggttatcgagttctatgagaccgcacgggtggacggtctcatgaaaagagaggagacgccacgtactatgaccgagtattaccagggcagacctgatttcctgagttaccggcatgcgagttttggccctcgggtcaaaaaacttaccctgtcctccgcagagtccaacccgcgaccaatcgtgaagattactgagagattctttcgcaacccagccaagcccgctgaagaggatgtcgcggagcgggtgttcctggtggcagaagaacggatacagttgcgatatcattgccgtgaggaccacataacggcctcgaagcgagaattcctccgcaggaccgaggtggattcaaagggcaataaaatcatcatgacaccagacatgtgtatctccttcgaagtggaacctatggaacatactaaaaagctgctctaccaatacgaggcgatgatgcacctgaaacgggaggagaaactgagccgccatcaggtttgggaaagcgagctggaggtactggaaatcttgaaactcagggaagaggaagaagctgcacacactttgaccattagcatatacgatactaagcgcaacgagaaatccaaggagtatagagaagccatggagagaatgatgcacgaagagcatctccgtcaagtggagactcagctggactatttagcgccatttctggctcagttgccacctggcgaaaaacttacatgctggcaggctgtgagactgaaggacgaatgcctgtccgacttcaagcagcgactcattaataaggctaatttaatccaggcgaggttcgaaaaagaaacccaggaactccagaagaagcagcagtggtatcaagagaaccaggtgacactcacaccagaggacgaagatctgtatctctcctattgctcgcaggccatgttcagaattcggattttggaacagcggttgaataggcacaaggaattggccccactcaaatatttagcacttgaggaaaagctctacaaggatccaaggctgggcgaactgcagaagatctttgcatag

SEQ ID NO: 29443 - DNA, 1449 bp, synthetic construct
  source 1..1449: mol_type = other DNA; note = Synthetic coding sequence
atggagcagtctaaccttgagaagctggagttgaatgttaggaaactgcaacaggagttggatcagcttaatagagacaagctgtccttgcacaacgacatctctgccatgcagcaacagctccaggagaaaagagaagccgtgaactccttacaagaagagcttgccaatgtgcaagaccacctgaacctcgctaagcaggacctcttgcacaccaccaagcaccaagacgtcctgctgtccgagcaaacacgcctgcagaaggacatcagcgaatgggctaatagatttgaggattgccaaaaggaagaggagaccaaacagcaacagctgcaagtactccagaacgagatcgaggaaaacaagcttaagctggtccagcaggagatgatgttccagaggctgcagaaggaaagagagtccgagaagtccaaactggaccaggtgctgagcaaggtcctggccgcagaggaacgcgtgagaaccctgcaagaggaagaaagatggtgtgagagtctggagaagactctgtctcagaccaagaggcaactctctgaaagggaacagcagctagtggaaaagtccggagaactgcttgcgcttcagaaagaggcggactctatgagggccgacttctcgctgctgaggaaccagttcttgaccgaacggaaaaaggctgaaaaacaagttgcctcactgaaggaggccctaaaaatccaacggtctcaattggaaaagaatctgcttgagcagaaacaggagaatagttgtatacaaaaggagatggcgacaattgagcttgttgcacaggataatcatgagagggcccgacggctgatgaaagagctgaaccaaatgcaatacgaatacaccgagttgaaaaagcagatggcaaaccagaaggatctcgagaggcgacagatggagatttccgacgcgatgcggactctgaagagtgaggtgaaggatgagattcgtacaagtcttaaaaatctgaatcagtttctgccagaactccccgcagatttggaagctatcctcgaaagaaacgaaaacctggaaggcgaactggagtccctcaaggagaatcttccatttactatgaatgaaggcccattcgaagagaaactcaacttttctcaggtccacattatggacgagcactggcgcggagaggccctgagggagaagttgcggcaccgggaggacaggctgaaggcacaactgcgacattgcatgagcaagcaagctgaggtgctgattaaggggaagcgacaaactgaagggacactgcactccctgcggaggcaggtggacgcattgggggagcttgttaccagcacaagcgctgactcagcatcttcgccaagcctcagccagcttgagtcatccctcactgaagacagccagctcggccaaaatcaggagaaaaatgcctcagcaaggtag

SEQ ID NO: 29444 - DNA, 3780 bp, synthetic construct
  source 1..3780: mol_type = other DNA; note = Synthetic coding sequence
atggccctcaggccaggcgctggctccggcggtggcggagccgcaggagcgggagcgggatcggcgggtgggggaggcttcatgttcccggtggccggaggaattcgacctccgcaggctggactgatgcccatgcagcagcaggggtttcccatggtgtccgtcatgcagcccaacatgcaaggaataatggggatgaattatagcagccaaatgagtcagggccctatcgctatgcaggccggaattccaatgggacctatgcccgctgctggtatgccctacctaggccaggccccatttttgggaatgcgaccccctggccctcagtatacccccgacatgcagaaacagttcgccgaggaacaacagaaacggtttgaacaacaacaaaaactgctagaagaggagcgcaaacgcaggcagtttgaagagcagaaacaaaagcttcggttgcttagctctgtgaaaccaaagaccggagaaaagtctagagacgacgccctggaagccatcaaaggcaatttagacggattttctcgcgacgctaagatgcacccaaccccggcatctcaccctaagaaaccaggagttggcgtattcccatctcaggatccagcccagccacggatgccaccctggatctacaacgaatcactggtccctgatgcatataaaaagatccttgagactacaatgaccccaacaggaattgatacggccaagctctatccgatcctgatgagttcaggattgcctagggaaacactgggccagatctgggcgttggctaaccgcacaacccccggaaaactcacaaaggaagaactatataccgtactggcgatgatagcagttacccaaaggggcgtgccagcaatgtcccccgacgcactgaatcagttcccagccgctcccatccccaccctatcaggcttttccatgacactccccacccccgtgagtcagcccacagtgatcccctcagggccagcaggctccatgcctttgtccctgggacagcctgtgatgggcatcaatctggtgggtccagtaggtggtgctgctgcccaggcttcatctggattcatcccaacatacccagcaaatcaggtcgtcaaacctgaggaagatgatttccaagattttcaggacgcttctaaatcaggaagtctcgacgacagtttttcagacttccaggagctgccggcttccagcaagacctccaacagccagcatggcaactccgcacccagcctccttatgcctcttcccggaactaaggcactccccagcatggacaaatacgccgtgtttaaaggaatcgcagcggacaagtcttccgagaacaccgtgcctcctggcgaccctggcgataaatacagtgcctttagggaattagagcagactgccgagaacaagcctttaggcgaaagttttgcagaatttagatccgccggtactgatgacggatttaccgactttaaaacagccgactctgtgtcacccctggaaccacctacgaaggacaagaccttcccgccatcgtttccttcaggtactatccagcagaagcagcagactcaagtcaagaatccactaaatttagctgacctggacatgttctcaagtgttaactgttcatcagaaaagcccctcagcttctcagctgtgttttcgacttccaaatccgtcagcacccctcaatccaccggtagcgctgccacaatgacagcactggccgctacaaagactagttccctggcagacgatttcggagaattctccctgtttggggagtacagcggcctcgcgccagtgggcgaacaggatgacttcgctgacttcatggccttctccaactcctctatctcatcggagcagaaacctgatgacaagtacgacgcgctgaaggaggaggccagtcccgtgcctttaacctccaacgtaggatccaccgttaaggggggacagaacagtaccgcggcttctactaagtacgatgtctttcgccagttgtctctggagggttcgggattaggtgttgaggatctgaaagataacacaccctccggtaaatctgatgacgacttcgctgactttcattcctctaagttttcctctatcaactctgacaagtccttgggcgagaaggccgtggcatttcggcacactaaagaagactcagcctcagtgaagtccctcgatctgcccagtattggcggatctagcgtagggaaagaggattctgaagacgctctctcggtgcagtttgacatgaagctcgccgacgtgggaggcgacctaaaacacgtcatgtctgatagcagtctggacctgcccaccgtaagcggccagcatcctccagccgctgacattgaggacctcaagtatgcagccttcggtagctattccagcaacttcgcggtatccaccctcacaagctacgactggtccgatcgcgacgacgctactcaggggaggaagttatcacccttcgtgctgtctgccggatctggatctcccagcgccactagcattctgcagaaaaaggaaaccagttttggcagttctgagaacatcaccatgacaagcttgagcaaggtgactacatttgtatcagaagacgcactcccagagactacatttccggctcttgcctctttcaaagacacaataccacagacctccgaacagaaggaatacgagaatagagattacaaggacttcaccaagcaggatctgcccacagccgaaaggtcacaggaagcaacctgtcctagccccgcatcctccggagcttcccaggaaaccccaaatgagtgctccgatgattttggggagtttcagtctgaaaaacctaagatctccaagttcgattttctcgtcgcaactagtcaatccaagatgaaaagttctgaagagatgatcaaatcagaactggctacattcgatctgtcggttcaaggatcccataagagatccctgtcgctcggcgataaggagatctctcggagctcgccctcccccgcactcgagcagcccttcagggatcgctccaatactctcaatgagaagcctgccctacctgtgatccgcgacaaatataaagatctgaccggcgaggtggaggaaaatgagagatatgcttacgaatggcagaggtgccttggctctgctctaaacgtgattaaaaaagctaacgatacgcttaacggcatttctagctcctccgtatgcactgaggttatccagtctgcccaaggcatggaatatctgctgggcgtggtcgaggtgtacagggtgacaaaaagggtggagctcggaataaaagctaccgctgtatgcagcgaaaagttgcagcagttgcttaaggacatcgataaagtctggaacaacctgattgggttcatgtccctagcgacccttacatgttgctgggagaaaatgacggtgataaccaagcacctgtccccctatcatgaactgcttgaggaaaagccggatgagaactctctagacttctccagctgtatgttaagaccaggcattaagaacgcgcaggagcttgcgtgcggggtctgtctcttgaacgttgattctaggagcaggaaagaggagaagcccgcagaagaacaccctaaaaaggcgtttaatagcgagaccgactcatttaaactcgcgtacggaggacaccagtatcacgcatcttgcgccaatttctggatcaactgcgtcgaacctaagcctcctggcctcgtgctgcctgatttgctgtag

SEQ ID NO: 29445 - DNA, 1158 bp, synthetic construct
  source 1..1158: mol_type = other DNA; note = Synthetic coding sequence
atggccttacgccctggcgctggcagcggaggaggaggagcagccggagctggggctggctctgcgggtggcggaggctttatgttcccagtggcgggtgggatcaggccacctcaggcaggcttgatgccgatgcagcaacagggcttccccatggtctcagtgatgcaaccaaatatgcagggcattatgggtatgaattacagctcccagatgagtcagggcccaattgcaatgcaggcaggaatcccaatggggcctatgcctgccgcaggcatgccatacctcggacaggcaccttttctgggcatgaggcccccaggcccacaatataccccagacatgcagaagcagtttgctgaggaacagcagaaacgcttcgaacaacagcagaagctgttggaagaagagagaaagcgtagacagtttgaggaacagaagcagaagctacgactgctgtcctctgtaaaacccaagactggcgaaaaatcgagggatgacgcgctagaagccataaagggaaatctggacggatttagccgggatgctaagatgcacccgacgcctgcttcgcatcccaaaaaaccagattgccctacgtcctcacactctacgaaaacagttagtccaagcccagccttcttggacgaggaggaattctcagacttcatgcaggggcctgtggaggtccccccttgcggaccttctagcacgagtcaaccatttcagtcctttcatcctagtacacccctgggtcagctgcacactcagaaagccggaacccagcccctccccccaagccagagccccgtcccctttgcactccacggagtcccaggccagattccttatttttcaactgcatccgcctctcacagtgttcctgaagcagggccaagcctcgaggagaaattcctggtgagctgcgacatctctaccagtggtcaggaacaaatcaagctgaacacttccgaggttggccacaaggcactcggccctggtagctccaagaagtacccctcactgatggctagtaacggagtcgcagtggacggctgcgtatgggagtactttccacatcgcattctgctgtctcctgagtgtctgctgggcttcaccatgcgtgtgtggtttcagatgccaattcggaaatcctag

SEQ ID NO: 29446 - DNA, 939 bp, synthetic construct
  source 1..939: mol_type = other DNA; note = Synthetic coding sequence
atggcagacttcgggatctccgctggccagttcgtggccgtagtatgggacaaatcatcaccagtggaagccctgaagggtctggttgacaaactccaagccctaacaggtaatgaaggacgggtgtcagtggaaaatataaaacagctgctgcagtctgcacacaaggaatcctcctttgacatcatactgagtggcctggtgccaggcagtactacattgcactcagcggagatccttgcggaaattgccaggatcctaaggccgggaggctgcctgttcctgaaggaacccgtggaaaccgccgtcgataacaacagcaaggtgaagaccgcctccaagttgtgctctgcccttacattgtcgggtcttgtagaggtcaaagagctacagcgggagccactcacacccgaagaagtgcagagcgtccgagagcaccttggccacgagagtgacaacctcctcttcgtacagatcactgggaaaaaacctaattttgaagtcggctcctcccggcagctcaagttgtctattactaaaaaatcgagcccttctgtaaagcccgctgttgacccagccgcagccaagctatggaccttgagcgccaacgatatggaggacgattcaatggatcttatagattccgacgaattattggatccagaggatcttaagaagccggaccctgctagtcttagagccgctagttgcggtgaaggtaagaaaaggaaagcatgtaaaaattgcacttgtggtcttgcagaagagctggaaaaggaaaaaagccgagagcagatgtctagtcagcctaagtccgcttgcgggaattgctatctaggagacgccttcaggtgtgcatcctgcccttaccttggcatgcccgcattcaagcccggagaaaaggtgctactgtctgactctaatttgcatgacgcgtag

SEQ ID NO: 29447 - DNA, 1056 bp, synthetic construct
  source 1..1056: mol_type = other DNA; note = Synthetic coding sequence
atgaatgaatctaatgatagcaccaattacgatatggctccatactatgaggcactgtgtaagagtttggattggcagatagatgttgatctactgaacaagatgaaaaaggctaacgaagacgagctgaagcggctcgacgaagagctggaggacgctgaaaaaaatctgggcgagagtgagataagggacgcgatgatggcaaaggcggagtacttgtgcagaatcggcgacaaggaaggcgcactaactgccttcagaaagacctacgacaaaaccgtggctctgggtcacagactggacattgtcttctacctgctgaggatagggctattctacatggacaacgatttaatcacaaggaataccgaaaaggcgaagtcgttgatagaggagggcggtgactgggacagacgtaataggcttaaagtgtatcagggactttattgcgttgctataagagactttaagcaggctgcggaactgttcttggacaccgtgagcactttcaccagctatgaactgatggattacaaaaccttcgtgacttatactgtttacgtgagtatgatcgctctagagcgccctgacttgagggagaaagtgatcaaaggtgccgagatcctagaggttctgcactctctccccgctgtacgtcagtacttatttagcctgtacgaatgcaggtattctgtctttttccagagtctggccgtcgttgaacaggagatgaagaaagactggttattcgctccacactatagatattacgtccgagagatgagaattcacgcttactctcaactactggagtcttacaggtctcttaccctcgggtatatggcggaggcatttggcgttggtgtagaattcattgaccaggaactgtcccgtttcattgctgccggtcgtctgcattgcaagattgataaggtgaatgaaattgtcgaaacaaatcgacctgatagcaaaaactggcaataccaggagaccattaagaagggcgacctgttgcttaacagggtgcaaaagctgagcagagtcatcaacatgtag

SEQ ID NO: 29448 - DNA, 414 bp, synthetic construct
  source 1..414: mol_type = other DNA; note = Synthetic coding sequence
atgatcctgcctaccaaggcaatggctacacaggagctcacagttaagagaaagttatcgggtaacacactccaggtgcaggcgtctagtcctgtcgcgctgggcgttcgtatccccacagtcgcactgcacatgatggaactgttcgacactaccgtggagcagctttacagcatattcacggtcaaggagctcacaaacaaaaagatcattatgaagtggagatgtggaaactggccggaggagcactacgccatggttgccctgaacttcgtgcctactcttggccagacagagttgcagctgaaagagttcttgagcatttgtaaggaggagaatatgaaattctgttggcagaagcagcacttcgaagaaatcaaaggttcgttacagttaactccacttaatggctag

SEQ ID NO: 29449 - DNA, 2796 bp, synthetic construct
  source 1..2796: mol_type = other DNA; note = Synthetic coding sequence
atggctgaagtggaggctgtgcagctgaaagaggagggaaacaggcatttccagctgcaggactacaaggccgctacaaattcttacagtcaggcgctaaaattaaccaaagataaggcgctactggctaccctttacaggaacagagctgcttgtggtctgaaaactgagtcttatgtgcaggccgcatcagacgcctctagagccatagacattaactcctcagacatcaaggccctgtaccgcaggtgccaggcactagagcacctcggaaagctagaccaggcctttaaagatgtgcagaggtgtgctaccttggaaccgaggaatcagaattttcaggagatgttacgtcgcctgaacacatcaatccaagaaaaactgcgagttcagtttagcaccgatagcagggtacagaagatgttcgagatcctgttggacgaaaattccgaggcagataaacgcgaaaaggctgcaaacaatctcatagtcctgggacgggaggaagctggcgctgagaaaatttttcagaataacggcgtggccctactgctccagctccttgacactaagaagccggagcttgtcctggcggctgtgcggactctgagtggcatgtgtagcggtcaccaagccagggccactgtgatcctacatgctgtgagaattgaccgtatctgctcactaatggccgtggagaatgaagaaatgagtctagccgtttgcaatctgcttcaggccatcattgactctctcagtggtgaggacaagagggaacacagaggaaaagaagaggctctggtactggacacgaagaaggacctgaagcagattaccagtcatctcttggacatgctcgtgtctaagaaggtctcagggcaaggtcgggaccaggccttaaacctgctgaataaaaatgtgccaaggaaggacctggcgattcatgacaactcccgtacaatatatgtggtcgataacggcctcagaaaaattctgaaggtcgttgggcaagtgcccgacctcccatcttgccttcccctaacagataatacgcgcatgctcgcttccattcttattaataagttatacgacgatctgcggtgtgaccctgagagggaccatttcagaaagatctgtgaggaatatatcacagggaagtttgatcctcaggatatggacaaaaacctgaatgctattcaaacagtttctggaatcctgcagggaccttttgacttaggcaaccaattgctggggctgaaaggagtcatggaaatgatggttgccttgtgtggcagcgagcgggagaccgatcaacttgttgctgtcgaagccctcatacacgcatctaccaagctctcaagggcaacgttcatcatcactaacggagtaagtctgctgaagcagatttacaaaacaacaaagaacgagaagatcaagattcgaacccttgttggcctgtgtaagctaggctcagctgggggaaccgactacggcctgcgacagtttgcagagggcagcaccgagaaactggccaagcagtgcagaaagtggttatgcaacatgtccatcgacactcgtactcgccgatgggctgtggaaggactggcttatctaaccctggacgctgatgttaaggacgattttgttcaggacgtgcctgccctgcaggcgatgtttgagctggccaaggctggtacgtcagacaagacaatactctatagcgtcgcgaccactctcgtgaactgtaccaatagttatgacgttaaggaagtgattcccgagttagtgcagctcgcaaaattttcaaaacagcacgttccagaggaacaccccaaggataagaaggattttatagacatgcgggtgaagagactgctgaaagccggagtcatctctgccctggcttgcatggtcaaagcagatagcgcaatattgactgatcagactaaggagctcctggcccgtgtgttccttgccctgtgtgacaatcccaaggatagaggcacaatagttgctcaggggggaggcaaggccctaataccccttgcattggagggaaccgatgtgggaaaagtcaaggctgcgcatgcactcgccaagatagccgcagtctccaatccggatattgcttttcctggtgagagagtatacgaggtagtcagaccgctggtgcgcttgcttgatacacagcgggacggcctccagaactatgaggccctgcttggactgacaaacctcagcggacggtctgataagctgagacagaaaatatttaaggagcgcgctctaccagatatcgaaaattacatgttcgagaaccatgaccagttgcgccaagccgctacagaatgtatgtgcaatatggtgcttcacaaggaagtccaagaacgattcctggccgatggcaatgatcgcctgaagctggtagtcttgctatgcggcgaagatgatgataaggttcagaacgccgcagctggagccttagctatgctgaccgcggctcacaagaagctgtgtctaaaaatgacacaagtgactactcagtggctagaaatccttcagcgactctgtctgcacgatcagctgagcgttcagcaccgcggattggttattgcttacaatttgctagccgctgatgccgagctggctaagaagctggttgaatccgagctactggaaatcttgacggtggtaggcaaacaggagcccgacgaaaaaaaggctgaggtggttcagaccgctcgagagtgtcttatcaaatgcatggattacggttttataaagcccgtcagctag

SEQ ID NO: 29450 - DNA, 318 bp, synthetic construct
  source 1..318: mol_type = other DNA; note = Synthetic coding sequence
atggcactgcggtaccccatggctgtgggcctaaataagggccataaggtcacaaaaaacgtatctaaacccagacactcccgcagaagagggagacttacaaagcataccaaattcgtacgggatatgatccgggaggtgtgcggctttgcgccatatgagagacgcgctatggagctcttaaaggtttccaaggataagcgagccctcaaatttattaaaaagagggtggggactcatatccgagctaaacgcaaaagggaggaactgtccaatgttctagccgctatgcggaaggctgccgctaaaaaggactag

SEQ ID NO: 29451 - DNA, 663 bp, synthetic construct
  source 1..663: mol_type = other DNA; note = Synthetic coding sequence
atgaattcgatggaccgccatattcagcaaacaaacgatagactgcagtgtattaagcagcaccttcagaacccagcgaacttccacaacgctgccacagaactactggactggtgcggtgacccacgcgctttccagcggccttttgagcagtctttaatgggctgtttgaccgtggtttcacgggtcgccgcacagcaggggtttgacctcgacctcggctaccgtctgctcgcggtatgcgccgctaacagggataaattcacgccaaagtcagccgctctcctctcttcctggtgtgaggagctgggaagattgctcctgcttcggcaccagaagtcgcgccagtccgacccaccgggaaaactcccaatgcaacctcccctgtcctctatgagttccatgaagcctaccctgagtcactccgacgggagtttcccctatgatagcgtgccatggctgcccgcatatcccgcatgtacccccccaccttctcagtcacatcccaattcttgtagtctcaagcagaagcagcccttggctttcccacctcccctgtgttctatatggttaaccacactgcagggtctgctcggatctctgtcctgcgtccacttcgtgagcgggtggagcgttcccagagagccccatgggctcggatag

SEQ ID NO: 29452 - DNA, 354 bp, synthetic construct
  source 1..354: mol_type = other DNA; note = Synthetic coding sequence
atggtgcaacgcttgacgtaccgacgcaggctgagttacaatactgcctccaacaagacgcgactgagcaggacgcccggaaaccgtatcgtctacctgtacaccaaaaaagtggggaaggcccctaagtccgcatgcggagtatgcccaggacggctgcgaggtgtgagggcagtgagacccaaagtccttatgcgattatcaaaaaccaagaagcatgtgtcacgcgcatatgggggatccatgtgcgccaagtgtgtccgtgaccgcataaaacgggcattccttatcgaagagcagaagatcgttgtgaaggtgctgaaggctcaggcacagtcccagaaggctaagtag

SEQ ID NO: 29453 - DNA, 354 bp, synthetic construct
  source 1..354: mol_type = other DNA; note = Synthetic coding sequence
atggtacagcgcctgacctatcggcgtagactgtcttataataccgcttccaataagacaaggttgagccgcacccccggaaaccggatagtttacctgtataccaagaaggttgggaaggcgcctaaatcagcatgcggtgtgtgccccggacgcttaaggggggtgagagccgtcaggccaaaggtgcttatgcggctgagcaagactaagaagcatgtgtctagagcctatggaggatctatgtgcgcaaaatgtgtgcgtgaccgcattaagagggcctttctgatcgaggaacagaagatagtcgtgaaagtgctaaaagcacaagctcagagccagaaggctaaatag

SEQ ID NO: 29454 - DNA, 354 bp, synthetic construct
  source 1..354: mol_type = other DNA; note = Synthetic coding sequence
atggtgcaacgtcttacttatcgccgacggcttagttacaataccgcgtcaaataaaacccgtctctcccgcacccccggtaacaggatagtgtatctgtacacaaagaaggttggtaaagcccctaagagcgcctgtggtgtttgtccgggtaggctacggggagtccgcgctgtgaggcccaaggtgctgatgcgcctttccaagaccaaaaagcacgtttccagagcttatggaggatcaatgtgcgccaagtgcgtgcgcgacagaatcaaacgagctttcctgatcgaggaacagaagatcgtggtgaaagtgctaaaggctcaggcgcagtcccagaaagccaaatag

SEQ ID NO: 29455 - DNA, 1902 bp, synthetic construct
  source 1..1902: mol_type = other DNA; note = Synthetic coding sequence
atgaaagccatcaaaaaatccttgaccgaggaggaatatctgtacctggatttctctcatcagacagagggatgcatcttcccccttcataccagcgtgaccttgttcctgctgtcttactgcgattgtaagatatttaaaatctgcctcgtggtgaccaaagaggtatcacgggattcttctctgctgcgcgacgaccttatccaagacgtcgagatacagatcatatcccgccaggagctgccacccattgttcagaactgttgtctaccggcagtggttgaaagatctgacaacttttgtcgagccggtctggcggttgttctgaggcatataatccagaaaagctacgaagctgatccactgaagaaagaactgctagagctgttaggcttcaagaaaacatgcttaaaggcctgcgccgaggtatcgcagtggactaggctgtgcgagctcaccataccccttgccattgaaaatttcttgagagagtcctcagaccagcccccaacaattcctgtagagattttacagctggagaaaaagttatctgagccagtgagagtgcacaatgacgataaactccggcgacagaaactcaaacaacagaaagcagacggagtgggccctcccctcacgaagggcaaagccaagtcaaaggtgcacacacaggagacttctgaaggcttggactccagcagcaagagcttagagctcaaagtcgctttttcaaaactgactgttcaagaagaacccgctacaaccaaccgcgaaccatcccacattaggaaggcaaaggcgtccgacctcccacccctagaacacgtgttcgcggaagggctctacttcaccctggccgacatagttcttcttccctgcatccaccacttccttgtcattatcagcagaaagttttccgagaaactagttgaattccccttgctggccagttggtatcagcgtatccaagaggtaccgggtgtgaaaaccgctgcatcaaaatgtggcatccaatttcttcatctgccgaaactgcttacaacatctacagagcagcatccaaatctctgtgaagtgcctggggtcgaggagcagagcgatccattgtttatcggaggccctcggccaaccatggctaagctcatggagaaaggtattgaagtgatgttttccccacatccttgcccaacatggactcttgattggaatgtgcttcccgcagctgtgagtcccaaagaaggaaagatgagctctgaccgagccttgcgtaaacagcagcaattgaacaatctggtctatgtcgtaaccaatcaggccaagcctggcgaccgaatcgtggacttctgcagcggcggagggcacgtgggaatcgttctggcacatatgttgccgtcttgccaggtgactctgatagaaaataaggagctctcgttgattcgcgctaaaaaaaggtccgatgagttgggtctgtcaaatatttggttcatccaggccaatatggaatatttcacaggcatgttcaatattggagttgctctgcatgcctgtggagtggcaaccgacatggtgatagagcattgcattaaaacccgggcatcttttgtgacgtgtccatgctgttatgggttcatacaaaatacaagcaagttcaattttccaaaatcagagcagttcaaaaagacactgagctacaaggagcacatgatcctgtgtcgtttcgccgatcaaaccgcagtgcagctgcctccacaacggcgtttaatcggcaagcaatgtatgtgtcttgttgacctggatagagcccgagcagctgaggagtgtgggtatagtgtgcaggtcatctcgatggaaccggagagttgttctcccaaaaataatatgatcgtgggtgtgcccatctag

SEQ ID NO: 29456 - DNA, 1641 bp, synthetic construct
  source 1..1641: mol_type = other DNA; note = Synthetic coding sequence
atgaaggcaattaagaagtcactgaccgaagaggagtacctgtacctggattttagccatcagaccgaaggatgcatttttcctcttcacacctcagtaaccctcttcctcctatcctattgtgactgtaagatttttaaaatatgtctggtagtaacgaaagaggtgtcccagtggacgcgtctctgtgaactgactatcccactggccatcgagaacttcttgagagagtctagcgaccagccgcctacaatacccgttgaaatcctgcagctggaaaagaaactgtctgagccagtgagagtgcacaatgacgataaattacgccgtcagaagttgaagcagcagaaagcagatggtgtcggcccacctctgacaaaaggcaaggccaagagcaaggtgcatactcaggagacctcggaggggctcgattcctctagtaaatccctcgagctcaaagtggctttttccaagctcaccgtccaggaagagcctgccacaaccaatcgagagccctctcatattcgtaaggcaaaggcttccgatctgccacctctggagcacgtgtttgctgaaggactgtactttaccctggccgacattgtgctgctcccatgtattcatcatttcctggtcatcatatctagaaaattctccgaaaagctcgttgagttccctttgctggcttcgtggtaccagagaatccaggaagtgccaggcgtgaagaccgctgctagtaaatgtggcatccagttcctgcacctacctaagttgctgaccacctctaccgaacagcatccaaatctgtgcgaagtccctggcgtggaagaacagtccgatcctctttttatcggtggccctaggcccaccatggcaaaactcatggagaaaggcattgaggtcatgttctcgccccacccttgcccaacttggacgctggactggaatgttctgcctgctgcagtgagtccgaaggaaggaaagatgagctccgatagggctttgcgtaaacagcagcaacttaataacctggtgtacgtggtaacaaatcaggcaaagcccggagatcgtattgtggatttctgttccggaggaggtcatgtaggaatcgtgcttgcgcacatgctgccctcctgccaggtcacactaatcgaaaacaaggaactgagccttatccgcgctaaaaaacgaagcgacgagctcggcttgagcaacatctggttcatccaggccaacatggaatattttacgggcatgtttaacataggtgtcgctcttcatgcctgcggcgtggccaccgacatggtgatcgaacactgtatcaagacccgcgcatcattcgtgacctgcccatgctgctatggctttattcagaacacctccaagtttaacttcccgaagagcgaacagttcaagaagactttgagctacaaggaacacatgatattgtgtcgctttgctgaccagactgctgtgcagttacccccacagcgcagactgatcgggaagcagtgcatgtgtttggtggacctcgatagggcaagagcagcggaggagtgcggatatagcgtgcaggtgattagcatggagcccgaaagttgtagtccgaagaacaatatgatcgtaggggtaccgatctag

SEQ ID NO: 29457 - DNA, 1542 bp, synthetic construct
  source 1..1542: mol_type = other DNA; note = Synthetic coding sequence
atgctgctcgagaatctgacggataatgagagcgaaaacacaaatttgaaaaagaaagtctttgaaaaggaggctcacatccaagaactcagctgcttgttccagtccgagaaagcaaataccctcaaggccaacagattctcccagagtgttaaggttgtacacgaacgcttgcagatccagatacataagagggaagctgagaatgacaagctcaaagagtacgtgaagtcccttgagacaaagatcgcaaagtggaatttacaatccagaatgaataagaacgaggcgatagtgatgaaggaagctagtcgacagaaaactgtggccctgaagaaagcttctaaggtatacaagcagcggctggatcacttcactggggcaatagaaaagcttacaagccagatccgcgaccaggaggccaaattgtccgagaccattagtgcctccaatgcttggaagtcccactacgaaaagatcgtcatcgagaagaccgaactagaggtgcaaattgagacaatgaagaaacagatcataaatcttctggaggatctcaagaagatggaggaccatggaaagaacagttgtgaggaaatactgaggaaagttcatagtatcgagtatgagaacgagacgctcaacctggaaaacactaaacttaagaccactctggctgcactcaaggatgaggtggtttctgtcgagaacgaactctctgagcttcaggaggtggaaaagaagcagaaaacactgatagaaatgtacaaaacacaggtgcagaagctgcaggaggcagccgagattgtgaagagccgctgcgaaaacctcctgcacaaaaacaaccagatcaccaaaaccaaaaacaagaacgtcgagaaaatgagaggccagatggagagccatctcaaggagctggagcgggtctgcgactcactcactgcggctgaaagacgcctgcatgagtgccaagagtccctccagtgttgtaagggcaagtgtgcagatcaggaacatacaatccgtgagctacagggtcaggttgacggcaatcacaatttactgacaaagcttagtcttgaggaagagaattgcctcatccagctgaagtgtgagaacctgcagcagaaactagagcaaatggatgccgagaacaaagagttagaaaaaaagttagcaaaccaagaagagtgcttaaagcattccaacctgaaattcaaggaaaagagcgccgagtacaccgctttggcgagacaactagaggcagcattggaagagggccgacagaaggtagccgaagagatcgaaaaaatgtctagcagagagtctgcgctccagataaagatcttggacctcgagaccgagctacgtaaaaaaaatgaagagcagaaccagcttgtgtgtaaaatgaattctaaagcacagcaccaggaagtttgcctgaaggaagtgcagaacagcctggagaagagtgagaaccaaaatgagtcaataaagaactatctgcagtttctgaagactagctatgtgacgatgttcgagtag

SEQ ID NO: 29458 - DNA, 1167 bp, synthetic construct
  source 1..1167: mol_type = other DNA; note = Synthetic coding sequence
atggctgcggctgctgctctggcaaggttggagcagaagcagagtagggcctgggggcctacttcccaggatacgattcgcaatcaggtcaggaaggaactgcaagctgaagcaactgtttctggctccccagaggcacccggaactaatgttgtatctgagccacgagaggagggcagcgcacacctagctgtgccaggcgtatactttacttgtcctcttacaggagcaaccctgaggaaagaccagagagacgcttgcatcaaggaggccattctgcttcatttctcaacagatcctgtcgccgcatctatcatgaagatctacacgtttaataaggatcaggatagggttaaacttggagtagataccatcgctaagtatttggacaacattcatttacatcctgaggaagagaaatatcgaaaaattaagttgcaaaataaggtgtttcaggagcggataaactgccttgaggggacccacgaattctttgaggcaattggatttcagaaggtgctgttgcccgctcaggaccaggaagaccccgaagagttctatgtgctcagcgagaccacactcgcccagcctcaaagcttagagcgacataaggaacagttactcgctgctgaacctgttagagcaaaactcgacaggcagaggagagtatttcagccctcccccctggcttcacaatttgaactgccgggagatttttttaatctgacggcagaggaaattaaacgagaacaacgacttagatcagaagccgtggagcgactgagtgtgctgagaactaaagctatgcgcgaaaaagaagagcagaggggcttgcggaaatacaactacaccctgttgagagtccggttgccagacggctgtctcctgcaggggactttttacgcacgggaacggcttggagccgtgtacggatttgtcagagaagccctccaaagcgactggttacctttcgagcttctggcttctggcggacagaagctgtccgaagacgagaaccttgctctcaatgagtgcggacttgttccgagcgcattgctgaccttttcttgggacatggctgtcttggaggatattaaggctgccggagcagaaccagattctatcctcaagcccgagctcctgtcagccattgaaaaacttctgtag

SEQ ID NO: 29459 - DNA, 2691 bp, synthetic construct
  source 1..2691: mol_type = other DNA; note = Synthetic coding sequence
atggatggcgcagcaggccctggagatggccctgctagggaagctctgcaatctctctcccagcggctgcgcgtccaagaacaagagatggagctcgtaaaggcggctttggcagaagcactgcgtttgttgagactgcaggttccgccttcatccctgcaaggcagcggcactcccgctcctcctggtgattccttagcagcccctccgggactcccacctacctgtaccccatctcttgtcagcagaggaactcagactgagacggaggtggagttaaagtcctctcccggaccacctggactgtccaatggtcccccagcaccccagggcgctagtgaggagcccagcggcacccagtctgaggggggagggtctagtagctctggggctggcagtcctggtcctcctggaattctgaggcctttgcagccgcctcagcgcgctgatacaccacgaagaaatagctctagttccagctccccctccgagcgtcctcgtcagaagctgtcccgtaaggctattagttccgcgaatctcttagtaaggtctggaagcaccgagagcaggggcggtaaagacccgttgtccagtccgggaggtcctggttctcgcagatcaaattacaacctagagggcatatctgttaagatgttcctacgaggacgccctatcaccatgtatattccctccggcatccgatccctcgaagagcttccttcgggtcccccacccgagactttaagcctagattgggtttacggttatcgcggaagagattctcggtccaacctctttgtcctaaggagcggcgaggttgtgtacttcatcgcatgtgttgtggtgctctaccgaccgggagggggaccgggagggccaggaggcggtggccagaggcattacaggggtcacacagactgcgtcaggtgtctggcagtccaccctgatggagtccgggtcgctagcggtcaaacagctggcgttgataaagacgggaagccgctgcagcccgttgtgcatatctgggacagcgaaaccttgttgaaactccaagagatcggcttgggtgctttcgagcgcggagtgggcgcactggctttttcagccgctgaccagggagcattcctgtgtgtggtggacgatagtaatgagcacatgttatccgtgtgggattgtagccgcggaatgaagcttgctgaaattaagtccacaaatgactctgtgctcgcagtgggtttcaaccccagagatagctcctgcatcgtcaccagcgggaaatcccatgttcacttttggaattggagtggcggtgtcggagtgcccggaaatggaaccctgacaaggaaacagggtgtgttcggaaagtacaaaaaaccaaaatttattccctgcttcgtgttccttcctgacggggatatactaactggagatagtgagggcaacatcctgacctggggaaggtccccatccgattccaaaacccccggtcgcggaggggcaaaggaaacgtatggaatagtagctcaggcccacgcacatgaaggatctatcttcgctctgtgccttcgcagagacggaaccgtgctgagcggaggaggcagagacaggcgactggtccagtggggccctggactcgtggctctgcaagaggccgagatccccgaacactttggtgctgtcagggctatagctgagggcttggggtctgagcttctggtggggacgacaaagaacgcgctgttgcgcggagatctggcacagggtttcagtccagtgattcaggggcatacagatgaactgtggggtctatgtacccaccccagccagaacaggttcctgacatgcgggcatgatagacagctctgtctctgggacggagagtcgcacgctctggcctggtctattgatctgaaggagaccggcctgtgcgccgattttcaccctagcggggcagtcgtggctgtgggactcaacacaggccgttggctggttctggataccgaaacacgagaaattgttagcgatgtgatcgacggcaatgagcaactcagtgtggtccgctacagtccagacggtctatacctggcgattggaagccatgataatgtcatctacatctacagtgttagctcagatggggcaaagtcttcccggttcggaaggtgcatgggccactcaagctttattactcacttggactggtcaaaagacggcaatttcatcatgagtaacagtggtgattacgagatcttgtattgggatgtggccggtggatgcaagcagctaaaaaataggtatgaaagcagagacagagagtgggccacatatacttgtgtgctcggctttcacgtttacggcgtctggccagatggcagcgacgggactgacattaattccttgtgccgatctcataacgagcgggtcgtggctgttgcagacgacttctgcaaggtgcatctgtttcagtatccctgcgctcgcgcaaaagctccttctcgaatgtacggcggacatggatcacacgtgacttcagtgaggttcacacacgacgatagtcatctggtgagtcttggcggaaaggatgcctctatcttccagtggagggtgctcggagctggcggtgcaggaccggctccagcgacgccttcgaggactccttcgctttcacccgcaagtagcctagatgtttag

SEQ ID NO: 29460 - DNA, 2934 bp, synthetic construct
  source 1..2934: mol_type = other DNA; note = Synthetic coding sequence
atgggtgcagaggaagaagtcttggttaccttgagcggtggtgctccttggggattccgcctgcacggtggtgctgagcagcgcaagcccttgcaagtaagcaagatccgcagacgcagtcaagctggtagagcaggactaagggaacgagaccagctactggccattaatggagtgtcctgtaccaatctaagtcacgcttctgccatgtcactgatagacgcatcgggaaaccagctggtgctgactgttcagcggcttgccgacgaaggcccagtccagagtccctcacctcacgaactgcaagtactgtcacctctgagtccattgtctccagagccgccaggggcacccgttccacagcccctgcagccaggaagcctgcggtcccctcctgattccgaagcctattatggagagacagattctgacgccgacggtcctgccacacaggagaaacctcggagacccaggaggagaggaccaaccaggcctacgcctccaggggcaccaccagatgaggtttacctttccgactctccagccgagccagcccctacaatcccaggcccacctagccaaggggattcaagagtatcatctccatcatgggaagacggggctgccctgcagccacccccagctgaagcgctcctgctgcctcacggccctctgaggccagggccacacctgatacctatggttgggccagtaccacatcccgtcgcagaggatttaacaacaacttatactcagaaggcgaaacaggccaaattgcagcgggcagagtccctgcaggaaaaaagcataaaagaggctaaaaccaagtgtaggacaatcgcttcccttttaacagctgccccaaatccacactctaaaggcgtgctgatgttcaaaaagagacgccagcgggcaaaaaagtatacgctggtgtcctttggcgctgctgcaggcactggggctgaagaagaggacggagtgcctcctacatccgagagtgagctggacgaggaggcatttagcgatgccagatctctcacaaaccagagtgattgggatagcccatatctcgatatggaacttgcacgcgcaggctctcgcgcttctgaagggcagggatctggattggggggacagctgagtgaggttagcggaaggggtgtacaacttttcgagcagcagcgccagcgggctgatagttctactcaagagcttgctcgcgttgaacccgctgcaatgctgaacggcgagggtctgcagtcccctccaagagcacagtccgccccacctgaggccgcagtgctaccaccttctccgctgcccgctccggttgcatctcccagaccatttcagcctggcggtggagcccctactcctgctccgagcatctttaaccgttctgcaagaccatttactcccggtcttcaaggtcaacgcccaactacaacatccgttattttccggcctctggctccaaagcgagccaacgactcgctgggagggctgagtccagcaccacctccattcttgagcagccagggacctactcccttacctagtttcaccagcggcgtaccctcacatgcccctgtgtctgggtcaccatccacgcctcgctcatccggccctgtcactgctaccagttctttatatatccctgccccttcacggccagtgaccccgggaggtgctcctgaacccccagcgccacccagcgccgcagccatgacatcgacagcaagcatttttcttagtgcccctctccgtcccagcgccagacccgaggcaccggcaccaggaccgggtgcgccagagcctccgtccgctcgagaacagcgcatcagcgtgcctgcggctagaactggtattctgcaagaagcgagaaggagaggcactaggaagcaaatgtttcggccaggaaaggaggaaactaagaacagccctaacccagaactgctctctctggtgcagaacttggacgagaagcccagggccggtggtgccgaatcgggaccggaagaggatgcactgtccctgggcgcagaagcttgcaacttcatgcaacctgtgggcgctcgttcctacaaaacactccctcatgtaacgccgaaaaccccacctccaatggcccctaagactcctccgccaatgactccaaaaacgcctccacccgtcgccccaaagccaccttctagggggctgttggatgggctggttaatggcgcagccagcagcgctggaattccagagccgcctcgcctgcaggggagaggcggagagctatttgccaagaggcagtctcgggctgacagatatgtcgtcgagggaacccccggtcccggtcttggacctcgtccacgcagtccatctcctaccccatcccttccaccgtcttggaaatactctcctaatatccgggctcctcctcccattgcttataacccgctgctcagtccattcttccctcaagctgcgcgaactttgcctaaggcccagtcccaaggacccagggctacacctaaacagggaatcaaagctctggacttcatgaggcatcagccttaccaactcaagacggcaatgttttgcttcgatgaggtgcctcctactccaggcccaatagcttccggaagtccaaagacagcaagggttcaggagattaggcgttttagcacgcctgctcctcaaccaacagccgagccccttgctcccaccgtcctggccccaagggccgctacgacactggatgaacctatatggcgaacagagctggcctctgcaccggtcccgtcccccgcaccaccacctgaagccccaaggggcttgggagctagcccctcatcctgcggctttcaggtcgcacggccaaggttttctgccaccagaacaggtttacaagcccatgtatggcgtcctggggcaggtcaccagtag

SEQ ID NO: 29461 - DNA, 2757 bp, synthetic construct
  source 1..2757: mol_type = other DNA; note = Synthetic coding sequence
atgggcaccactgcaccaggtcctatccatcttttggaactgtgtgatcagaagctcatggagttcttatgcaatatggacaacaaggacctcgtatggctggaagagatacaggaggaggctgagcgcatgtttactcgtgaattttctaaggaacctgaattgatgcccaaaacaccaagccagaagaacagacgaaagaagcgccgtatttcatatgtgcaggacgagaatcgggacccaatccggaggcggctgagccggagaaaaagcaggagttctcagctttctagtagacgtctgcggagtaaggattcagtcgagaagctagccaccgtcgtcggggaaaatggatccgtcctgaggagggtgacccgggcagccgctgccgctgcagccgctaccatggccctggctgcgccaagtagtcccacaccagaatcacctacaatgctcaccaaaaagcccgaggacaatcatacccaatgccagcttgtccccgttgtggaaatcggtatttccgagcgccagaacgccgagcaacacgttacccagcttatgtcaacagagccacttcctaggacgctctccccaacccctgcaagcgccactgcacccacttcccagggtattcccacatccgatgaggaaagcacccccaagaaatcaaaggcacgcattctagagtcaattaccgtgtcttcactcatggctaccccgcaggacccaaagggccagggcgtggggacaggcaggtccgcgagtaagctaagaatcgcccaggtctctcctgggccacgcgactcacctgcgtttccagattcgccctggagggagcgggtgcttgccccaatactccctgataacttctcaacccctaccggatcacgaacagatagccagtccgtgagacattcccccattgcccctagcagcccctcgccccaggtcctggcacagaaatactcattggttgcaaagcaggagtcagtcgttagaagagctagtcgcagactggcaaagaaaacagctgaggaacccgctgccagtggcaggattatatgccattcatacctcgagagactcctaaatgtggaggtccctcagaaggtaggctcagagcagaaagagccaccagaggaagctgaacctgtggccgctgctgaacctgaggttccagaaaataatggcaacaattcctggccacataacgacaccgagattgctaacagcacacccaaccctaagcccgctgcctctagtcccgagactccttcagctggccagcaagaagccaaaacagaccaggccgatggcccaagagaacctccgcagagcgcccgacgcaagagatcctataaacaggctgtaagcgaacttgatgaggagcaacacctagaggatgaagagctacagcccccacgtagtaaaactccctcaagtccttgccccgctagcaaagtggttcgtccgctgcgaacattcttgcacacggttcagcggaatcaaatgctgatgacccccacgtccgcaccccgatctgtgatgaagtccttcatcaaaaggaacacccccctgcgaatggatcccaagtgcagtttcgtggagaaagaacgtcagagactggaaaatctaaggaggaaggaggaagctgagcagttgcgcaggcaaaaagtggaagaggataagaggcgtcgcctggaagaggtcaagctgaaaagggaggagcgtctgcggaaggtactgcaggctcgggaaagggtggagcagatgaaagaagaaaagaagaaacaaatcgagcagaagtttgcacagatcgacgaaaagactgaaaaagccaaggaggagcggctggcagaagagaaagcaaaaaaaaaagccgcagccaagaagatggaagaggtggaggcaagacgcaaacaagaagaggaagccaggcggctacgatggctgcagcaagaagaggaggaaagaagacaccaggagctgctccagaaaaagaaggaggaggagcaagaaaggttgcgaaaagctgctgaggcaaagcgcctcgcagaacagagggaacaggagaggcgcgagcaggagcggcgtgagcaggagcgccgtgaacaggaacgtcgggagcaggaacgacgagaacaagagcgtcagctggccgaacaagaaaggcggcgtgaacaggagcgcttgcaggcagagcgagaactccaggagagagagaaggccctgcgcctgcagaaagagcagttgcaacgcgaactggaagaaaagaagaagaaggaggaacaacaacgtcttgccgagcgccagctgcaagaggagcaagagaagaaggctaaggaagccgcaggtgcttccaaggctctgaacgtcactgtggatgtgcagtcccccgcatgtactagctaccagatgactccccagggtcacagggcgccacccaaaattaacccagacaattacggcatggacctgaattctgacgactccacggatgacgaggcacaccctcggaagcctattcccacatgggccaggggcacgcccctgagccaggccataattcaccagtattatcatccccctaatttgctcgagctctttggaactattcttccgctagatctggaagacatatttaagaaaagcaaacctagataccataagaggacatcctctgcagtgtggaacagtccccctctccagggagctagggtgccgtcctccctggcctattctctaaagaaacactag

SEQ ID NO: 29462 - DNA, 1728 bp, synthetic construct
  source 1..1728: mol_type = other DNA; note = Synthetic coding sequence
atgacaagtaagaaactggtgaatagtgtagccggttgcgctgacgacgctctcgcaggccttgtggcctgtaaccctaacctgcaattgctccaaggccacagggtggctctgcgaagtgatctagatagtctgaagggaagagtagctctcttgagcgggggagggagcggccatgagccggctcacgcgggtttcataggtaaggggatgttgaccggtgtgatagcaggggctgtatttacaagtccagctgtaggatccatcttggcagccatacgagccgttgcacaggccggtacagtgggaaccctcctcatcgttaagaactacacgggcgatcggttaaactttggcctcgcccgagagcaagctagggctgagggaatcccagtggagatggtcgtaatcggcgacgacagcgcattcaccgtccttaagaaagccggacggaggggcctgtgtggtactgtgctgatccacaaagtggcaggcgctttagccgaagctggagtagggcttgaggaaatcgctaagcaggtaaatgtggtggcaaaagccatgggcactctgggggtctctctgtcttcgtgtagcgtgccgggttcaaagcctacgttcgagctcagtgctgatgaagttgagcttggactgggcatccatggagaagccggagtccgtcggattaagatggccacggccgatgagattgtgaaattgatgctggatcacatgactaacactaccaatgcgtctcacgtgcccgtccagccgggttcgagtgtcgtcatgatggtgaacaacctgggcggtctctcattcctcgagttgggcatcatcgcagacgctaccgtgaggagtctggagggccgtggggtcaagatcgccagagcactcgtcggcacctttatgtctgctcttgagatgccgggaataagcctgacccttttactggttgacgagccactcctgaaactgatcgatgctgaaaccaccgccgcagcctggcctaacgtcgcggctgtttccatcacagggcgtaagagatcaagggtggctcctgcggagccacaggaggcgccagacagtaccgccgctggaggctccgcttccaagagaatggcattggtacttgagcgcgtttgttcaacattactggggctggaggagcatctcaacgccctcgatagggccgctggcgatggcgactgcggaacgacgcattcacgcgctgcacgtgctattcaggagtggctgaaagaggggcctcctcccgcatctcccgctcaactgctgagtaagctcagcgttttgttactggagaaaatgggcggatctagcggggcactttacggcctgtttcttacggccgcagcacaaccactgaaggccaaaacgtccttaccagcgtggagcgcggctatggacgctggattggaggccatgcagaaatacggaaaggctgcacctggggacagaacaatgttggactccttgtgggccgcaggccaagaacttcaagcatggaagtcacctggagccgacctgctccaggtgcttaccaaagcagtgaagtcggcagaggcagccgcagaagcaactaagaatatggaggctggcgctggcagagcctcatacatctcttctgcccgactcgaacagccagatccaggcgcagtagccgcagcggctatcctgagagccattctcgaggtcttgcagagctag

SEQ ID NO: 29463 - DNA, 1080 bp, synthetic construct
  source 1..1080: mol_type = other DNA; note = Synthetic coding sequence
atggccgcaccctgcgcagaggacccctcgcttgaaaggcatttcaaggggcaccgggacgccgtcacctgcgtggacttttccataaacaccaagcagctggcaagcggtagtatggacagctgcttaatggtttggcacatgaagccccaaagccgtgcgtatcggttcaccggccacaaagacgcagtgacctgtgtgaactttagtccgagcggccatttacttgcctccgggtccagggataagacagtccggatctgggtgcccaacgtcaaaggggaatccactgtgttccgcgcacacacagctacagtcagatcagtgcacttttgctccgacggccagtcctttgttacagccagcgacgataaaaccgttaaggtgtgggccacacaccgacagaaattcctattctctttatcacagcatattaactgggtccgctgcgccaagttctctcctgatggacggctcatcgtttccgccagcgatgataagactgtaaagctctgggataaatcttcacgcgagtgtgtgcatagctattgcgaacatggcggattcgtaacatatgtggactttcatcctagtggcacatgcattgctgcagctgggatggacaatacggtgaaggtctgggatgtgcggacccaccgcctgctgcaacattaccagctgcacagcgctgccgtgaacgggctttcttttcacccttcaggcaattatctgatcaccgcaagcagcgatagcaccctgaaaatcctagacctgatggagggcaggttactatacacgctccacggacaccaaggcccagccactaccgtcgctttcagccgtactggtgagtactttgcctcaggaggatccgatgaacaagttatggtgtggaagagcaacttcgatattgtcgaccacggcgaagtgactaaagttccgagaccacccgctaccctagccagcagcatggggaatttaactgttagcatcctcgaacaacgcctgacactgacggaggacaaattaaaacaatgtctggagaatcagcaactgattatgcagagagctactccctag

SEQ ID NO: 29464 - DNA, 633 bp, synthetic construct
  source 1..633: mol_type = other DNA; note = Synthetic coding sequence
atggctgctagcgtggagcaacgggaggggacaatacaggtccaggggcaagcactcttctttagggaggcactaccgggtagcggccaggcaagattctccgtcctcctgctacacggcatcagattctcaagtgagacatggcagaacttgggtaccctccatcgactagcacaggccggttaccgcgcagtggcaattgacctgcccggattgggtcacagtaaagaagccgctgcacccgctcctattggggagcttgctccaggttctttcctcgccgcagtagtcgacgctctagagctaggaccaccagtggtgatttccccatctttgagcgggatgtactccttaccattcctaaccgcaccaggtagccagctgccgggattcgttccggttgctccaatctgtacagacaagataaatgcggctaattatgcttccgtgaaaacgcctgcgctcatagtgtacggtgaccaagatccaatgggtcagacatcttttgagcaccttaaacagctgccaaatcatcgcgtgctcattatgaagggggctggccacccgtgttacttggacaagcctgaagagtggcacacagggctgcttgacttcctccaggggttgcaatag

SEQ ID NO: 29465 - DNA, 1491 bp, synthetic construct
  source 1..1491: mol_type = other DNA; note = Synthetic coding sequence
atggatcaagattacgagcgaaggttgctgcggcagatagtaatccagaacgagaatacgatgcccagagttacagaaatgcggcgaaccctaacaccagcaagcagtcccgtgtcttcaccgagtaaacatggcgatagattcattcccagtcgagccggagccaattggagtgtgaacttccacaggattaatgagaacgaaaaatcgccctctcagaataggaaggcaaaagatgccacctctgacaacgggaaagacggattggcctattctgcccttctgaaaaatgagcttcttggagctggtattgaaaaagtgcaggatccccagactgaggaccgacggctgcagccatcaactccggaaaaaaagggcttgttcacgtattcactgagcactaaacgtagcagcccagacgatggaaatgatgtctccccttattctctaagccctgtgagtaacaaaagccaaaagctcttgaggagtccacgcaaacctacccgcaagatctccaagatcccctttaaagtcctcgatgctccagagcttcaagacgacttctatctgaatcttgtggactggagctccctcaatgtgctttccgtgggcttaggcacttgcgtttatctctggtcagcctgtaccagccaagtgacccggctatgtgatctatcagtggagggtgattcagtgacttctgtgggctggtctgagcgagggaatctggtcgccgttggtactcacaagggattcgtccagatatgggatgcagcagcagggaagaagcttagtatgttagaagggcacacagcccgtgtcggagccctcgcttggaatgccgaacagctgtcctctggatcacgtgaccgcatgatcttacagcgggacatccggacacccccactgcagagcgagagaaggctgcagggtcataggcaggaagtgtgcggcctcaagtggtccactgatcaccagctgttagccagtggtgggaacgataacaagttgctagtctggaaccactcgagtctgtctcccgttcagcagtacaccgagcatcttgccgctgtcaaggctatagcctggagcccccaccagcacggtttgttagcatccggtggaggtactgccgaccggtgtatccgattttggaatacgctaaccggccagccgctccagtgtattgacacaggaagccaggtatgtaacctggcttggtcaaagcacgcaaatgaactggtaagcacccatggatacagccagaatcagatcctagtttggaaatacccatcgctgacccaggttgccaagctgacaggccatagttaccgagtgttgtacctggctatgtcaccggatggagaggcaatagtgactggagctggcgacgaaaccctgagattttggaatgtgttttccaagacccggagtacaaaagtcaaatgggagagtgtttctgttctcaatctattcacaaggatcaggtag

SEQ ID NO: 29466 - DNA, 390 bp, synthetic construct
  source 1..390: mol_type = other DNA; note = Synthetic coding sequence
atggccgagttaatacagaaaaaattgcaaggagaggtcgagaaataccaacagctgcaaaaggatttgtccaaatcaatgagcggccgtcagaagctggaggctcagctgacggagaacaacattgttaaagaagagttggcattgctggatggatccaacgtggtcttcaagcttctgggccctgtgctagtcaaacaagagctgggagaagccagggcgaccgtgggaaaacgactggactatataactgcagaaattaaaaggtatgaaagtcaactgcgagatctggaacgccagtccgagcaacagcgcgagacgttggcccagctgcagcaggagttccagagggctcaggccgcaaaggccggagcccctggaaaggcatag

SEQ ID NO: 29467 - DNA, 888 bp, synthetic construct
  source 1..888: mol_type = other DNA; note = Synthetic coding sequence
atggagctaattcaggacacatctcgcccaccacttgaatacgttaagggcgttccactgattaagtacttcgcagaggccctcgggcctctccaatcctttcaggcccgtcctgacgatctgctgattaatacctatcctaagagtggtacaacgtgggtttctcaaatcctggacatgatctatcagggaggggatctggaaaagtgcaatcgcgctcccatatatgtgagagttccatttttagaggtgaacgaccccggtgagccgtctggcctagaaacacttaaggatacccctcccccaagactgattaagtcccaccttccactcgcgctactgccccagactcttctcgaccagaaggtgaaagtcgtttacgttgctcggaatcctaaggacgtggccgtgtcttattatcattttcatagaatggagaaagcacatcctgagcccggtacctgggatagcttcctagagaagttcatggccggtgaagtgagctacggtagctggtaccagcatgtgcaggagtggtgggaattgagtagaactcaccccgttctgtatttgttctacgaggacatgaaggagaacccgaaacgtgagatccagaaaattctcgaattcgtcggaaggagtctgccagaggaaaccatggactttatggtccagcacacctcttttaaggagatgaaaaaaaacccgatgacaaattacacaaccgttccacaggagctgatggaccacagcatttccccattcatgcgtaagggcatggcaggcgactggaaaactaccttcactgtagctcagaacgagaggtttgatgccgactacgcggagaaaatggctggatgctcattgtcctttaggagcgagttgtag

SEQ ID NO: 29468 - DNA, 888 bp, synthetic construct
  source 1..888: mol_type = other DNA; note = Synthetic coding sequence
atggagcttatccaagacacctcacgccctcctcttgagtatgttaagggggttccattaataaaatactttgcagaggccttgggcccacttcagtcattccaggcacgaccagatgacctcctgatcaatacttatccgaaaagcggaaccacatgggtgtcccagatcctggatatgatctatcagggtggagatctcgagaagtgcaacagagccccaatttacgtcagggtgccatttttagaagtgaacgatcccggagagcctagtgggctcgagacactaaaagacacacctccgcctaggctcatcaagtcccatttgcctctggccctgctgccgcagacccttttagaccaaaaggtaaaagtagtttacgttgcacgaaaccctaaggacgtggccgtgtcttactaccacttccatcgcatggagaaggcccaccccgagcccggtacatgggacagcttcctggagaagtttatggccggagaagtgagctacggaagctggtaccaacatgttcaggagtggtgggagttgtccagaactcaccccgtcctgtacttgttttacgaggatatgaaagaaaatcccaagagggagattcagaagattctggagtttgtgggtaggtctctccccgaagagactatggacttcatggtccagcacacctccttcaaggagatgaagaagaacccaatgaccaactataccacagtgcctcaggagctcatggatcattccatctcacctttcatgagaaagggcatggccggagactggaagacaacctttacagttgcccaaaacgagcgcttcgacgctgattatgcagaaaaaatggcagggtgcagcttgtcatttaggtcggagttgtag

SEQ ID NO: 29469 - DNA, 354 bp, synthetic construct
  source 1..354: mol_type = other DNA; note = Synthetic coding sequence
atgctctgctgggggaatgcttccttcgggcaactgggtctcggcggaatcgacgaggaaatagtgcttgagccaagaaagagcgattttttcatcaataagcgagtgcgcgatgttggatgtggtttgcgacatacagtgttcgtgttggacgatggtactgtttatacgtgtggttgcaatgacttggggcagctaggccatgaaaagagccggaaaaaaccggaaattctgaaggtttgccagatcagcagattataccgcctgcttgtcgtcaccattatccatttgcacttcctaaagcaagttaaatcatcagtgggagacaggatcaacatggccaattgggtgtag

SEQ ID NO: 29470 - DNA, 3174 bp, synthetic construct
  source 1..3174: mol_type = other DNA; note = Synthetic coding sequence
atgctgtgttggggcaatgcctcctttggccagttaggacttggaggtattgacgaggagattgtcctggagccacggaaatcagacttcttcattaataagcgggtgagggatgtcgggtgtggccttagacacaccgtgtttgtattggacgatggcacagtctatacttgcggctgtaacgatctgggccagctgggacatgagaagagccgaaaaaaacctgagcaggtggtcgcacttgatgcccagaacatcgtggctgtatcgtgcggcgaggcccacactctggccctaaatgataagggccaggtttacgcctggggtctggatagcgatgggcagcttggcctcgtaggctccgaggaatgtatccgcgtcccgcgtaacataaagagcttatccgacatccagattgtacaggtggcgtgtgggtactatcatagcctggcacttagcaaggcaagcgaagttttctgttggggccagaacaagtatggccagctcgggttgggcacagattgtaagaagcagacatccccacagctgcttaagagcttgttgggcattcccttcatgcaggttgctgcaggaggcgctcactcttttgtgctaacactgagcggggcaatttttggttgggggaggaacaagttcggccagctgggcctgaatgacgagaatgacagatatgttcctaacctgctcaagtctctcaggtctcagaagattgtgtacatctgctgcggcgaggaccacaccgcagccctcactaaagaaggtggggttttcacatttggcgcagggggatatgggcagttggggcacaattctacttctcacgagatcaatccacggaaagtgtttgagctgatgggctcaatagttacagaaatagcctgcggcagacagcacacctcggcctttgtgccgtccagtggtagaatttattctttcggcctaggcggtaatggacagctcgggactggctctacctcaaacaggaagagcccgttcactgtaaaaggcaactggtacccttacaatggacaatgtttgccggatatcgatagcgaggagtatttttgtgtcaagaggattttctcagggggagaccagtccttcagccactattcatcgcctcagaattgcggccctcccgacgattttcggtgccctaatccaactaagcaaatttggaccgtgaacgaggctctgatccagaaatggctgagctacccatcaggcaggttcccggtggagatcgcaaacgagatcgacggaaccttttcctccagcgggtgcctgaacggctctttccttgcagtttccaacgacgaccactaccgaaccgggacaagattttccggcgtcgacatgaatgccgctaggctgctgttccacaagctcatccagccggaccacccccaaatctctcaacaggtcgcagcaagtctcgaaaaaaatctgattcctaagctgacctcgagtttaccggacgtagaggccctcaggttttatctgaccctacccgagtgccccctaatgagcgatagtaacaatttcaccacaatcgccattcctttcgggacagccctcgtcaatcttgagaaggcgccactaaaggtgctcgaaaactggtggagcgtcctcgagcctcctctgtttctgaagattgttgagctttttaaagaggtggtggtccacctcctcaaactgtataagatcggcattcccccatcagaaaggcgaattttcaattccttcctccatacagccctcaaagtactcgagattctgcatcgggtgaatgagaaaatgggtcagatcatccagtacgataagttttatattcacgaggtccaggaactgattgatatacgtaatgattatatcaactgggtccagcagcaggcttatgggatggacgtcaatcacggattgaccgagcttgccgatatccctgtcacaatttgcacctaccccttcgttttcgatgctcaggctaagacgactctgttgcagacggacgctgttctccagatgcagatggcaatagatcaggcccataggcagaatgtttcttctctgttcttgcctgttattgagtcagtcaatccatgtcttatcctggtcgtacggagagaaaacattgttggggacgccatggaggtactgaggaaaacgaagaacatcgactataagaaacccctgaaggtgatctttgtgggggaggatgccgtggacgccggaggagtgcgcaaagagtttttcttgctcatcatgagagaactcctggaccccaagtatggcatgttcagatattatgaggatagtcgactgatctggtttagcgacaagacattcgaggactccgacctgtttcatctaatcggcgtcatttgcggactggccatctacaactgcaccatcgtcgacttgcacttccctctggccttgtataaaaagcttctcaagaaaaaaccctcgctggatgatctaaaggagcttatgcctgacgtagggagatctatgcagcagctgctcgactatccagaggacgacatcgaggagaccttctgcctgaattttactattacagttgagaattttggagctaccgaggtcaaagaactggtattgaacggcgcagacacagcagtgaataagcagaatagacaggagtttgtggacgcatacgtggactatattttcaacaagtccgtggcttcactgttcgacgcctttcacgcaggctttcacaaggtatgcggcggaaaagtgttattgctgttccagcccaacgaattacaggcgatggtgattgggaataccaattacgactggaaggagctggaaaaaaatactgaatacaagggagagtactgggcggaacatcccaccatcaaaatattttgggaagtgttccatgaactgcccctggagaagaagaaacagttccttctgttcctcacaggaagtgataggatccctattttaggcatgaagtcactgaaactggtcatccagagcacaggtggcggagaagagtatttgccagtgtcccacacttgctttaaccttctcgatctcccgaaatataccgagaaggagacgctgcgcagcaagctgatccaggctatagaccataacgaaggcttctctctgatctag

SEQ ID NO: 29471 - DNA, 1080 bp, synthetic construct
  source 1..1080: mol_type = other DNA; note = Synthetic coding sequence
atgtcataccgccgagagctcgaaaaataccgcgacctagacgaagacgaaattttgggcgctctgaccgaggaggaacttcgcactctcgaaaacgagctggatgaactcgacccggacaacgcacttttacctgcagggcttcgccagaaggatcagaccactaaagctcccaccggcccattcaaaagggaggaactcctggatcatttggaaaagcaagcaaaggaatttaaagaccgcgaagatctggtcccctataccggtgagaagcggggtaaagtatgggtcccaaagcagaagccattggaccccgtgctggaaagcgtgacgttggaaccagaactggaggaagctctggctaatgctagtgacgcagagctgtgtgatattgccgctatcctaggcatgcacaccctgatgtctaatcaacagtactatcaggccctgagctctagtagcataatgaacaaagaaggactgaactccgtgataaagcccacacaatacaaaccagttcctgacgaggagcccaattccactgatgttgaagaaacattagaaagaatcaagaacaatgacccaaaacttgaagaagtgaaccttaacaacattagaaatatacccatacccacgcttaaggcttacgccgaagctctcaaggagaactcatatgttaaaaagtttagcatcgtggggacccggtccaatgatccagtggcttacgctctcgcggagatgttgaaagagaataaagtactaaagacacttaacgtcgagtccaatttcatttctggcgcagggatcctgcgtctggtggaggctctcccttataatacaagcctggtggagatgaagatcgataaccagagtcagcctctgggcaataaggtggaaatggagattgtcagcatgcttgaaaaaaatgctactctgttgaaatttggctatcattttacacagcaaggaccccgactacgggcttccaacgccatgatgaataacaatgatctggtaagaaaacgacgtctggcagacttgaccggacccattatcccaaagtgtcgatccggtgtctag

SEQ ID NO: 29472 - DNA, 714 bp, synthetic construct
  source 1..714: mol_type = other DNA; note = Synthetic coding sequence
atggaagtcatggagggtccgcttaatctcgctcaccagcagtcaagacgagctgaccgattgctggcagctgggaaatacgaggaagcgatttcatgtcataaaaaggcagcggcatacttatctgaggcaatgaagctgactcagtcagagcaggcacacctcagccttgagctacagagggactctcacatgaaacagctgctgctcattcaggaaaggtggaaacgcgcacaaagggaggagaggctgaaggctcaacagaatactgtcctgtacctgctccaacagaagtccgagccggctgagccctgtattggctcgaaggcgccaaaagacgacaaaaccatcattgaagagcaggcgactaagatcgcagacctgaaacgacacgtggagttcctggtagcagagaacgagagactgcggaaagaaaacaagcaactgaaagcggaaaaggcaagactcttgaagggcccaattgagaaggaactggacgtggacgccgattttgtggaaacgtcagagttgtggagcttgccaccacacgcggaaacagccaccgcttcatctacatggcagaaattcgcagccaataccggaaaagctaaggatatccccattcctaacttgcctccattagattttccaagccctgaactccctctgatggagcttagtgaagatatactgaaagggttcatgaataactag

SEQ ID NO: 29473 - DNA, 1458 bp, synthetic construct
  source 1..1458: mol_type = other DNA; note = Synthetic coding sequence
atgaatgggacgttggaccaccctgatcagccagatctcgacgccattaaaatgttcgtgggacaggtaccccgaacatggagcgaaaaagatttacgcgaactcttcgagcagtacggggctgtgtacgagattaatgtcctcagggatcggtcccaaaacccccctcagagcaaaggctgctgctttgtcaccttctacactagaaaggccgctttagaagctcaaaacgccctccacaacatgaaggtgttgcctgggatgcatcaccctatccagatgaaaccggcagattctgaaaagaataatgtagaagaccgaaagctgtttatcggtatgatatcaaagaagtgtactgagaacgatatcagagtgatgttctccagcttcggtcaaatcgaggaatgccgcatccttagagggcctgatggtctgtcccgaggatgcgcttttgtaacgttcaccacacgagcaatggcccagactgcgatcaaagctatgcaccaggcccagacaatggaagggtgtagctcacccatggtcgttaagttcgctgacacgcagaaggacaaggagcagaagcgaatggcccagcagttgcagcagcagatgcagcagattagtgccgcaagtgtgtggggcaatctggcaggactgaacacactaggcccacagtatttggctctgtatttacagctgctccaacagactgctagctcaggcaatctaaacacactctcttctctgcatccaatggggggactaaacgccatgcagttgcagaatctggccgctctcgctgcggctgcgtccgctgctcagaatacgccttcgggtacaaacgcactaacgacttctagctccccactgtcggtacttacatccagtggcagctctccaagcagctccagctcaaatagcgttaacccgatcgcctccctaggggcactgcagaccctcgctggggctaccgcaggtctgaatgtcggcagtctggctgggatggctgcacttaatggaggcctgggatcatctggcttatcaaatggtacgggctcaaccatggaagccctcacgcaggcatatagtgggatccaacaatatgctgccgctgccttacctaccctgtataatcaaaatctgctcactcagcagagcataggtgccgctgggagccagaaagagggacccgagggagccaacctctttatctatcacctgcctcaggaattcggtgatcaggatctcttacagatgttcatgcccttcggaaatgtggtgtcggctaaagtgttcatcgacaagcagaccaatttatcaaaatgtttcggttttgtttcatacgacaaccctgttagcgcccaggcagctattcagagcatgaacggatttcagatcggcatgaagcgacttaaagtccagcttaagagaagcaaaaacgactccaaaccatactag

SEQ ID NO: 29474 - DNA, 1452 bp, synthetic construct
  source 1..1452: mol_type = other DNA; note = Synthetic coding sequence
atgaacgggacgctcgatcatcctgaccaacctgacctggatgccattaaaatgtttgtggggcaagtgccaagaacttggtccgaaaaagacttgcgcgagctgttcgagcaatatggtgccgtgtatgagatcaacgttcttagggaccgttcacagaatccaccgcagagcaaaggttgctgtttcgtgaccttctacactcggaaggctgcgctagaggctcaaaacgcccttcacaatatgaaagtgcttcctgggatgcaccacccaatccaaatgaagcctgcagacagtgaaaagaataatgcggtcgaggatcgaaaactctttatcggcatgatcagcaaaaagtgtactgaaaacgacatcagagtcatgtttagctcttttgggcagatcgaggagtgtcgaattctgagggggcctgatggactcagccggggatgcgcttttgttactttcaccacccgcgcaatggcccagacagccatcaaggccatgcatcaggctcaaactatggagggttgttcatctcctatggtggtgaaatttgccgatactcagaaggataaggagcaaaagcgcatggcccaacaactccagcagcaaatgcaacagatttcagccgctagtgtgtggggcaaccttgctggccttaacactctgggaccgcaatatttggccttgctgcagcagaccgcgtcatccggcaacttgaacacactcagctctcttcaccctatgggcggtctgaacgccatgcagctgcagaacctagctgcacttgctgctgcagcctcggctgcccagaatacgccaagtggcacaaatgccctgaccacgtccagcagccctctgagtgtgcttacatctagcgccggaagtagccccagtagcagctcctctaatagcgtcaatccgatcgctagtttgggcgcactgcagacactggccggagctaccgcagggctgaacgtgggctccctggccggaatggcagctctgaacggcggtcttggatctagcggactcagtaatggaaccggctcaactatggaggcactgactcaagcctattctggcatccagcagtacgcggcagctgcacttccaaccctctacaatcaaaacctcctgacccagcagagcattggggctgctgggtcgcagaaagaagggcctgaaggcgctaacctcttcatctatcatctgcctcaggaatttggggaccaagacctccttcagatgttcatgcctttcgggaacgtcgtgtccgcaaaagtgttcattgataagcagaccaacctatctaaatgtttcggctttgtgagttatgacaacccagtgtctgcacaggccgctatccagagcatgaatggctttcagattgggatgaagcgtttgaaagtgcaactgaagcgaagcaagaacgacagcaagccatactag

SEQ ID NO: 29475 - DNA, 3570 bp, synthetic construct
  source 1..3570: mol_type = other DNA; note = Synthetic coding sequence
atggacgacaaaggggatcccagtaacgaggaggctccaaaggccattaaacccactagcaaagaatttaggaagacctggggtttccggagaactacgattgccaagcgagagggtgccggagatgccgaagccgaccccttagaaccccctcctccccagcagcaactcggcctgtctctccggaggtcaggtcggcaacctaagaggactgagagggtagagcagttcctgacgatagctagaaggagggggaggcggagtatgccagtgtcgttggaagattccggagagccaacctcctgccctgccactgatgcagaaacagcgagcgagggaagtgtggagtcagcttctgagaccaggagcggccctcagtctgcttctaccgccgtgaaggaacggcctgcctctagcgagaaggtgaagggtggcgacgatcacgacgacacctcagatagtgactcagatggtttgacactgaaagaactccagaaccgcctgaggcgcaagagggaacaagagcccaccgaaaggcccctgaaaggcattcagtctcggctgagaaagaaaaggcgagaggaaggtccagccgaaacagtcgggagcgaggctagcgacaccgtcgaaggcgtgttgccaagcaagcaggaacccgaaaatgatcagggggtggtgtcccaggccggaaaagatgatcgggagtcaaagctggaaggtaaagccgctcaagacataaaagatgaggaacccggtgaccttgggagaccgaaacctgagtgcgaggggtatgaccccaacgctctttactgcatttgccgacagccccacaataatcgatttatgatatgctgcgaccgctgtgaggaatggttccatggcgactgcgtgggaatcagtgaggcgagaggcaggctcctggagagaaatggtgaggattacatctgtccaaattgtaccatcctgcaggtgcaagatgagacacatagtgaaacagctgaccaacaagaggctaagtggcgcccaggtgatgcggatggcacagactgcaccagcatcggtacaatcgagcaaaaaagctctgaggaccagggaataaagggcagaatcgagaaggccgctaacccctcaggtaagaaaaagctgaagatcttccagccagtgattgaggcacccggagcctccaaatgtataggaccaggctgttgccatgtcgcccagcccgattctgtttactgtagcaacgactgtatcttaaagcacgccgcagcgacaatgaagttcttgtcctcagggaaggaacagaagccgaaaccaaaggaaaaaatgaagatgaagcctgagaagccatccttgcctaagtgtggagctcaagctgggattaaaatatccagtgtgcacaaaaggcccgctcctgaaaaaaaagagacaaccgtaaagaaggccgtcgtcgtccctgccagaagcgaagcccttgggaaggaagcggcttgcgaatcatcgacacccagctgggcaagcgatcataattataacgctgtgaagccagagaagacagccgcaccatcaccatcacttctctacaaatctaccaaggaagaccggcgatcagaggagaaggccgctgccatggccgcaagcaaaaagacggctccgccaggcagcgctgttggtaagcagccggctcccaggaacttggtccccaagaaaagtagtttcgctaatgttgccgctgcaacccccgctataaagaaacccccttctggattcaaaggaaccatcccaaagagaccttggctctcagcaactccatcatctggcgcaagcgctgcccgacaggctggaccggctccagccgcagctaccgcagcctcaaaaaagtttccaggcagcgcagccttggtaggtgctgtccgcaagcctgtggtgccaagcgtgccaatggcatcccccgctcccggacgacttggtgccatgtctgctgctccctcacaaccaaacagtcaaattcggcagaacatccggagaagcttaaaggaaattctgtggaagcgggtgaatgactccgatgacctgatcatgaccgaaaacgaagttggaaaaatcgccttgcatattgagaaggagatgttcaacttgtttcaggtgactgataataggtacaaaagcaagtatcgaagcattatgtttaacctcaaagaccccaaaaatcagggcctgtttcatcgtgtccttcgagaagagatcagcctggctaaactggtgcgtcttaagcccgaagaactggtcagcaaggagctgtctacgtggaaggaaaggcccgcacgatccgtgatggaatctaggaccaaattgcataacgaatcgaagaaaacagccccacggcaagaggcaataccggatttggaggactctccccctgtgtccgattctgaagagcagcaagaatccgcccgagcagtgcccgagaaatcaactgcgccactcctggacgtcttttctagtatgttaaaggatactacatctcagcaccgagcccacctgtttgacttaaattgcaagatatgtaccggacaggttccaagcgccgaggacgagcccgctccaaagaagcagaagttaagcgctagtgtgaaaaaggaagacctgaaaagtaagcatgatagcagtgcccctgacccagcccctgactctgcagacgaagttatgcccgaggcagtgcctgaagtcgcttccgaacccggactggaatcagctagtcaccctaatgttgaccggacctacttccccggtcctcctggggatgggcaccctgagccttcacctctggaggatctcagcccatgcccagcgtcatgtgggagcggggttgtgacgacggtgacggtttccggacgggacccacgcacggctcctagttcttcatgcaccgctgtagcctcagctgcgtcgagaccggacagtactcacatggttgaggctaggcaggatgtgcccaaacctgtgcttacgagcgtgatggtgcccaagagcatactcgcaaagccctctagttccccagaccctcggtatctgagtgttcccccttcccccaatatatctaccagcgagtctcgcagtccaccagagggcgacactacattgtttctgagcaggctcagtactatttggaaggggtttatcaacatgcagtccgttgccaagtttgtaactaaggcctatcccgtctccggatgtttcgactatctgtccgaagacttgcctgataccattcacattggtggacgcatcgccccaaaaacagtgtgggactatgtgggcaagctgaagtccagcgtgtccaaagaactctgtttaatcaggttccacccagctaccgaggaggaggaggttgcatatattagtctgtacagttatttcagtagtagggggagatttggcgtcgtcgctaacaacaatcgacatgtcaaggacctctacctgatccctttaagcgcccaagaccccgtgccctccaagttactccctttcgagggccctggtaagcgcagactatccggctggcgctag

SEQ ID NO: 29476 - DNA, 3570 bp, synthetic construct
  source 1..3570: mol_type = other DNA; note = Synthetic coding sequence
atggacgacaaaggggatcccagcaatgaggaggccccaaaagccattaagccgacctcaaaggagttcaggaaaacctggggcttcagaagaacgaccatcgccaaaagagaaggcgcaggggacgctgaagctgacccgttggaaccacctcctccgcagcagcaacttggacttagtctgaggagatctggcaggcaacctaagcgcacagagagagttgagcaattcttaactattgcgagacggaggggacgcagaagcatgcctgtatcactggaagactccggagagcctacctcctgcccggctacagacgccgagaccgccagcgaaggtagtgtcgaatccgcctctgagaccagatccgggcctcagagtgccagtacagctgtaaaggagcgacctgcgtcatctgagaaagtgaagggcggagacgatcacgacgatacgtctgacagtgacagcgatggcttaacattaaaggaactgcaaaataggctgcgacgaaagcgcgaacaggagccaaccgagagacccctgaagggaatccaatcgcgactgcggaagaagagaagagaagaaggtcccgcagagaccgtggggtctgaggcctctgatacggtggaaggagtgctacctagtaagcaggaacccgagaacgatcagggggttgtgagccaggcgggaaaggacgaccgagagtcgaaactcgaggggaaagccgcacaggacattaaggacgaagagcccggtgacctgggtcggcctaaacccgagtgtgaggggtatgaccccaacgctctgtactgcatatgtagacagccccacaataatcgctttatgatttgctgcgaccgttgcgaggagtggtttcacggggactgcgtgggcatatccgaagccaggggtaggctgctggaaagaaacggagaagattacatctgtcccaactgtaccattttgcaggtccaggatgagactcactctgagaccgccgaccagcaggaagctaagtggaggccaggggacgctgatggcacagattgtaccagtattgggaccatcgaacagaagagcagcgaggaccagggcattaagggacggatcgaaaaggctgcaaatccgtcaggcaagaaaaagctgaaaatcttccaacccgtcatcgaagcccctggagcttccaagtgcatagggccaggttgctgtcatgtggctcaaccagactctgtctactgtagcaacgattgcatcctgaaacacgctgctgcgacaatgaagttcctgagctccggcaaagagcagaaaccgaaacccaaagaaaagatgaagatgaaaccagaaaaaccctctctccccaaatgcggggctcaggccggaattaagataagtagcgtgcacaagcgccctgcccctgagaagaaggagactacagtgaaaaaggctgttgtagtgcctgctcgttcagaagctttgggaaaggaagcagcttgtgagagctctacaccatcttgggcaagcgatcacaattataacgcggtgaagccagaaaagaccgcggctccatctcccagtctcctgtataaatctactaaggaagaccgcaggagcgaagagaaagctgcggcaatggccgcttctaaaaaaactgccccaccgggtagcgcagtgggtaagcaacccgctccccgaaacttagttcccaagaagagcagcttcgcgaacgtggccgcagccacccccgcaatcaagaagccacccagtggtttcaaaggcacaatacccaagcgcccatggctgtcagctacaccctcatcaggtgcctctgcagccagacaagcgggacccgctcccgctgcagccaccgctgcctccaagaagttccctggaagtgccgctctggtgggagctgtgaggaagccagtggtgccatcagtgcctatggcaagccccgctcctggtcggctcggggcaatgagcgccgctcctagccagcctaatagtcaaatcagacagaacattaggcgcagccttaaggagattttatggaaacgcgttaatgatagcgatgatcttataatgaccgagaacgaggtcggaaagatcgctctccatatagagaaggagatgtttaacctattccaagtgacggacaatagatacaaaagcaaataccgcagtatcatgttcaatctgaaagatcctaagaatcaggggttgtttcacagggtgctacgggaagagattagtctcgcaaagttggtgaggctgaagcctgaggaactggtgagcaaagagctgtccacctggaaggagcggccagcaagaagcgttatggagagcagaaccaagctgcacaatgagtccaagaaaacagccccacggcaggaagctataccagatcttgaggattcgcctcctgtctccgattccgaggagcaacaggagtctgcgagagcagtccctgaaaagtccacagctccacttctggatgttttcagcagcatgctgaaggatactaccagtcaacatcgggctcacctctttgatttgaattgtaagatctgcacaggccaggtgccctcggccgaggatgaacctgccccaaagaagcagaagttgagcgcgagcgtgaagaaggaagatctgaagagcaagcacgattcctcagcgccagaccccgcacccgattcagcggacgaggttatgcccgaggctgtcccagaagtagcgagcgaacctgggctcgagtctgcttctcacccaaacgtcgaccgtacttattttccagggccaccgggtgacggccaccccgaaccttctcccctggaggacctctcgccatgcccagcatcctgcgggtctggcgtcgtgacgacagtgactgtctctgggagggaccccaggacagctccttcttcctcatgcaccgccgtggcaagtgccgcatcccgacctgacagtacccacatggtggaggctcggcaggatgtgccaaaacccgtgctgacatctgtcatggtgccaaaaagtatcctggcaaaacctagctcatcaccggatcccaggtaccttagcgttcctccaagtcccaatatttcaacatctgagagtagatctccacctgaaggagataccacgctgttcctttcccgcctgagtacaatctggaagggcttcattaatatgcagtctgtcgctaagttcgtgacaaaagcctaccctgtgtctggctgttttgattacctctctgaggaccttccagacactattcacattgggggaagaatagccccaaagaccgtgtgggactacgtgggcaagctgaaatcttcagtctctaaagaattgtgcctgattaggttccatccggctaccgaggaggaggaagtagcatacattagtctgtatagttatttttcatcacggggtagatttggcgtagtggctaacaataatcgtcacgtgaaggatctgtacctgatccccctcagcgcgcaggaccccgtaccctctaaactcctgccattcgagggtcccggtaaaagacggctgagcggatggaggtag

SEQ ID NO: 29477 - DNA, 6722 bp, synthetic construct
  source 1..6722: mol_type = other DNA; note = Synthetic coding sequence
atggatgacaagggtgatccctccaatgaagaagcacccaaagccatcaagccaaccagcaaagaattcagaaagacttggggttttcggaggacaacaatcgctaagagagaaggtgccggagacgcagaggcagacccactcgaaccccctcccccacaacaacaattagggctaagtctccgcaggtcagggaggcagccgaagagaacggaacgggttgaacagttcttgaccatcgccagacgccgaggaaggcgaagcatgcctgtgagcctggaggacagtggcgagcccacaagctgccccgctactgatgctgagaccgcttcagagggcagtgtcgagtccgcatccgaaaccagatcaggcccacaatcagccagcacagccgtgaaagagcgccctgccagcagtgagaaggtgaaaggcggagacgaccacgatgacacttctgattcagactccgacggcctcacgctgaaggaattgcagaacagattaagacgcaaaagggagcaggagccaaccgaacggccattaaaaggcatccaatctcgcctgcgcaagaagaggcgcgaagaaggaccagctgaaaccgtgggttctgaggcttccgataccgtggagggagtgctcccaagcaagcaggaacctgaaaatgaccagggagtggttagccaagccggaaaggatgaccgagaatcaaagcttgaggggaaggctgcccaggacatcaaggatgaggaaccaggcgatctgggacgccctaagcctgaatgcgaggggtatgatcctaacgcactgtattgtatctgccggcagcctcataacaatcggtttatgatctgctgcgatcggtgcgaggagtggtttcacggcgactgtgttggtatatcagaagccaggggcaggctccttgaacgaaacggagaagactacatatgcccaaattgtacaattctgcaagtgcaggatgagacccatagtgagaccgcggaccagcaggaggcaaagtggagacctggcgatgccgatgggaccgactgcacatcaataggtaccatcgagcagaaatcgagcgaagatcagggaatcaaaggccgaatcgagaaggccgctaacccctcggggaagaagaaacttaagatattccagccagtgatagaagcccctggagcatccaagtgcatagggcctgggtgctgtcacgtggcacaacctgacagcgtgtactgctcaaacgattgcatcttgaaacacgccgcagcaacaatgaaattcttatcatctggaaaggaacagaagcccaagccaaaggaaaagatgaaaatgaagccggagaagccatcacttccgaagtgtggtgcacaggctggcatcaagatatcttccgtacataaaagaccggctcctgagaagaaggaaacaaccgttaagaaggccgtcgtcgtccccgcacgtagcgaagctctggggaaggaggcagcttgtgagtccagcaccccgtcttgggcctcagaccacaattacaacgcggtaaaacctgagaaaactgcagcgccaagcccctcactcctgtacaaatcgacaaaagaagaccgcaggagcgaggagaaggccgctgcaatggctgcgagcaagaagaccgcaccccctggatcagccgtgggaaaacagcccgctccccgtaacctggtaccaaagaaaagctcctttgctaatgtcgccgctgcgaccccagctattaaaaagcctcctagcgggttcaaagggacaatccctaagcgcccatggctcagcgctaccccatcgagcggagcttccgcagcccgacaggcagggcctgcccctgccgctgcaaccgccgcttcaaaaaaattcccagggtccgctgctctggtcggcgctgtcagaaagccagtggtgccaagtgtgccaatggcatcacctgcacccggtaggcttggcgcaatgtcagctgccccaagtcagccaaactctcagatccgtcagaacataaggcggtccctcaaagagatactgtggaagcgcgtcaatgacagcgacgatcttatcatgacagagaacgaagttggcaaaatcgcccttcacatcgaaaaagagatgttcaatctctttcaggtgaccgataacaggtacaaatctaagtaccgttctatcatgttcaatctgaaagatcccaaaaaccaaggtctctttcaccgggtgctccgcgaggaaatctcgttagcaaagctggtacgcctaaagccggaagaactggtgtccaaggaactttcaacatggaaggagcgaccagctagaagcgtaatggaaagcagaaccaagctgcataacgagtcaaagaagaccgcgcctcggcaggaggctatccccgacctggaagattcccccccagtgtcagatagcgaagagcaacaggaaagcgctcgggctgtgcctgagaagagcaccgcccctctgctggacgtgttttctagcatgttgaaggataccacatcccagcatagggcgcatttgtttgaccttaactgcaagatctgcacaggccaggtgccctccgcggaggacgaacccgcacccaagaagcagaagctgagcgcctccgtcaaaaaggaagatttgaagtccaagcacgattcatctgcccctgatcctgcccctgattccgcagatgaagtcatgcctgaggcagtgccagaagttgcctccgaaccgggtctggagtccgccagccaccctaatgtggaccgaacttattttcccggacctcccggtgacggccatcccgagccttccccccttgaggatctctccccctgtcctgcgagttgtggttctggagtagtgaccaccgtgactgtctccggccgagatccacgcactgctccgagtagcagctgcacagcagtcgcatcagctgctagccgacccgatagtacacatatggtcgaagctaggcaggacgtcccaaagcctgtcctgacatcggtgatggtgccaaagagtatcctcgccaaaccctcctcttctccagaccctcggtacttatccgtccccccaagccctaatatttccaccagcgaaagccgttctccacccgaaggggatactaccctctttcttagccgactgagtacgatttggaaaggcttcatcaacatgcagagtgttgccaaattcgtcactaaggcctaccctgtcagcgggtgtttcgactatctctccgaagacctgcctgatactattcacataggtggacgcattgcacccaaaaccgtctgggactacgtcggcaagctgaagtcaagcgtcagcaaggaactctgcttaataagattccaccctgccacagaggaggaggaggtggcttacatcagtttatattcctacttctcttcgcgcggtagatttggagtggtggctaataataataggcacgtaaaagatctgtacctgattcccctctccgctcaggatcctgtgccatctaagttgttgccgttcgagggacctggactcgaaagccccaggccaaacatcatactcggactggttatttgtcaaaaaatcaagaggccagcgaattccggtgagctggataaaatggacgagaagcggacgcgtcttcagccagaggaagcggacgtaccggcatacccgaaggtcgccacagtaccccagtctgagaagaagcctagtaaataccccctgtgttcagctgacgccgcagtgtctaccactcccccaggtagtccccctccaccacccccactccctgagcctccagtgctaaaggttttaagttccctcaagcccgctgctccttcacccgctactgctgccactactgccgcagcggcaagcacggccgcaagctcaacagcctcctccgcttccaagaccgcaagcccactggagcatattctgcagacactgttcggtaaaaaaaagtcatttgatcccagcgcgagggagccaccgggaagtactgccggactgcctcaggagcctaagaccactgcagaggacggggtgcccgcacctcctctactcgaccccattgtacagcaattcgggcagttttcaaaagataaggcactggaggaggaagaagacgacaggccatacgatcccgaggaggaatatgacccagagcgggcattcgatacccaactagtggagagagggcgacggcatgaagtggagcgggcacctgaagcagctgcggctgaaagagaagaggttgcttatgatcccgaggatgaaaccattcttgaagaagccaaagtgacggtcgatgaccttcctaatcgcatgtgcgctgacgtgaggcgcaattctgtggagcgacctgccgagcccgtagccggagccgcaacccctagccttgtggagcaacagaaaatgctcgaggaattaaataaacagatagaggaacagaaaaggcagctggaagagcaagaagaggcattgaggcaacagcgggctgccgtgggcgtttcaatggcccacttctccgtgtccgacgcattaatgagcccgccaccaaagtcttcccttcctaaggccgaactctttcagcaagaacagcagagtgcagataaacccgctagtttgcctcccgctagccaggcttctaaccatcgcgatccccgtcaggcccgacgcctggcaacagagacaggtgagggcgagggcgagcccctgagccggttatcagccaggggggctcagggagcattgcccgaacgggatgcaagtagaggaggcctcgtcggacaggcccctatgcctgttcccgaggaaaaggaacctgcctcaagcccgtgggcctctggcgaaaaaccccctgccggtagcgagcaggatggctggaaagccgaacccggtgaagggaccaggccagccacagtgggcgacagctccgcgaggccagcaagacgagtgctattgccgactcccccatgtggcgctttacaacccggatttccgctgcagcacgacggtgaaagagatccctttacttgcccaggttttgcctcccaggataaggcgctggggagcgcgcaatacgaggaccctcgaaatctacattctgcagggagaagctccagccctgccggtgagacggaaggcgatcgagagccccaagcacgtcccggtgaaggaacagcccctttacctccaccagggcagaaggtgggcggaagccagcccccatttcagggccaacgcgagcctgggcctcatgccctgggcatgtctggactgcatggccctaactttccaggcccacgaggtccagccccaccgttccccgaggaaaacattgcaagcaatgacggccctcgcggtccacccccagcacggttcggggctcagaaaggtccgatcccttccttgttttcagggcagcacggtccccctccatatggagatagccgtgggccatccccctcatatctgggcggaccccgtggcgtagccccttcacagttcgaggaacggaaggacccccacggagaaaaacgcgagttccaagatgctccttacaacgaggtaacaggagcccctgcgcagtttgagggaacagagcaggctccctttctgggctctagaggtggggcaccctttcaatttggtggccagcgacgcccattgctgagccagctcaaaggacctcggggtgggcctccgccttcgcagtttggcggacagcggggtcctccaccaggacattttgtgggcccacggggtccccatccttctcagttcgagacggctagaggaccgcaccctaatcagttcgagggtccaagggggcaggctcccaatttcatgcccggacctcgcggaattcagccacagcagtttgaggaccagcgggtgcactccccaccgagatttacgaaccaacgggctcctgcccctctgcagttcggtggcctgcgcggaagtgctccttttagcgagaagaacgaacagaccccgtcacggttccactttcagggccaagctcctcaggtgatgaagccgggtccgagacccctattggagctccctagtcatccaccacaacaccgaaaggacagatgggaagaagccggacccccttcagctctgagtagtagtgcaccgggacaaggcccagaagccgacgggcagtgggcctcggccgactttagggagggcaagggacacgaatatcgaaatcagacctttgaagggcgtcagagagagcggtttgacgtgggacctaaagagaagccgctggaggaaccagatgcccagggtagagcctctgaggaccgtcgcagggagcgtgaacggggtaggaactggagtagagaacgcgactgggacaggccacgggaatgggaccggcatcgagacaaggatagctccagggattgggacagaaatagggagaggtccgcaaatcgagaccgggagcgcgaagcagatcggggaaaggagtgggatcggtcccgggaaagaagcagaaatagggagcgtgagagggatcggaggcgcgaccgggaccgctcgcgaagcagggaaagggaccgcgataaagccagagatcgcgagagggggagagaccggaaggacaggtctaagtctaaagagtctgctagagaccccaaaccagaagcaagcagagcctccgacgcagggaccgctagtcaggctta

SEQ ID NO: 29478 - DNA, 888 bp, synthetic construct
  source 1..888: mol_type = other DNA; note = Synthetic coding sequence
atggaactgattcaggatacctcccgtcccccactggaatatgttaagggtgtccctctgatcaaatacttcgccgaggccctcggccctctgcagtcgttccaggcacggcctgatgaccttttgattaacacgtaccccaagtcaggaacaacttgggttagccaaatcctagatatgatttaccaggggggagatctggagaagtgcaatagagctcctatttatgtccgtgttcccttcctggaggtcaacgacccaggtgagccatctggccttgagacacttaaagacaccccacctcctcgcctgataaagtcccacctgcccttggctttgctccctcaaaccctcctcgaccagaaggtgaaagtggtatatgttgcacggaatccgaaagacgtggcagtgtcgtactaccattttcatcgtatggagaaagctcacccggagccgggaacttgggatagtttcctcgagaaatttatggcaggagaagtcagttacgggtcttggtatcaacacgtgcaggaatggtgggaattgagccgaacccaccccgttctgtatctgttttatgaagacatgaaagaaaatcctaaacgagaaatccagaaaatcctagagtttgtgggacgcagcctgccggaggagaccatggacttcatggttcaacacaccagctttaaagagatgaagaagaacccaatgaccaactacaccaccgttcctcaggagctaatggatcacagtatttccccatttatgcggaagggcatggccggagactggaagaccacattcacagtggcccagaatgagcgttttgacgcggattatgccgaaaaaatggccggttgcagtctaagcttccgctcagagctttag

SEQ ID NO: 29479 - DNA, 834 bp, synthetic construct
  source 1..834: mol_type = other DNA; note = Synthetic coding sequence
atggaagctgctgagacggaagccgaggctgctgcactggaggtcctggcggaggttgccggtattttagagcctgtgggactgcaagaggaggctgagctgccagcaaaaatattggttgagttcgtcgtggatagccagaagaaggacaagctgctatgcagccagttgcaggtggcagactttctgcaaaatatcctcgcacaggaagacaccgccaaaggtctcgaccctctggccagcgaggatacgagccgacaaaaggcaattgctgccaaggagcagtggaaggagctgaaggctacgtacagagaacacgtggaggcaatcaaaatcggacttactaaggccctcacacagatggaggaagcccagcgtaaacggacccagctgagagaggccttcgagcagctgcaggcaaaaaagcagatggccatggagaagaggcgcgcagtgcaaaatcaatggcaactgcagcaggaaaagcatctccagcacctggcggaagtttcagcggaagtcagggaacgtaagactggcacacagcaggagcttgacagggtttttcagaagttggggaaccttaaacagcaggctgagcaagagcgggacaagctacaacgataccaaactttcctccagttactgtacaccctccaggggaaattgctgtttccagaggcggaagccgaagctgagaacctgccagatgacaagccccagcagcctacgcggcctcaagagcagtccaccggtgacacaatgggacgagatccaggtgtgtcttttaaagccgtgggtctgcaaccagcaggcgacgtcaacctgccatag

SEQ ID NO: 29480 - DNA, 1245 bp, synthetic construct
  source 1..1245: mol_type = other DNA; note = Synthetic coding sequence
atggggaccgtcaccgaggatttgatcagaaggaacgctgagcacaacgactgtgtgatatttagtttggaagagctgagtctacatcagcaggagatcgaacgcctcgagcatatcgacaaatggtgtcgggatctgaaaatcctatatctgcagaacaacctgattggaaagattgagaacgtaagtaagttgaaaaaactggagtacctgaatttggcccttaataacatagagaaaatcgaaaacctggaaggatgcgaggagctggccaagctagacctgactgtaaactttattggagagttgtcctcaatcaaaaatcttcagcacaatattcacctgaaggagctttttttgatgggaaacccctgtgcaagcttcgatcactaccgcgagttcgtggtggccactctcccgcaactgaaatggcttgacggcaaggagatcgagccctctgagcggataaaggccctccaggactacagcgtgattgaaccgcagattcgggagcaggaaaaggaccactgcctaaaaagggctaaactgaaggaagaggcccaacgcaagcaccaggaggaggacaaaaatgaagataagcgatcgaacgccggattcgacggtcgctggtatacagacatcaacgcaactctgtcatcactagagtccaaagatcacttacaggcgcctgacacagaggagcataataccaaaaagttagacaatagcgaagacgacctcgagttttggaataagccctgccttttcacccccgaatcacggttggaaaccttgcgacatatggaaaagcaaagaaaaaaacaggagaaattgagcgagaagaagaagaaagtgaaacctcccagaacacttattaccgaagatggaaaggcacttaatgtaaacgagcccaaaattgatttctcacttaaggacaatgagaaacagattattctggacttggccgtctaccggtatatggacacgtccctgatagatgttgatgttcaaccaacttacgtccgggtgatgatcaaagggaagccattccagttggtcctgcctgccgaagtcaagcccgacagcagctcagccaagcgttcgcagactacagggcacctggtgatttgtatgcccaaagtaggcgaggtgattactgggggacagagagcctttaagtccatgaagaccactagcgatcggtccagggaacagaccaacacaagctatagcaccggcttttag

SEQ ID NO: 29481 - DNA, 2529 bp, synthetic construct
  source 1..2529: mol_type = other DNA; note = Synthetic coding sequence
atgtcttcatcccactttgcaagcaggcaccgtaaagatatcagcactgaaatgatccggactaagatcgcccacaggaagtcattgtcccaaaaagagaataggcataaggaatacgagaggaatcgccactttggcttaaaggacgtgaatatacctacactggagggcaggattctcgtggagttagatgagaccagccagggcctggtgcctgagaagactaatgtcaagcctagagcgatgaaaacaattctgggagatcagcgcaagcagatgcttcagaagtataaagaggaaaagcagttgcagaagctcaaagagcaaagggagaaggctaaacgcggtatatttaaagtcggcagatacaggcctgacatgccgtgcttcttgctctctaaccagaacgcagtgaaggcggaacctaaaaaagcaattccctccagcgtgcggattacgaggtccaaagccaaggatcagatggagcagacgaagatcgataacgaatcagacgtccgtgcaatcaggcctggcccaagacaaacaagcgagaaaaaagtcagcgataaggagaagaaggtcgtccagccagtgatgcccacttcccttcgaatgaccagatcggccacacaagccgcaaagcaagtaccgaggactgtttcttcaaccacagctcgaaagccggttactagagccgctaacgaaaatgaaccagaagggaaagtgccctccaaaggtcggcctgctaagaatgtagaaacaaagccagataaagggatctcatgcaaagtcgattccgaggagaataccctgaactcccaaaccaacgctacctcaggcatgaatcccgacggggtcctgtcaaaaatggaaaacctccccgaaatcaacaccgctaagatcaaaggcaagaattcatttgcgcctaaggacttcatgttccagcccctggacggtttgaagacctaccaggtgacacctatgaccccaagatctgccaatgctttcttgactcccagctatacatggacgcccctgaagacggaagtcgacgagagccaggctacaaaagagattcttgcccaaaaatgtaagacgtactctactaagaccattcagcaggacagtaacaagctcccttgtcctctgggcccactgactgtgtggcacgaagaacacgtgctcaacaagaacgaggccactacaaagaacctaaatggcctacccatcaaagaggtaccaagtttggagaggaacgaagggcgtatcgcccagcctcaccacggcgtgccgtatttcaggaacatactacagtctgaaacagagaaattaaccagtcactgcttcgaatgggaccggaaattggaattggacatcccggacgacgccaaagacctcattaggacagctgtgggtcagacccggcttctcatgaaagaacgctttaagcagttcgaggggttggtggatgactgcgagtacaaacgtggaattaaggaaacaacatgtaccgacctggatggcttctgggacatggtctccttccagatcgaggatgttatccacaagttcaataatctgatcaaactggaagagtccggatggcaagtgaataataacatgaaccataatatgaataaaaacgtctttagaaagaaagtcgtctccggaatagcttccaaaccaaaacaggacgacgccggacggatcgctgccaggaaccgactggccgcaattaaaaatgcaatgagagagcggattcggcaggaagaatgtgctgaaactgccgtgagtgtaatccctaaagaggtcgacaagatagtgtttgacgctggattttttagagtggaaagcccagtgaaactgttctcaggtctgtctgtgagcagcgaaggcccttctcagaggctgggaaccccaaaatctgtcaacaaagccgtaagtcaatcaaggaacgagatgggaattccgcagcagaccactagtcccgagaacgccggaccacagaacactaagtctgaacacgtgaaaaaaaccctcttcctctccattccggagagtcggagttccattgaggacgcacagtgccccggacttcccgacctgattgaagagaaccacgtggtcaataagacagacctgaaggttgattgtctcagcagcgaaaggatgtctcttccgttgctggcaggtggtgtggcggacgacattaacactaacaaaaaggagggcatcagtgacgtcgtagaaggcatggagcttaactcctctatcacctcccaagatgttcttatgtcctcgcccgagaaaaataccgcgagccagaatagcatcttggaagaaggggagactaagatttcccagagcgaattgttcgacaataaaagtttaacgactgagtgccatctgttggattcggttgggagctgctatgttgcacgggcaggcttggaagtcctgggctcgagtgacccaaccacgagcgcctccagagtggccggaacaacagccagaagtaagctgcagtag

SEQ ID NO: 29482 - DNA, 1710 bp, synthetic construct
  source 1..1710: mol_type = other DNA; note = Synthetic coding sequence
atgttgtgtagcccttctttctgtaagctgtgttggaaacggcagcgggagaacggtcagcgcaaatatggaggtcccccaccgggatgggacgccgctccacccgaacggggatgcgaaattttcattggcaagctgcctcgtgacctattcgaagacgaactcattccactgtgcgagaagattgggaagatctacgagatgaggatgatgatggacttcaatggaaacaacaggggatacgctttcgtaacattctctaataaggttgaagccaagaacgcgataaagcagctgaacaattacgagattcgtaacggaaggttactcggggtgtgcgccagtgtggataactgtcgactgttcgtggggggtattccaaaaactaagaaaagggaggagatattgtccgagatgaagaaggtgaccgagggggtagtggatgtgatcgtgtatccttccgccgctgacaaaacaaagaacagaggctttgcattcgttgagtacgagagtcaccgtgctgccgctatggctcgcagaaagctgctgccgggaagaattcagctttggggacatggaatcgcagtggattgggcagaacctgaagtggaagtggatgaagacactatgagcagtgtcaagatactctatgtacgtaacttgatgttatccacatcagaggaaatgattgagaaggaattcaacaatataaagccgggagccgttgaacgcgtaaagaaaatcagagattacgcattcgtacatttcagcaatcgagaagatgctgtagaggctatgaaagcacttaacggtaaggtgcttgacggcagcccgatagaggtcacactcgcaaaacctgtggacaaggacagctacgtgcgctataccaggggcaccggcggaagaggaacaatgttgcagggtgagtatacctactcgctgggccaggtgtacgaccccacgacgacctacctaggggctcccgtgttctacgcccctcagacatatgccgctattcccagcctccatttccccgctacaaagggtcacctatcgaatcgggcaatcattcgcgctccaagcgtgcgcggagccgcaggcgtgagaggactggggggtaggggctatttagcctatacggggcttggtcgcggatatcaggtcaagggagataaacgagaggataagctctatgatattttacctggcatggagctgacgcctatgaatccagtgacactcaagccacaggggatcaagctggctcctcagattcttgaggagatctgccaaaaaaacaattggggacagccagtttaccagcttcactcagcgatcggacaggatcagagacagctatttctctataagatcaccattccagcattggcctctcagaatcccgctatccacccatttacacctccaaaattaagtgcttttgtcgacgaagccaagacgtacgctgccgagtatacattacagacactcggtattcctaccgatggaggcgatggcacgatggctactgctgcagcagcagccaccgctttcccaggttacgccgtgcctaacgcaacggcaccggtgagcgccgcacaactgaagcaggccgtcaccctcgggcaggatttggccgcatatacgacttacgaagtgtatcctaccttcgctgtcactgcacgaggcgacggttatggtaccttctag

SEQ ID NO: 29483 - DNA, 1764 bp, synthetic construct
  source 1..1764: mol_type = other DNA; note = Synthetic coding sequence
atgagtacagccatacctggcctgaaaaaaggcaataatgcccttcagtcaattatcttacagactctcctcgagaaagaaaacggccagcgcaagtacgggggtcccccacccggatgggacgcagccccaccagaaagaggatgcgaaatattcatcgggaagctgccgagagatctcttcgaggacgaactgatccctctgtgtgaaaaaattggaaagatctatgagatgcggatgatgatggattttaatgggaacaacagaggttatgccttcgttaccttttcgaacaaagtcgaagccaaaaatgcaatcaagcagcttaataattacgagattcgaaacggtcgtttattaggtgtctgcgcgagcgtggataactgtagacttttcgtaggtggaatacctaagaccaaaaagagagaagagatactgagtgagatgaagaaagtaacagaaggcgtggtagacgtcatcgtgtacccgagcgcagccgataaaaccaagaaccgcggattcgcctttgtcgagtatgaatcccatagagcagctgcaatggcaagaaggaaactgcttccaggccgaattcaactttgggggcatgggatcgccgtggattgggccgaacctgaggtcgaggtagatgaagacactatgagcagcgtcaagattctgtacgttagaaaccttatgctatctactagcgaggaaatgatcgagaaggagttcaacaatatcaagcctggcgcagtagagagagtcaaaaagatccgcgattacgcattcgtgcacttctcgaatcgagaggacgccgtggaggcaatgaaggctctgaatggcaaggttctggatggctctccaatcgaagtgacactggctaagcccgtcgacaaagatagttacgtccgttatacccggggtacaggaggtcgaggaaccatgctacagggggaatacacttacagcctagggcaggtgtatgaccccacgacgacatatttaggcgctcccgttttctatgctcctcagacttatgctgccattccttcactgcatttcccagcaaccaagggccatctgtcaaatcgagccattatccgcgctccttccgtccgggaaatttacatgaacgtacctgtcggcgcagcaggagtccgcggtcttggcggacgtggttatctggcctacacaggtctggggagagggtatcaagtcaaaggcgataagcgcgaagataaactgtacgacatccttccaggcatggaactgactccaatgaaccccgtcacacttaagccacagggtatcaaactcgccccacagatacttgaagaaatctgccaaaagaataactggggacagcccgtatatcagctgcatagcgccatcggacaggaccagcggcaactgttcctgtataagatcacaattcccgctcttgcctcccaaaaccctgcaatccacccattcacccctcccaaactttctgccttcgtagacgaagctaagacctacgccgctgagtatactcttcagaccctgggaatccccacagatggcggtgatggcacgatggcaactgccgcagccgcagctacggcattccctgggtatgccgtccccaatgccaccgcgccagtgagtgcggcacagctgaagcaggctgtgactctgggacaagacctagccgcttataccacttacgaagtttaccccacatttgctgtcactgcaagaggtgatgggtacggcaccttctag

SEQ ID NO: 29484 - DNA, 1620 bp, synthetic construct
  source 1..1620: mol_type = other DNA; note = Synthetic coding sequence
atggagagcaaccataagtccggcgacggtctttccggtacccagaaagaggccgcactgcgagcactagtgcagcgcacaggatacagcttggtgcaggaaaacggtcagagaaagtacggcggaccaccgccaggatgggacgcagcccctcccgagagggggtgtgaaatcttcattggaaaactgccacgtgatctgttcgaagatgaactgattcctttgtgtgagaagattggcaagatctatgagatgcggatgatgatggacttcaatggcaataatcgtggatacgcctttgtgacctttagcaacaaggtggaagccaagaatgccatcaaacagttgaataattatgagattagaaatggtagacttctaggcgtctgtgccagtgtggacaactgtaggttattcgtagggggaatacctaagacaaaaaagagagaagaaatcctgtccgagatgaagaaggtcaccgagggtgttgtggacgtgatcgtttatccaagtgctgctgacaagacaaaaaaccgcggtttcgctttcgtggaatatgagtctcacagggcagctgccatggcacggagaaagttactgcctggggctgtcgaaagggttaagaagatccgcgattacgcctttgtgcacttttcaaatagagaagacgccgtggaggccatgaaggcactgaacgggaaggtgctcgatggctcgcccatcgaggtcaccctagcaaagcctgtggataaggattcttacgtgaggtacactcggggtactgggggaagagggaccatgctccagggagagtacacgtacagtcttgggcaggtatacgaccctactacaacttacctgggcgctcctgtgttttatgcccctcaaacctatgcggctatcccttcactgcacttccctgcgaccaagggacacctgagcaacagagcaattatccgggcacccagcgtgagagagatctacatgaacgtcccagttggcgctgccggagtgcgcggactaggcggtcggggatatctggcttacactggcctcgggcgaggttaccaggtcaaaggagacaagcgcgaagacaagttatatgatatcttgccgggaatggaactaactcctatgaatccagtgacattaaaaccccagggaattaagctggccccacaaatcctggaagaaatatgtcagaagaacaattggggccagccagtatatcagctgcacagcgcgatcggccaggaccagcggcagctgttcctgtacaaaatcaccatccctgccctggcctcccagaatcctgccatacacccctttacgcctccaaagcttagcgcctttgtagacgaggccaagacatacgcggcagaatacacattgcagacactcggaattcctactgacggaggggatggcaccatggcaacggcagccgctgctgctaccgccttcccaggctacgcagtccccaacgcgaccgcccctgtgtcagctgcccagttgaagcaggccgtgactctcggacaggacctggccgcttataccacctacgaggtctatcctacctttgccgtgaccgccagaggagacggctacgggacattctag

SEQ ID NO: 29485 - DNA, 1044 bp, synthetic construct
  source 1..1044: mol_type = other DNA; note = Synthetic coding sequence
ttcagtctgttccccgctgtcgataatgaagaggcagcacttctccatgaggaggccactatgaccattgaagagctcctgactagatatggccagaattgccataagggaccaccacattccaagtcaggcgcaagcgataagttaccacgcgtggcaaagtctaagttcttcgaagactccgaggacgagagtgatgaagccgaggaggaggaggaggacagtgaggaatgttctgaggaggaagacggttattcttccgaagaagcagagaacgaagaggacgaggatgacaccgaggaggctgaggaagacgatgaagaagaggaggaggagatgatggtgccgggtatggaaggcaaggaggagccaggcagcgattctgggaccacagccgtagtcgcactcattagaggtaaacagctcattgtggcgaatgccggagattcacggtgcgttgtctcggaggcaggcaaggcactggacatgtcttatgaccacaagcccgaagacgaggtcgagctagcacggatcaagaacgctgggggaaaggtgacaatggacggaagggtgaatggtggcctcaatctgtctcgcgctatcggagaccacttttacaagaggaacaaaaacctgcccccagaggagcagatgatcagcgctcttcctgacatcaaagtccttacccttactgatgatcatgagtttatggtgatagcatgtgacggaatttggaacgtaatgagtagccaggaggttgtggatttcatacagtctaaaattagccaacgcgacgagaacggcgagttaaggctgttgtcatcaatcgtggaagagctgttagatcagtgtctcgcacccgacaccagcggcgacggcacaggctgtgacaacatgacttgcattatcatttgttttaagccaaggaacacagctgaattgcagcccgagtcaggaaagagaaagctggaggaggtgctctccacagagggcgctgaggagaatgggaactcagataagaaaaagaaggcaaagcgggactag

SEQ ID NO: 29486 - DNA, 1218 bp, synthetic construct
  source 1..1218: mol_type = other DNA; note = Synthetic coding sequence
atggagacagatttaaatagccaggacagaaaggacttggacaaattcattaagtttttcgccttgaaaaccgttcaagtcatagtgcaggccaggctgggtgagaagatatgcaccagatcatcatccagtcccacagggtccgactggtttaacttggccataaaggacattccagaagtgacacatgaggcaaaaaaggcactcgctggccagttgccagccgtgggccgtagcatgtgcgtggagatttctttgaaaacctcagaaggagatagcatggaactagagatctggtgtcttgaaatgaacgagaaatgtgacaaggaaatcaaggtctcatacaccgtgtacaacagactgagtctgctgctaaaatctttgctggccataaccagggtcaccccagcgtataggctttcccggaagcagggacacgagtacgtcattctttaccggatctacttcggtgaagttcagctgagtggtttgggcgagggctttcagaccgttcgggtcggcacagtaggtactccggtgggcaccattacgttaagctgcgcttatcgcatcaacctggctttcatgtctactcggcaattcgagaggaccccaccaatcatgggtattattattgaccacttcgtggataggccttacccctcctcctcccctatgcatccctgtaactatcgtacagctggcgaagacacgggggtcatctatccttcagtagaagattcacaggaagtatgcaccacgtcttttagtacttcccccccatctcaactgatggttccgggaaaagagggaggcgtccctcttgctcccaaccagcctgttcatggtacccaagcggatcaggaacgccttgccacctgtaccccttcagaccggactcactgtgccgctaccccttcctcatcagaggacactgagacagtgtcaaactcgagcgagggaagagcttcccctcacgacgtgctggaaaccatatttgtgagaaaagtgggagctttcgtgaataaaccgattaaccaagtcacactgacttctttggatatcccattcgctatgttcgcccctaaaaacctcgagcttgaggacacagatcccatggtaaatccccctgattcccctgaaactgagagtccattgcagggctcactgccatgctcctggccactgccctgtttgctctcccctagcacagtgtag

SEQ ID NO: 29487 - DNA, 2025 bp, synthetic construct
  source 1..2025: mol_type = other DNA; note = Synthetic coding sequence
atgcagacatcctcatcaaggtccgtgcacctgtccgagtggcagaagaactatttcgcaataactagtggtatttgtacaggaccgaaggcggacgcataccgggctcaaatcctccgcattcaatatgcttgggcgaattcggagatatcccaggtgtgtgcaaccaagctgtttaaaaagtatgcagagaagtattctgccattattgactccgacaatgtggagtctggtcttaataactacgctgagaatattcttacgctcgcgggttctcaacagacagacagtgacaagtggcagagtggtctgtcaatcaacaatgtcttcaaaatgtcttccgttcagaagatgatgcaggccggtaaaaagtttaaggattctctcctggagcccgcattggcttctgtagtgatccataaagaagcaacggttttcgatctgccgaagttcagcgtttgcggatcatcccaggagtccgactctctgcctaactcggcccatgaccgggaccggacccaggatttccctgagagcaaccgactgaaactgctccaaaacgcccaaccacccatggtgaccaacacggcgaggacctgccccaccttttccgccccagtgggagaaagcgctaccgccaagttccacgttacacctctgtttgggaacgtgaaaaaagagaatcattccagtgccaaggaaaatattggacttaatgttttcctgtccaaccagtcctgttttcctgccgcttgcgagaatccacaaaggaagtcattctatggatccggcactattgacgcactcagcaaccctatcctgaataaggcctgctctaagactgaggacaatggacccaaagaggatagctcactcccaacatttaagacagcaaaggagcaactctgggtggatcagcagaagaagtaccatcaaccccagagagcctctggttcatcctatgggggagtcaaaaaatccctgggagcatcgcgcagccggggtatcctggggaaattcgtgccccctatcccaaagcaagacggaggcgagcaaaatggcggaatgcaatgtaaaccctatggtgctggccctacagagcctgctcacccagtggatgaacgtctgaaaaatttagagcctaaaatgatcgaactaattatgaatgagatcatggaccatggcccaccggtaaactgggaggatatcgccggagtggagtttgctaaagcaacaatcaaggagatagtcgtctggcccatgctccgcccagacatctttactggacttagaggcccaccgaagggaatcctgctttttgggcctcccggtactggaaaaactctgattggtaagtgcattgcatctcagtcaggagccacctttttttcaatcagcgcgagcagcttaacctctaaatgggtcggagaaggcgagaaaatggtacgggcacttttcgccgtggctagatgtcagcagcccgcagtaatatttatagatgaaatcgactccctgctcagtcagcgaggggacggtgagcacgagtcctctaggagaattaaaacagagtttcttgtacagctggatggggcaacaacgagtagcgaggatcgtatcctcgtcgtcggggcaaccaatcgaccacaagagattgacgaggcagcacggagaagactcgtaaaaagattgtatataccgctgcccgaggcttccgccagaaaacaaattgttattaatctcatgtcgaaggagcaatgttgcttatctgaagaagagatcgaacaaatagtacagcagtccgatgccttttcaggagccgacatgactcaattgtgccgggaagcctccctcggcccaatccgctctttgcaaaccgcagacattgcaaccatcactccagatcaggtgcgcccaattgcatatatcgactttgaaaatgcattccgcaccgtgcggccatcagtgtctcctaaagacctcgagctttatgaaaattggaacaagacctttgggtgcggcaagtag

SEQ ID NO: 29488 - DNA, 2640 bp, synthetic construct
  source 1..2640: mol_type = other DNA; note = Synthetic coding sequence
atgaattaccccggtcgtggttcacctaggtcccctgagcataatggtagaggcggtgggggtggagcttgggaactggggagcgatgcacgacctgcgttcggcggaggcgtttgctgcttcgaacatttgcccggaggcgatcctgatgacggcgatgtgcctcttgcgctgctgcggggtgaacctggtctccatctcgcccctggcaccgatgaccacaatcaccatctggctttggatccctgccttagtgacgagaactacgacttctctagcgccgagagcgggagttccctgcggtactatagtgagggggagtcaggcggaggcggatcttctctctcacttcatcctcctcagcagccacccctagtccccacaaactccggagggggaggagctacaggcggaagtccgggagaacgcaagagaactagactcggtggacccgctgctaggcatagatacgaagtcgtaacagagctgggcccagaggaggtacgatggttctacaaggaagataagaagacctggaagcctttcattggttatgacagcttgagaatcgagctggcctttcgtacgcttttgcagacaacaggtgccaggcctcaaggcggtgacagagacggagatcacgtttgctcaccaacaggccctgcatcctcaagcggcgaagacgatgacgaagatagagcttgtgggttttgccaatcaacaacaggacacgagcctgagatggtggaactagtcaatattgagcccgtttgcgtccgcggaggactgtacgaagtagacgttactcagggcgaatgctatccagtctattggaaccaggcagacaagatccctgtgatgagaggccagtggttcatcgatgggacatggcagcccctggaggaggaggaaagcaatctgatcgaacaggagcacctcaactgttttcgaggacagcagatgcaggaaaacttcgatatcgaagtcagtaaaagcatagatggaaaggacggcagcggtatcaattatagcgccgtgcatagctttaagctcagccgcaatcatgtagactggcactccgtagatgaagtgtacctttactcagatgcaacaacatcaaaaattgctagaaccgtcacacagaaactgggtttctccaaggcctccagtagcgggacccggcttcacagaggttacgtagaggaggctaccctggaagacaagccatctcagaccacacacattgtgttcgtggtgcatggcattggtcagaagatggaccagggacggatcattaagaatactgcaatgatgcgagaggccgcacgaaaaatcgaggagagacatttcagcaaccatgcaactcacgtagagttccttcctgtggagtggaggagcaagctcacactcgatggcgataccgtagactcaataactccagacaaggtgcgaggcttgcgagatatgcttaacagttcagcgatggatatcatgtattacaccagcccgctatatagggacgagctagttaaggggttgcaacaggagctaaataggctgtattctctgttctgtagtagaaaccccgatttcgaagaaaaaggcggaaaagtgtcaattgtcagccattcactcgggtgcgtcatcacctacgacattatgaccggatggaaccctgtccggctatatgaacagctccttcagaaagaagaagagctccctgatgaaagatggatgagttacgaggaacgacacctgctggatgagctttatatcactaaacgacgcttgaaagagatcgaagaaaggctgcatgggcttaaggcttcgtcaatgactcagactcccgcattaaagttcaaggtggaaaattttttctgtatgggctctcccttggccgtgttcctggcacttaggggaatcagacccggaaatacaggatcacaagaccatattctgccccgtgagatctgcaaccgtctccttaatatcttccatccaacggatccagtcgcctatcggcttgagccactgattcttaagcactacagtaacattagtcccgttcaaatccattggtacaacacatccaaccctctgccatacgagcatatgaagccttcctttctaaatcctgctaaggaaccaacgtcggtatccgagaatgaaggcatctccacaataccatcaccggttacatccccggtgctgtccaggaggcactacggtgagagtattaccaatatcggcaaagcttcaattctgggggcagctagcatcggtaaagggctaggaggaatgctgttttctcgcttcggccgtagctccacgacccagagctctgagaccagcaaagactccatggaggatgaaaagaagccggttgcctcccctagcgccactaccgtgggaacgcagactctgccacatagcagttctggctttttagacagcgcccttgagttagatcacagaattgacttcgaacttagagaagggttagttgagagtcggtattggtcagcagtgaccagccacacagcatactggagttccctggacgtggctcttttcttactcaccttcatgtacaagcacgaacacgacgacgatgccaagcccaatctcgatccaatctag

SEQ ID NO: 29489 - DNA, 2316 bp, synthetic construct
  source 1..2316: mol_type = other DNA; note = Synthetic coding sequence
atgaactaccctggccgtgggtctcctaggagcccagaacacaacgggagaggcggaggcggtggcgcttgggagcttggcagcgatgctagacccgcttttggaggtggcgtgtgttgcttcgaacatctgccgggtggagaccccgatgacggagacgttcccctggccctccttagaggggaaccgggactacacctcgcaccgggaaccgatgaccacaaccaccacctcgctttggacccttgtctgtccgacgagaattacgatttctctagcgcagagagcgggagcagcttacgatactatagtgagggcgaatcagggggtgggggaagcagtctgtcgctgcacccccctcagcaacccccactcgtgccaacaaattctggaggcggtctgtatgaggtcgacgtaacccagggcgaatgctacccagtctactggaatcaggctgataagattcctgtgatgcggggtcaatggtttatcgatggtacctggcagcctttagaagaggaagagtcaaatctcattgagcaggagcacctcaattgttttcgtggccaacagatgcaggagaatttcgacatcgaagtgtcaaagtccattgacggtaaagacgccgttcacagctttaaactgtccagaaaccacgttgattggcacagtgtagatgaagtgtacttgtatagtgatgccaccaccagcaagattgcccgtactgtgacccaaaagctgggtttcagcaaagcctcttccagtggcacaagactgcaccggggatatgtagaggaagccaccctggaggataaaccttcccaaactacacatatcgtttttgtggtgcatgggattggtcagaaaatggaccagggcagaataataaagaacaccgcaatgatgagggaggctgccaggaaaatcgaagagcggcatttttcaaaccacgcgacacacgtcgagttccttcctgtggagtggcgaagtaaactcaccctagacggggatacggtagactcaataacccctgataaagtacggggactgagggatatgttgaactcaagcgctatggatatcatgtactacacgtcaccattgtatcgtgacgaactcgttaaaggtctgcagcaggagctgaatcggctgtactcactcttttgtagtcggaatccggactttgaggaaaagggaggcaaggtctcaatagtctcccacagtctcggctgcgttataacatatgacattatgaccggttggaaccctgtaagactttacgaacagcttcttcagaaggaggaagagctcccagatgagagatggatgagctacgaagaaaggcatctcttggatgagctatacatcactaagcgaaggctgaaggaaattgaagagagacttcacgggctcaaggctagttctatgactcagacgcccgctcttaaattcaaagtcgagaattttttctgtatggggtcacctctcgcagtgttcttggcccttagggggatccggcctggcaacactgggagtcaggaccatatcttgcctagggaaatatgtaaccgcctattgaacatttttcaccctactgacccagttgcttaccgactagaacctctgattctaaagcactactccaacatttcaccagtgcaaatccattggtacaacaccagtaatccacttccgtacgagcatatgaagccctctttcctgaaccccgctaaggaacctacctctgtctccgagaatgaggggatctccaccatccccagtcccgttacttctccagtcctgagccgtcgccattacggcgaaagcatcacgaacataggcaaagcctctatccttggtgcggcttcgatcggtaagggccttgggggaatgcttttctcacgattcgggaggagttcgaccacccaatcaagtgagacaagcaaagactctatggaagacgagaagaaacccgtggcctctccttcggctactactgttgggacacagacgctgccgcatagtagcagcgggtttctcgactccgcttattttcgtcttcaggagtcatttttcaacctgccccagcttctctttcccgagaatgtgatgcagaacaaggacaacgctctggtcgagcttgaccataggatcgattttgaattacgtgaaggcctggtggagagcagatactggagcgccgtgacatcccacacggcatactggtccagcctcgatgtggctttatttttactgaccttcatgtataagcacgagcacgatgacgacgctaaacctaacctagaccccatttag

SEQ ID NO: 29490 - DNA, 1179 bp, synthetic construct
  source 1..1179: mol_type = other DNA; note = Synthetic coding sequence
atgggtaccacttgcctgcatcttgggacattagagcagagcttggtatttgagaataaagtgaacagcgagaaggtcaagctgtcacttcgcaatttccctcacaacgattacgaagacgttttcgaggagccctccgaatccgggtctgatccctcaatgtggacggccagggggccattccgcagggaccgatggagctccgaagatgaagaggccgctggcccaagccaggccctctccccgctgctgtccgacactagaaagattgtcagcgaaggcgagctggatcagcttgcccagatccgcccattaatttttaactttcatgaacagacagcaataaaggattgccttaagatacttgaagaaaaaaccgccgcatacgatatcatgcaggagttcatggcccttgaattgaagaatctacctggcgaattcaacagcggcaatcagcctagcaacagggaaaagaacagataccgagacattctgccatacgattctactagggtcccgctgggcaagagcaaagattatatcaacgcatcttacatccggatcgtgaactgcggtgaggagtacttttatattgccacacaaggaccgctactttctacgatagacgacttctggcaaatggtcctcgaaaacaattccaatgttattgctatgattactagggaaatcgagggaggaataattaagtgctatcattactggcccatttcgctcaaaaaacccttagagttaaagcattttcgggtcttcctcgagaactaccaaattttgcagtatttcataatcaggatgtttcaagttgtcgaaaagtctaccggcaccagtcactccgttaaacagctgcaatttaccaagtggccggaccatggaacacccgctagcgcggatagcttcattaagtacatcagatatgcaagaaaaagtcatctcaccggccctatggtggttcattgcagtgcagggatcgggaggacgggtgtgttcctgtgtgttgacgtggtgttttgtgcgattgtcaaaaactgctcttttaacattatggacattgtcgcccagatgcgggaacagcgtagtggcatggtccagactaaagagcagtaccacttctgctatgacatagtgctggaagtgctgaggaagttactgactctcgactag

SEQ ID NO: 29491 - DNA, 621 bp, synthetic construct
  source 1..621: mol_type = other DNA; note = Synthetic coding sequence
atgtctagcccaagagattttcgtgccgagcctgtaaacgattacgagggtaatgacagcgaggcagaggacttaaatttcagggaaaccctccccagctcatctcaggagaataccccaagaagcaaggtgtttgaaaacaaagtgaactctgagaaagtgaaactgtccctcagaaatttcccccacaacgactacgaagacgtattcgaagagcctagtgagagtgggagtgatccaagcatgtggacagctagagggccattcagacgggaccgttggtctagcgaggacgaggaagccgctggcccatctcaagctctttctccacttctatctgatacacgcaaaatcgtgtccgaaggggaacttgaccagctggcgcaaatcaggcctctcatctttaacttccatgagcagacagcgatcaaggactgcctcaagattttggaggagaagactgccgcttacgatatcatgcaagagtttatgtttaacatcatggatattgtggcacaaatgcgtgagcaacgatctgggatggtacagactaaggagcaatatcatttttgttacgatatcgtattggaggtgctccgcaaactgctgaccctcgactag

SEQ ID NO: 29492 - DNA, 438 bp, synthetic construct
  source 1..438: mol_type = other DNA; note = Synthetic coding sequence
atgtggacggcaagggggccatttcgaagggacagatggtcctcagaagacgaagaagccgctggacctagccaggccttaagcccactgctaagtgataccaggaagatagtgtctgagggagagttggatcagctggcccagatcagacccttaatctttaacttccacgaacaaacagcgataaaggactgcctgaagattctcgaggagaagacagccgcttacgatatcatgcaggaatttatggctttggaactgaagaatttgccaggggagttcaattccggtaaccagccgtctaatcgcgagaagaataggtaccgcgatattctgccctttcagcaccacgggtactcaggtcccaatgagaggactacattttggcatggcagcaatgagggtgcagtgagcctgcttctgaggtattgcgcctag

SEQ ID NO: 29493 - DNA, 1020 bp, synthetic construct
  source 1..1020: mol_type = other DNA; note = Synthetic coding sequence
atgtggactgcacggggaccattcaggcgcgacaggtggagcagcgaggacgaagaggccgctgggccaagccaggctctctccccgctgctatctgacactcgcaagatcgtaagcgagggcgaattagaccaactagcccagattcgcccattgatcttcaacttccatgaacagacggcaattaaggattgtttgaagatcttggaggagaaaaccgctgcctatgacatcatgcaggagttcatggctcttgagctgaaaaatctgcccggagagtttaatagcgggaatcagccttccaatcgcgaaaagaaccggtatagggacatactgccctatgatagcactagagtaccccttggcaaatctaaggattacattaatgcatcctatatccgtatcgtgaactgcggcgaggaatacttttacatcgctactcaaggacctttactgtccaccatcgatgacttctggcagatggttctggagaacaacagcaatgtaatcgctatgatcaccagagagattgaaggagggattattaagtgttatcattattggcctatttcgttgaaaaagcccctcgaactcaagcacttccgcgtgtttctggagaattaccagattctccagtatttcatcatccgcatgttccaggtggtggaaaaaagcaccggcacgtctcacagcgtgaaacagctccagttcaccaaatggccagaccacgggacccctgcatccgcagatagcttcattaaatacatccggtacgctcgaaaaagtcatctcacaggccctatggtggtccattgttcggcaggcatcggacggacgggggtgtttctgtgtgtagacgtggttttttgtgccatagtgaagaactgctccttcaatattatggatattgtggcccagatgagggaacagaggtccgggatggtgcaaactaaggaacagtaccacttctgctacgacatcgtgctggaggtgttacgcaagctgcttactctggattag

SEQ ID NO: 29494 - DNA, 1047 bp, synthetic construct
  source 1..1047: mol_type = other DNA; note = Synthetic coding sequence
atgcagtttggagaactccttgcagccgtgcggaaagcccaggcgaatgttatgctatttctggaggagaaggagcaggccgcactgtctcaggctaatggtataaaggcgcacttggagtacagaagcgccgagatggagaagtctaagcaggaactagagacaatggccgctatatctaataccgttcagttcctagaagaatactgcaaatttaagaacaccgaagacattactttcccttctgtctacatcggactgaaggacaaattatcaggcatccggaaggttattacagagagtacagtgcatctgattcaactccttgaaaattataaaaaaaagttgcaggaattctccaaagaggaggaatacgacattcgcacacaggtctcagccatcgtacagcgaaagtactggacctcaaagccagagccttctacacgcgaacagtttctgcaatacgtccacgatatcaccttcgaccctgacaccgcacacaaataccttcgtctgcaggaggagaataggaaggtcaccaacaccacgccctgggaacacccttacccagacctgcccagtcgctttctccattggaggcaggtcctgagtcaacaatccctctacctgcacagatactactttgaggtggaaatctttggagcaggcacatacgttgggctcacgtgtaaaggcatcgatcaaaaaggagaggagcggtccagctgtatcagcggaaacaacttctcatggagcctccaatggaacggaaaagaatttactgcatggtatagcgacatggaaacaccccttaaagctgggccattctggaggctgggcgtgtatatcgattttccagggggtatactgagcttctacggggtggagtatgactccatgaccctagtccataagttcgcctgtaaattttcggaacccgtctatgcggcattctggctctcgaagaaggaaaacgccatcaggatagtcgatttgggagaagagcccgaaaagccagctccaagcctggttgggaccgccccatag

SEQ ID NO: 29495 - DNA, 1047 bp, synthetic construct
  source 1..1047: mol_type = other DNA; note = Synthetic coding sequence
atgcagtttggtgagctcctcgcagccgtgcggaaggcacaggccaatgttatgttgttcttggaggaaaaggagcaggccgcactgtctcaggccaacggaatcaaagcccacctggagtatcggagtgctgagatggaaaagtcaaaacaggagctggagactatggccgctattagcaacacagtgcaattcctggaggagtactgcaaattcaaaaacaccgaagatattacctttccgtcagtgtatattggacttaaggataagcttagcggcatccgcaaggttatcactgaaagcacagtgcacttgattcagctcctcgagaattacaagaaaaaactgcaagagttctccaaggaagaggaatacgatatcaggacccaggtttctgcaatagtgcagcgcaaatattggactagtaagcccgagcctagcactagagagcagtttctgcagtatgttcacgacattacctttgacccagatacagcacacaagtacctgcgactccaggaagagaaccgtaaggtaactaacacaacaccatgggaacacccgtaccctgatctccctagccgatttttgcattggcgacaagtactgtctcagcagtctttgtatctccataggtactacttcgaggtggaaatcttcggagctggaacgtatgtaggcctgacttgtaagggaatagaccagaagggagaagaaagatcatcatgcatcagcggaaataattttagttggagtctccagtggaatgggaaggagtttactgcctggtactcagacatggagacccccctgaaagctggaccgttttggcgccttggagtgtacatcgactttcccggtggcattttaagcttctacggcgtggagtacgactcgatgacactggtccacaaatttgcttgtaagttttccgagcctgtctatgcagcattttggctgagtaagaaagagaatgctattcgtatcgtggacctcggggaagaacctgagaagcctgcgccttccctggtcggtactgccccttag

SEQ ID NO: 29496 - DNA, 687 bp, synthetic construct
  source 1..687: mol_type = other DNA; note = Synthetic coding sequence
atgattgacgacagcacgcgggttcccctgggcaagagcaaggactacatcaatgccagctacattagaatcgtgaactgcggggaagaatacttctatatcgccacacagggtcccctgctgagcacaatcgacgatttttggcagatggtgctggagaataatagcaacgtcatcgccatgatcactagagagatcgagggcggaattatcaagtgctatcattactggccaatatctttgaagaaaccactggagcttaaacactttagagttttcctggagaactaccagattctgcagtactttattattagaatgttccaggtggtggaaaagagtacggggacttctcacagcgtcaaacaactccagttcacaaagtggccagatcacgggacgccagcctccgccgacagctttattaagtacatccgatatgccaggaagtcgcacctcactggccctatggtagtacactgctctgcaggcatcggacggacaggtgtttttctgtgcgtggacgtggtgttttgcgccattgtgaagaactgctcctttaacataatggatatcgtcgcacagatgcgtgagcagcgcagcggaatggtccagaccaaagaacagtatcacttctgctatgatatcgtactggaggtgctacggaagttactaacactagactag

SEQ ID NO: 29497 - DNA, 1449 bp, synthetic construct
  source 1..1449: mol_type = other DNA; note = Synthetic coding sequence
atggtaatggaaaaacctagcccactcctcgtcggtcgtgaattcgtccgacagtactacactctccttaacaaggccccagaataccttcaccgcttttatgggagaaactcaagctacgtgcatggtggggtcgatgccagtggtaagccccaagaagctgtttacggccaaaacgacatccaccacaaggtactctctctcaactttagtgagtgccataccaagatcaggcacgtggacgcacacgcaaccttatcggatggcgtggtcgtccaggtgatgggcctgttgtcgaattcaggacagcctgagaggaagtttatgcagactttcgtcttggcacctgagggaagcgttccgaacaaattctatgtacataacgacatgtttcgctacgaggacgaagtcttcggggactctgagcctgagttggacgaggagagtgaagacgaagtcgaggaagagcaggaggaacggcaacctagtccagagccggtccaggagaatgccaactccggctattatgaggcacatcctgtcacaaacgggattgaagagcccctggaggagtccagccacgagccagagccagagccagagtctgaaaccaagactgaggaactgaaaccccaagtggaagagaaaaaccttgaagagttggaagagaagtccaccaccccacctcctgccgaaccagtgtccctgccccaggaacccccaaaggccttcagctgggcaagcgtgacctcaaagaatcttccacctagcggcacagtctcttcctccgggatcccgccacacgttaaggcacccgtgagccagcccagggttgaggcaaaacctgaagtccagtcccagcccccacgcgtgagagagcaacggcctcgggaacgcccaggatttccacctcgcggacccagacccggaagaggagacatggaacaaaacgatagcgacaatcgccgtattatccgctatcctgattcccaccagctgttcgtaggaaatctcccccatgatatagatgagaacgagcttaaagagttttttatgagtttcggcaacgtggtagaactaagaatcaatactaaaggagtgggaggcaaacttcccaactttggcttcgtggtgttcgacgacagtgagcccgtgcagcggattcttatcgcaaaaccaatcatgtttcggggagaggtgcgcctcaacgtggaggagaagaaaacccgtgctgcacgcgagagggagacccgaggcggaggtgatgacagacgcgatattaggcgaaatgacagaggtcccggaggcccacggggtattgtgggaggaggaatgatgagagatcgcgacggcagagggcctccacccagggggggaatggcccagaagcttgggtctggcagaggcacaggtcagatggagggccgatttacaggccagcggagatag

SEQ ID NO: 29498 - DNA, 1020 bp, synthetic construct
  source 1..1020: mol_type = other DNA; note = Synthetic coding sequence
atgtggacagcgcgaggaccctttcgcagggacagatggtcctccgaggacgaggaagcagctggtccctcacaggctctgtcacctttattaagcgacacccgcaaaatcgtgtccgaaggggagctcgaccaactggcccagattagaccactgatatttaattttcatgaacagaccgccatcaaagattgtcttaaaatcctggaagagaaaaccgcagcgtacgatatcatgcaggagttcatggctcttgaattaaagaacctgcccggagaatttaattccggaaatcagccaagcaatagagaaaagaatcgctatagggatattctaccctatgactctacgcgggtacccctgggcaaaagtaaggattatattaacgcatcatacatccggatcgtcaactgtggggaagaatacttttacatagccacccaggggccactactgtccactatcgatgatttttggcagatggtgctggagaacaacagcaatgtgatagcaatgatcaccagggagatcgaggggggtataatcaagtgctaccattactggcctatctcgctgaaaaaacctctcgagcttaagcattttcgagtgttcctggaaaattaccagatccttcagtattttattattaggatgttccaggtcgtcgagaagtctacaggaacttctcactcagtgaagcaattacagttcacaaaatggccagaccacggtactcccgcttccgctgattcattcatcaagtatataaggtacgcgaggaagtctcatctgaccggcccaatggtcgtccactgcagcgcaggtattggcagaacgggagtgttcctgtgcgtagatgtcgtgttttgcgctattgtcaaaaactgctctttcaatatcatggacatcgtggcacagatgagggagcagcgcagtgggatggtgcagacaaaagagcagtaccacttctgttacgacatcgtactcgaagtgctacggaagttgctcacactggactag

SEQ ID NO: 29499 - DNA, 621 bp, synthetic construct
  source 1..621: mol_type = other DNA; note = Synthetic coding sequence
atgagttcgccccgagacttcagggctgagccagtgaacgactacgaaggcaacgattcagaagcagaggacctgaactttcgcgagacactgcctagctcctcacaggagaataccccccgaagcaaagtcttcgaaaacaaggtcaacagcgagaaggtgaagctgagtctccgaaacttcccccataacgactacgaggacgtgtttgaagagcctagtgaaagcggttctgaccctagtatgtggaccgctagagggccatttcgcagagacaggtggtccagcgaagacgaggaagccgctgggccatcacaggcactctccccgctcctcagcgacaccaggaagattgtgagcgagggcgagttagaccagctcgctcaaatcagacctctgatctttaatttccacgagcagaccgctataaaggactgtctgaaaatactggaagagaaaactgctgcttacgatatcatgcaggaattcatgttcaacatcatggatatcgtggctcagatgcgggagcagaggtcagggatggtgcagactaaggagcagtaccacttctgctatgacattgtgcttgaagtcctccgtaagttgctgacactcgactag

SEQ ID NO: 29500 - DNA, 438 bp, synthetic construct
  source 1..438: mol_type = other DNA; note = Synthetic coding sequence
atgtggacagctagggggccttttcggcgagacagatggtcctcagaggatgaggaggcagcaggaccatcacaggctctgagcccgctgctatctgataccagaaagatcgtgagtgagggtgagctggatcagttagcacagattcgtccactaatttttaattttcacgaacagactgccattaaagactgtctgaagatcctggaggagaaaacagctgcatacgacatcatgcaggaattcatggctcttgagctcaagaaccttcctggagaattcaattcgggcaatcaaccaagcaaccgagagaagaaccgatatagggacattttaccttttcagcatcacggctatagcggcccaaacgagagaaccacattctggcatggatccaatgaaggcgctgtgtctctgctcctgcgttactgcgcctag

SEQ ID NO: 29501 - DNA, 687 bp, synthetic construct
  source 1..687: mol_type = other DNA; note = Synthetic coding sequence
atgattgacgattccacacgggtacctttagggaagagcaaggattacatcaacgcaagctacattcggatcgtcaattgtggagaagagtacttctacatcgccacgcaggggccactactttccaccatcgacgacttctggcaaatggtcttagaaaataattctaatgtaatcgcgatgataacccgggagatcgaaggtggcataattaagtgctatcattactggcctatatctttaaagaagcctttggagctgaagcactttagagtgtttctggaaaactatcagatcctgcagtacttcattattagaatgtttcaggtggtggagaaaagtactggaacatcacattcagtgaagcagctacagttcacaaaatggccagatcatggcacacctgccagcgctgactcatttatcaagtacatccgttatgcgagaaaatctcatttgacagggccaatggtcgtacactgctccgctggaatagggcgtacaggcgtattcctgtgtgttgatgtcgtgttctgtgccattgtaaagaactgctctttcaacattatggacatcgtcgctcagatgcgcgaacagcgttcgggcatggtgcagacaaaagagcagtaccatttttgctatgatatagtgctcgaggtcctacgcaaactgcttactctagactag

SEQ ID NO: 29502 - DNA, 2802 bp, synthetic construct
  source 1..2802: mol_type = other DNA; note = Synthetic coding sequence
atgttttggaaatttgacctgaatacgactagccatgtggacaagctgctggacaaggaacatgtgaccttgcaggaactgatggacgaagatgacatcttgcaagaatgtaaggctcagaaccagaagctattggatttcctttgtagacagcagtgtatggaagaactcgtctctctgatcacccaagatcccccactggatatggaagaaaaagtccgcttcaaatacccaaatactgcttgtgagctgttgacctgcgatgtgcctcagattagtgatcgcctgggaggagatgaatcacttctctcactcctctacgacttccttgatcacgaacctccgcttaaccctctgctggccagcttcttttcaaagaccattgggaatttgatagcacggaagacagaacaggtgatcacatttctcaagaagaaggacaagttcatctccctcgtactgaagcacatcggaacctctgctctcatggacttactgttgaggcttgtatcctgtgtagagccagctggcctccgccaggacgtgttgcactggctgaatgaagagaaggtgatacagcggctcgtcgaactgatccacccctcacaggatgaagatagacagtccaacgcctcccagaccctctgcgatattgtcagactggggagggatcagggctcgcagttacaggaggccctcgagcctgaccctctgctgacggcacttgaaagccgtcaggattgtgtcgaacagttattaaagaatatgttcgacggtgacaggacagagtcgtgcttggtgagcggtacccaagtgctcctcaccctcctggaaactagaagggttggaacagaagggctggtcgattcattctcacagggacttgagagatcgtacgcagtctctagtagcgtcctgcatgggatcgaaccaaggttgaaagattttcatcagctgctgctgaatcctccaaagaagaaagcaattctgacgaccataggggtgctcgaggagccactagggaacgcaaggctacatggcgcacgtctcatggctgcacttctgcataccaacaccccgagcattaatcaggaactgtgccggctgaacacaatggacttacttctggatttgttctttaaatatacctggaataatttcctgcactttcaggtggagttgtgtatagcagccattttgtcccacgccgctcgagaggagcggaccgaagcatcgggctcagaatcacgtgtagagccgcctcatgagaatggcaatcgtagcctggagacaccacagcccgctgcgtctctgcctgataatacaatggtcacgcatctgttccaaaaatgttgtctcgtccagcggatcctggaagcctgggaggcaaacgaccacactcaagcagccggaggaatgcgcaggggtaacatggggcacctgacgcgaattgctaacgccgtcgttcagaatctggagaggggcccagtccagacccatattagcgaggtgatcagaggcttacctgccgactgtcggggacgctgggagtcatttgtcgaggaaaccctgactgaaaccaacaggcggaataccgtcgatttagccttctccgattaccagatccagcagatgaccgctaactttgtggaccagtttggcttcaatgacgaagagtttgctgatcaggatgacaatatcaatgccccttttgatagaattgcagagataaatttcaacatcgatgctgacgaagatagcccctccgccgctcttttcgaggcgtgttgctccgacaggattcagcctttcgacgatgacgaggatgaggacatctgggaagactcagacacaaggtgcgccgcacgtgtgatggctagaccacggtttggagcgccacatgcttccgaatcctgttccaagaatggccctgaaaggggcggacaggatgggaaggcctcactggaggcccatagagacgcccctggagccggagccccacctgccccaggtaaaaaggaagccccaccagtagagggggattcggaaggcgctatgtggaccgccgtctttgatgaacctgccaatagcacccctaccgctccaggagttgtgcgagacgtgggctcttcagtttgggccgcaggcaccagtgcccctgaggaaaaagggtgggccaaattcacggatttccaacccttttgttgttctgagtccggcccaagatgcagctcaccggtggatactgagtgttcccacgccgagggctcgcggtcacagggacctgaaaaagctttctctcctgcctcgccttgtgcatggaacgtctgtgttactcggaaagctcccctcctggcctctgattcatctagcagcgggggttcccattccgaggatggggaccagaaggcggcatctgccatggacgccgtgtctcgcggaccaggcagggaagcaccaccattgccaactgtggctaggacagaagaagccgtgggtcgcgtagggtgtgctgactcccgtctcctaagtccagcttgtccagccccaaaggaagtcacagccgcacccgctgtggctgtcccaccagaagcgacagtcgcaataacaacagccttgtcgaaggcgggtcccgcaattcctacaccggcagttagtagtgctctcgcagtcgccgtccccttgggaccgatcatggctgtgactgcagcccctgccatggtggccacgctcggtaccgtgacaaaggacggaaagaccgatgctccaccagaaggggcagcgctgaacggacctgtgtag

SEQ ID NO: 29503 - DNA, 2799 bp, synthetic construct
  source 1..2799: mol_type = other DNA; note = Synthetic coding sequence
atgttttggaaatttgacctgaacacgacgagtcatgtcgataagctgctggacaaagaacacgtgacgctgcaagagctgatggacgaagacgacatcctgcaggaatgtaaggctcagaatcaaaagctattagacttcctttgtagacaacagtgtatggaggagctggtctctctcatcactcaggaccctccactggacatggaggaaaaggtccggttcaagtatccaaatacagcctgcgagttgctaacatgcgatgtaccccagatctcagacaggttgggaggggacgagtctctgctgagcctcctatacgatttcctggaccacgagcccccactgaatcccctcttggcgtctttcttcagtaaaactatcggtaatctaatcgctcggaagacggagcaggtgatcactttcctgaagaaaaaggacaaattcatcagcttggtactgaaacatattgggacctccgcactcatggatctcctcctgcggctggtttcctgcgtggaaccagccggactcaggcaagatgttctgcactggctgaatgaggaaaaagttatccagaggttagtggaactgattcacccaagtcaggatgaggacaggcagtcaaatgcttcacagactttatgcgatatcgtaaggctgggcagagatcagggctcccaattacaagaagctctggagccggacccgctgctgacggctctggaaagccaagattgtgtcgaacagctcttgaagaacatgttcgacggagataggaccgagtcatgcttagtgagtggcacacaggtgctgctaacccttttagagactagaagggtcggaactgaaggtctggtggatagtttcagtcaggggctcgaacggtcgtatgctgtaagctcgagtgtattacacggcatcgagcccagactgaaagacttccatcaacttctgttgaatccccctaaaaagaaagctatcttgacaacaattggggtcctcgaggaaccgctggggaacgcgcgactgcacggcgcaaggctgatggccgctctgctacacacgaataccccaagcataaaccaggagttgtgtcgtttgaacacgatggatctactgctggacttgtttttcaagtatacatggaacaactttctgcacttccaagtggagctgtgtatcgcggctattttgagtcacgcagccagagaagagcgtactgaagccagtggatcggaaagtagggttgagcctcctcacgaaaatggtaatcggtctctggagacaccgcagcctgccgcatctctgcctgacaacacaatggtcacccacctattccaaaaatgctgcctcgtgcagcggattctcgaagcatgggaggccaatgatcacacccaagcagccggaggtatgaggcgcggaaacatgggtcacctaacccgaatcgctaacgccgttgtgcagaacctggagcgaggtcccgtccagacccatatcagcgaagtaataagaggactccccgctgattgccgtggaaggtgggaaagttttgtcgaagagaccctgacggaaacgaaccggagaaatactgtggatctggcctttagcgattatcagatacagcagatgactgctaacttcgtcgatcagtttgggtttaacgacgaggagttcgcggatcaggacgacaatatcaatgccccattcgatcgtatagctgaaatcaattttaacattgacgccgatgaggactcaccgagcgccgcactattcgaggcttgctgctctgataggattcagccgtttgacgacgacgaagatgaggacatctgggaggactctgacacccgctgcgcagccagggttatggctaggcctcggtttggcgctccccatgccagcgaatcttgcagcaagaatggccctgagcgaggagggcaggacggtaaggcctcactagaggctcacagggatgccccaggggcaggcgctcctccagcacctggtaagaaagaggccccacctgttgagggcgactcggagggcgcaatgtggactgccgtttttgacgaacctgccaacagcacacctactgctccaggagttgtgcgcgatgtgggaagtagcgtatgggccgcaggcactagcgcgcctgaggagaagggctgggccaaattcaccgattttcaaccattctgctgcagtgaaagcggccctcgctgcagttctcccgtcgatacagagtgctcccatgcggaggggtctcgttcacagggccctgaaaaggcattttcaccagcctcaccatgcgcttggaatgtttgtgttacacggaaggccccactcttggcctctgactcgagctcttccgggggttcccactccgaggacggggatcagaaagctgccagtgctatggatgccgtaagcagaggcccaggacgggaggcccctccactgcccacagtagccaggacagaggaggctgtgggccgagtgggatgcgccgacagccgactcttaagcccagcttgccctgcccctaaggaagtgacagcagccccagccgtggctgtgccccctgaagctactgttgccatcaccactgccttgtcaaaagcgggtccagccattcccacccccgctgtctcctccgccttagcagtggctgtgcccctgggacccataatggcagttacggctgcgccagctatggttgccacgttaggtaccgtcaccaaagacggaaaaacagatgccccacctgaaggcgctgctctcaatggaccagtctag

SEQ ID NO: 29504 - DNA, 789 bp, synthetic construct
  source 1..789: mol_type = other DNA; note = Synthetic coding sequence
atggctctgagtcttgggtggaaggcccaccgcaatcattgcggactgctgctccaggccttgaggtcttccggtctactgttgtttccatgcggtcaatgtccctggcggggagcgggtagctttttggacccagaaatcaaagcttttttggaggagaacacagaggtaacgagctccggatcgctcactcccgagattcaactccgcctgttgacccccaggtgcaagttttggtgggaacgcgctgacctatggccacattcagacccttactgggccatctattggcctggaggccaggctctgtctaggtacctgctcgacaatccagacgtggttcgcggaaagtccgtgctcgatttgggcagcggctgtggcgcaacggccatcgcggctaaaatgagtggagcttccagaattctggcaaacgacattgatcctattgctggaatggctatcaccctgaattgcgagctgaatcggttaaacccctttcctattcttattcaaaacatcttgaacctggagcaggacaaatgggacctcgttgtgctgggtgatatgttctacgatgaagatcttgccgacagtctccaccaatggctgaaaaagtgcttctggacttacaggacccgggtactcattggtgaccccggtagacctcaattttcaggtcactctattcagcatcatttgcataaagtcgtagagtactctctgctggaatcaacgaggcaggagaattcagggttgacgactagcaccgtgtggggcttccagccatag

SEQ ID NO: 29505 - DNA, 2718 bp, synthetic construct
  source 1..2718: mol_type = other DNA; note = Synthetic coding sequence
atggaggtgcaggttagccaggctagcctgggctttgagctcacgtccgtagaaaagtccctgagggagtggagccgccttagtcgggaagtcatcgcctggctatgtccaagttctcccaatttcatcctgaattttcccccacctccatcggccagctccgtgagtatggtgcagttgtttagttcacctttcgggtaccaaagtcccagtggacatagcgaggaggaacgggagggcaacatgaaatctgctaagccccaggtcaaccacagtcagcatggtgaatcacagcgggcactgtctcccctgcagagcaccttgagctctgccgcaagcccatcacaggcgtatgaaacctatatcgaaaacggcctgatatgtctgaagcataagattcgcaatatcgaaaagaagaagctcaagctggaggattacaaagatcgtttaaagagcggcgaacatctgaatccggaccagcttgaggccgtggagaaatatgaggaagtgctgcacaacctggaatttgccaaagaactgcagaagactttctctggcctgagcctggatctcctgaaggcacagaagaaagcgcaacgaagagagcacatgcttaaactcgaggctgagaagaagaagctcaggaccatcctccaggtgcagtacgttctgcagaatctgacacaggagcacgtgcaaaaagattttaaaggcggactcaacggagcagtgtatcttccatccaaggaactggattatttaatcaagttctcaaagctgacctgtcctgagcgcaatgagtcacttagtgtggaagatcagatggagcagtccagcctgtacttctgggacctgttggaggggtccgagaaggcagtagtgggcacgacatacaagcacctgaaagatctgttatccaagctcttgaacagcggatattttgaatcaatccccgtgcccaagaacgctaaagagaaggaagtgccattggaggaagagatgttgatccagagcgaaaaaaaaacccagctgtccaagacggagtcggtcaaggagtcagaaagccttatggaattcgcacagccagagatccagcctcaggagtttctcaatagacggtacatgaccgaggtcgattactcgaataagcagggtgaagagcagccttgggaggcagactatgcaaggaagccaaacctgcccaagagatgggatatgttgactgaacccgatggccaggaaaagaagcaggagagctttaaatcctgggaggccagcggcaagcatcaggaagttagcaagcccgcagtctctcttgaacagaggaaacaggatacaagcaagctcagaagcaccctccctgaagagcagaaaaaacaggaaatatccaaatccaagccatccccctcccagtggaaacaagacactccaaaaagcaaagctggctacgtccaggaagaacaaaaaaagcaagagacgccaaaactctggcctgtgcaactccagaaggaacaggaccccaaaaaacagactcccaagtcgtggaccccatcaatgcagtctgagcagaatacgacaaagagttggacaacaccaatgtgcgaagagcaagattccaaacagcccgagacccctaaaagctgggaaaacaacgtggaatcccagaagcactcccttacgagccagtcccagatatcccctaagtcctggggtgtagccaccgcttccttgattcctaacgaccagctcctgccccgaaaactaaataccgagcccaaggacgtccccaagcctgtgcatcagccagtgggctcatcatctacacttcccaaggaccccgtgttgagaaaggaaaaactgcaggatctcatgacccagattcagggcacctgcaactttatgcaggaaagcgtcctggacttcgataaacccagctccgccattcctacgtcacagccaccaagcgcaacacccggaagtcctgtagccagcaaggagcagaacctgagtagccagagcgatttcttacaggagcctctgcaagccgctatacccccaggcaaacagccttccagtctggcttcacctaatcccccaatggctaagggctctgagcaaggctttcagagtccgccagctagcagtagcagcgtcacaattaatacggcaccatttcaggccatgcaaaccgtgtttaacgtgaacgcaccactgccaccccgaaaggagcaggagatcaaagagagcccttattcccccggatacaatcagtcgtttacgactgcatccactcagactcccccacagtgccaactgccctccatccatgtggaacagactgtgcactcccaggagaccgcccagacaaacgtctttcctagacccacccagccatttgttaattctaggggctcagtaagggggtgtacccggggtgggagactgatcacaaacagttacaggtcccccggaggatataaaggtttcgacacgtaccgtgggctgccctccatcagcaacggaaactattcccagttacagtttcaggcccgtgaatacagcggcgcaccatattctcagcgtgataacttccagcagtgctacaagagaggcggtacaagtggcggaccacgggctaactcacgcgctaactgtttcatcatgagaaactcccttctgctgataaagcagcagggcggagtgattcttctgagatag

SEQ ID NO: 29506 - DNA, 1107 bp, synthetic construct
  source 1..1107: mol_type = other DNA; note = Synthetic coding sequence
atgagcttgtttggcaccacgtcagggtttggaactagcggaaccagtatgtttgggagcgcaaccacagacaaccataaccctatgaaagacattgaggtcactagctcccctgacgactcgatcggctgtctgagtttctctccccctactctccctggcaattttctgatagcgggaagttgggccaacgacgtgcgatgctgggaggtgcaggactccggccagacaattcccaaagcccagcagatgcatactggcccagtgctggacgtatgctggagtgatgacggctccaaggtgttcactgcgagttgcgataaaacggctaagatgtgggacctatcttccaatcaggccattcaaatcgctcagcacgatgcccctgttaagacaatacactggatcaaagcccctaattattcgtgtgtcatgacgggcagctgggataagaccctcaagttttgggacaccaggtcctctaacccaatgatggtactgcagctcccggaaaggtgctactgtgccgacgttatttacccaatggcagtggttgccaccgcagagcgtgggctgattgtttatcaattagagaatcaaccatccgagtttcgcagaattgagtcaccattgaaacatcaacataggtgtgtcgccatctttaaagacaagcagaataagcctaccggcttcgctttaggatctatcgagggccgtgttgctattcactacatcaacccacccaacccagcaaaggataacttcacatttaaatgtcaccgttcaaacggcacaaatactagcgccccacaggacatctacgctgtcaatgggatcgccttccatccggtgcatggcaccctcgcgactgttggcagcgacggcagattttcgttctgggacaaggacgctcgaaccaagttaaagacctcggaacagctcgatcagccgatcagcgcttgctgtttcaaccataatggcaacattttcgcctacgcgagcagctatgattggagcaagggccatgaattttataaccctcagaagaagaattatatcttcctgcggaacgccgcagaggaattgaagccacggaataagaaatag

SEQ ID NO: 29507 - DNA, 1107 bp, synthetic construct
  source 1..1107: mol_type = other DNA; note = Synthetic coding sequence
atgagtttgtttggcacaacatcaggttttgggactagtggtacgtctatgttcgggagtgccacaaccgacaaccacaaccctatgaaggatatcgaggttaccagtagccctgacgactcaattggatgtctgtccttctccccccctactctgcctggcaattttctgatcgcagggagttgggctaacgacgttaggtgttgggaggtgcaggattcgggccagaccatccccaaggcccaacagatgcacaccggccctgtgctcgatgtttgctggagcgacgatggaagtaaagtgtttactgctagctgcgataaaacagccaaaatgtgggacctttcctcaaaccaggctatccagatcgctcagcacgacgcccctgttaaaacgatacactggattaaagctccaaattactcatgcgtgatgactggttcctgggataagaccttaaaattttgggatactagaagttcaaatcccatgatggtgttgcaactacccgagcggtgctactgcgctgacgtgatctatcctatggcagtggtggccacagctgagcgcggtctcattgtttaccagctagaaaaccagcccagtgagttcagaagaatagagtcgcctctgaagcatcaacatcgatgtgtcgctatctttaaggataagcaaaacaagcctaccggctttgcgctcgggagcatcgaggggagggtggccatacactatataaacccaccgaaccctgcaaaggacaactttacattcaagtgccaccgttcgaatggcaccaacacaagcgccccacaggatatctatgcggtgaacggaatcgcattccacccagtgcacggtactctggcgactgtgggctccgatggccgtttctccttttgggataaggacgccagaactaagctaaagaccagtgaacaattagatcagcccataagtgcctgctgttttaaccacaacggcaatatctttgcctatgcctcttcatatgactggtctaagggacacgagttttataatccccagaagaaaaattatatattcctcaggaatgcggctgaagagcttaaaccgcgtaataaaaagtag

SEQ ID NO: 29508 - DNA, 2745 bp, synthetic construct
  source 1..2745: mol_type = other DNA; note = Synthetic coding sequence
atgagtagctctggatatcctcccaatcagggggcatttagcactgaacagtcccgatatcccccacattcagttcagtatacttttccgaacacccgccaccagcaggaccctgcctttggcggtaagcacgaggctccatctagtccaatctccgggcagccgtgcggcgatgatcagaatgcaagtccgtccaaattgagcaaggaggagctcatccagtctatggatagggttgatagagagatcgctaaggtggaacaacaaatcctgaagctgaagaagaagcagcaacagctagaggaagaggccgctaaacctccagaacctgaaaagcctgtgagtcctccgcctgtggagcaaaaacaccggtccatagtgcaaatcatatatgacgaaaaccggaagaaagcggaggaggctcataagatttttgagggcctggggccaaaagtcgagttgccgctttataaccaaccatctgacactaaagtgtatcatgagaatattaaaaccaatcaggtcatgcgtaagaaactgatccttttcttcaagcgtagaaaccatgccaggaagcagcgtgaacaaaagatctgtcagcgttacgatcagctgatggaggcctgggaaaaaaaggtcgatcgcatcgagaataatcctcgccgtaaggcaaaagaatccaagacaagagagtactatgaaaagcagttccctgaaatcaggaagcaacgtgaacagcaggagaggtttcagagagtagggcagcggggagccggtcttagcgccacaattgccagaagcgagcatgagatctcagaaataattgatggactgagcgagcaggagaataacgagaagcagatgagacaactcagtgtcataccgcctatgatgtttgatgctgaacaacggcgtgtgaagtttatcaacatgaatggcttgatggaggaccctatgaaggtatacaaagacagacaattcatgaacgtctggaccgaccatgaaaaggagatctttaaagacaagttcattcagcatcccaagaatttcggactcattgcaagctatttggagagaaagtcggtgcctgattgtgttctgtactattacctgacaaagaagaacgagaattataaagctcttgtccggagaaattacggtaagagacgaggacgaaatcaacagatagccagaccttcccaagaggaaaaagtggaggagaaagaggaagacaaggcagaaaagactgagaagaaggaggaggagaaaaaagacgaagaggaaaaagatgaaaaagaggatagcaaggagaacaccaaagagaaggacaagatagatggtaccgctgaggaaacggaggaaagggaacaggctaccccgagaggcaggaaaaccgccaactcccagggcagaaggaaaggtcgtataactcgctccatgactaacgaggcagccgctgcttcagctgccgctgctgccgctaccgaagaaccaccacctcctttaccgccaccacctgaaccaataagcactgaaccggttgaaacctcccgctggacagaagaggagatggaggtggcgaaaaaagggttggtcgagcacggtcgtaactgggcggctattgcaaagatggtgggcactaagagcgaagcccagtgcaaaaatttctactttaattataagaggcgacacaatctggacaatctccttcagcagcacaaacagaagacgtccagaaaacccagggaagaacgggatgtgtctcagtgcgagtccgtcgcttctactgtgagtgctcaggaggacgaggatatagaagcgtctaacgaagaggagaacccagaagactcggaaggggcagagaattcctcagacacagagtctgccccaagtccctcccctgtggaagcagttaagccaagcgaagatagccctgagaacgcaacatccagagggaacaccgagcccgcagtagagctggaacccacaaccgagactgctccttctacaagcccctcactcgccgtgccctcaactaagcccgctgaagacgagagtgtggaaactcaagtaaacgactcgatttccgccgaaacagcagaacagatggacgtggatcagcaggagcattccgctgaggaggggtccgtgtgcgacccccctcctgcaactaaggctgattcagtagacgtggaagtacgagtcccagagaaccacgcatcaaaagtagaaggcgataacacaaaagaaagagacctggaccgggcatcagaaaaggtggagcctagagatgaagacttagtggtcgcacaacagatcaacgcccaacgccctgagccccaatcagataacgacagtagcgccacctgctccgccgacgaggacgtggatggggaacctgagcgccagcgtatgtttccaatggactctaaacccagtctgttgaatccaacgggctctatcttggtctcctctccactcaaaccgaacccgcttgatctaccacagctacaacaccgggcagccgtcataccgccaatggtatcttgtacaccttgcaatattccaattggtactccagtcagcggatacgctctctatcaacgccatatcaaggctatgcacgagtccgccctgctggaagagcagcggcaaagacaggaacagattgatctcgagtgtaggagtagcacatccccctgcggtacctctaaatcaccgaacagggaatgggaggggcgatag

SEQ ID NO: 29509 - DNA, 7031 bp, synthetic construct
  source 1..7031: mol_type = other DNA; note = Synthetic coding sequence
atgagtagctccggctaccctccaaatcagggcgctttttcaacagagcaatctagataccccccacactctgtgcagtatacatttccgaacactcgacatcagcaagacccagcctttggagggaagcacgaggcacccagctccccaatttccggacaaccctgcggcgacgaccagaacgcctcccccagtaaactctccaaagaggaactgatccagtctatggatcgggtggaccgcgagatcgccaaggtggagcagcagattctaaagctgaaaaagaaacagcagcaactcgaggaggaggcggctaagcccccagagcccgaaaagcctgtgtcgcccccaccagttgagcagaaacacagatcaatagtccagattatctatgatgagaataggaaaaaagcagaggaggctcacaagatatttgaggggctagggcctaaagtggaattgccactctataatcagccctctgacactaaagtgtaccacgaaaacattaagacaaaccaagtcatgagaaagaagctgatcctgtttttcaagcggcgaaatcacgcacgcaaacagagggaacagaagatctgccagcggtacgaccagttgatggaagcctgggagaaaaaagtcgatcgcattgagaataacccaaggagaaaggccaaagagtctaagaccagggagtactatgagaagcagttccctgaaatccggaaacagagggagcagcaggagcgctttcagagagtggggcagcgtggggctggactcagtgccacaatcgccagaagcgagcatgagatttctgaaatcatcgacggtctgagcgaacaggagaataacgagaaacagatgcgtcaactctcagtcatcccccctatgatgtttgatgcagaacagcgcagagtcaagtttatcaatatgaacggcctgatggaagatccgatgaaggtctacaaggaccgacagttcatgaacgtgtggacagaccacgagaaggagatctttaaggacaagttcattcaacaccctaaaaactttggcctgatcgcttcgtatttggaacgaaagagtgtgccggattgcgtcttgtattactacctgactaagaaaaatgagaactacaaagctctagtccggagaaattatgggaagcgtagaggcaggaaccaacagatcgcccgtcctagtcaggaggagaaagttgaggaaaaggaagaagacaaggccgagaaaactgaaaaaaaagaggaggaaaagaaagacgaagaggagaaagacgagaaagaggacagcaaggaaaacacgaaggagaaggacaagatcgatggcactgccgaggagacagaagagcgggagcaagctacaccgaggggcaggaagactgccaattcacagggtcggaggaagggcaggataaccaggtccatgaccaacgaagcagcggctgcgtctgccgcagcagccgcagctactgaagagcctcccccaccgctccccccacccccagagccaatctccactgaaccggtggaaacaagtaggtggacggaggaagaaatggaggtcgcaaagaaaggactggttgaacacggtcgaaattgggcagcaatcgcaaagatggtgggtactaagagtgaggcacagtgcaagaacttttacttcaactacaagcgccgacacaacctggataaccttttgcagcagcataagcaaaaaacctcgcggaaacctcgagaggagcgggacgtgtcccaatgcgagagcgtcgcaagcacggtgagtgcccaggaggacgaagatatcgaagctagtaacgaagaggagaatccagaggattcagaaggggctgagaattcctccgatacggaaagcgcccctagtccaagcccagtggaggccgtgaagccctccgaggatagccccgaaaacgccacgtctcgcggtaacaccgagccagctgtcgagctggaacctaccactgagactgcgccatcaactagccccagcctggccgtaccctcgacaaaacctgcagaagatgagagcgtggaaacccaggtgaacgatagcatcagcgctgagacagccgaacagatggacgtagatcaacaggagcattctgccgaagagggatccgtgtgtgatcctcctcccgctaccaaagccgatagcgtggacgtggaggtgcgagtcccagaaaatcatgcgtctaaagtggagggggacaacacaaaagagcgggacctggacagagcctcagaaaaggtggagcccagagacgaggacctcgtagttgcccaacagatcaacgcccagcgtcccgagccccagtccgataacgatagcagtgcaacgtgcagtgctgacgaggatgtcgatggggaacctgagagacagaggatgttccctatggactccaagcccagtttgttaaaccccacaggatccattcttgtctctagccccctcaagccaaatcccttggacctcccccagttgcaacatagagcggctgtcatcccgcctatggtgtcatgcaccccctgcaacatacccatcggcactcctgtgtccggctacgcactgtatcagaggcacattaaggccatgcatgaaagcgcccttctcgaagagcagagacagcgacaggagcagatagatttggagtgtaggtcttctacaagcccttgtggcacaagtaaatcgcccaaccgcgagtgggaggtgcttcagcccgctccacaccaggtaatcacgaatctgcctgagggggtacgcctgcccacgacccgacctacgaggcctcctcccccactgattccatcatccaaaacaacagtggcgagcgaaaaaccctccttcataatgggcggttctatatcccaggggactccaggcacatacctcacatcccacaaccaggcctcgtacacccaggaaacccctaagccttcagtgggctcaattagtctgggcttgcccagacagcaggaatccgccaaaagtgccactttgccatacatcaagcaggaggaattcagccccaggagccagaacagccagcccgagggcctactagttagggcccagcacgaaggcgtggtccgcggaacagctggagcaattcaagagggctccatcacccgagggacacctacatctaagatatcggtggagagcattccctccttacgaggctctatcacacaaggcaccccagccctgccacagacaggcattccaacggaagccctagtcaaggggtccattagccgtatgcccattgaagatagttctcctgagaaaggcagagaggaggcggcttctaaaggtcatgtaatctatgaggggaaatcaggccatattctatcctacgacaatatcaagaacgccagagaggggactcgcagcccaagaaccgctcatgaaatctccctgaagagatcatacgaatccgttgaagggaacatcaaacagggaatgagcatgcgggagtctcctgtatccgctccactggaaggactgatctgtcgtgcactgcccagaggctctccacactcagatctgaaagagcggacagtgttgagtggtagtatcatgcagggtaccccaagagccacgaccgaaagcttcgaggatgggcttaagtaccctaagcagatcaagagggaaagtccgcctatccgggctttcgagggagctattaccaagggtaaaccctacgacggcataacaacaataaaagagatgggaaggtcaattcatgagatccctcgacaggacatccttactcaggagtctcgaaaaaccccagaagtggttcagtcaacgaggccgatcatagagggcagcatctcacaaggcacccctatcaagttcgacaataacagtgggcagagcgctattaagcataacgtcaagtcacttataaccggtccatccaaactgagccggggaatgccacctttggaaatcgtgccagaaaacatcaaggtagtggaaaggggtaagtatgaggatgtcaaggccggagaaaccgtccggagccgccacacctccgtggtctctagcggtccctccgtgttgcgttccactctgcacgaggcccctaaagcccaattgagtcctggcatttacgacgacacatctgcacgtcgaactccggtctcatatcaaaataccatgagtcggggttcacccatgatgaatagaaccagcgacgtgagttccaacaaaagtaccaaccacgaaagaaagtcaactcttacacccacccaaagagaatcaattcccgctaagagccccgtgcccggtgtggatcccgtcgtgtcacacagtccattcgaccctcatcatcgtggaagcacagccggagaggtgtatagatcacatttgcccacacacctggatcctgccatgccatttcatcgggctctggatcctgccgcagcctacctgttccaacggcagctcagtcccacacctggttatccaagtcagtaccaactgtacgctatggagaacacgaggcagacaatcctgaacgattacataacatctcaacagatgcaggtgaacctgagacccgacgtcgctagggggctatcccctagagaacagccacttgggctgccgtatccagcgacgcgcggaatcatcgatcttacaaatatgccccctacaatcctggtgccgcaccctggaggcacaagcacgcctccgatggatcggatcacctacatccccggaacacagatcaccttcccgccaaggccttataacagtgccagtatgtctcctggccaccccacgcatttggctgccgcagcttcagccgaacgcgagagggagcgtgaacgagagaaggagcgcgagcgcgagagaatcgctgccgcatctagtgacctctatctgagacccggatccgaacagcccggtaggcctggttcccatgggtacgtacgttccccatctccctccgttaggacccaggagaccatgcttcaacaacggccatctgtgtttcagggaactaatgggactagtgtcattactccgttagatcctacagcccagctccgaataatgcctctgccagctggcggtcccagtatttcccagggcctgcccgctagtagatacaacacagctgccgatgctctagccgctctcgtggacgcggcagcctcagcccctcagatggacgtcagtaaaaccaaagaatccaaacacgaggcagctcgcctggaagagaaccttagatcaagatctgccgcagtgagtgagcaacaacagttagaacaaaagaccctggaagtcgaaaagcgctccgttcaatgtctgtacacctctagcgcgttccctagtgggaagccccagccacactcctctgtggtctactcagaggccggaaaggacaaaggcccacctccaaagtctcgatatgaagaagaactgcggactcggggaaaaaccacaataacagccgctaacttcattgacgtgattataactcgacagatcgctagcgacaaagatgccagagagcgagggtcccaatcatctgactcttccagcagcctgtcttctcataggtacgagactccaagtgatgcaattgaggtgataagccccgcttcaagtcctgcaccgccacaagagaaactgcaaacgtatcagcccgaagtggtgaaagcaaaccaggctgagaatgatccaacacgtcaatacgaagggcctctgcaccactaccgaccccagcaggagagcccgagtccccagcagcagttaccgccatcttctcaggctgaaggcatgggacaggtgcctcggacacatcgactcatcaccttggcagaccatatttgtcaaatcatcacccaggacttcgcccgaaaccaggtttctagccagactccacagcagcctcccacttcaacctttcagaattcaccttctgcactggtgtccaccccagtgagaactaaaacgagcaatagatatagcccagagagccaggcccagtccgtccatcaccagcgacctggatcccgcgtttccccagaaaaccttgtggacaagagccgcggtagccggccaggcaaaagtccggagcgcagtcacgtgtcctctgagccatatgagccaatctctccaccccaggttcctgtggtccacgagaagcaggattccctgctgcttctgagccagcggggtgcagaacccgcagaacagcgaaatgatgccaggtctcccggaagtattagctatctgcccagcttcttcacaaaactggagaatacttcgccaatggtgaagtcaaaaaaacaagagatttttaggaaactgaattcaagcgggggtggtgacagtgatatggccgcagctcaacctggtacggagatatttaacctgccagcggtgacgaccagtggcagtgtgtcatcccggggtcatagttttgctgaccctgcctctaacttggggctggaggacattattcgtaaggccctgatgggcagtttcgacgacaaggttgaggaccacggggttgtgatgtctcagcctatgggagttgttccgggaaccgcaaatacttccgtagtgacgtcaggagaaacccggagggaggagggggaccccagtcctcatagcggagtttgtaagcccaaactcataagtaaaagcaattcccgaaagtccaagagtccaatcccaggtcagggctacctgggcaccgagcggccatcaagcgtgagtagcgttcactcggaaggggattaccacaggcagaccccaggttgggcctgggaggatcggccaagttctacgggctccacccagttcccctacaaccctctgactatgagaatgctctcatctacccccccaacgccaattgcttgtgctccatccgccgtcaaccaagcagctcctcatcagcagaatcggatctgggaacgagaaccagccccacttctatcggctcagtatgagactctttcagacagtgacgacta

SEQ ID NO: 29510 - DNA, 7013 bp, synthetic construct
  source 1..7013: mol_type = other DNA; note = Synthetic coding sequence
atgtcaagttctggttatccacctaaccagggagctttctctaccgagcaatcccgataccctcctcacagcgttcagtatacgtttcccaacactagacaccagcaagagtttgcagtgccagactataggtcctctcacctggaggtgtcacaggccagtcagctgttgcagcagcagcagcagcagcagctccgcagacggccttcgttgttgtcagagttccaccccggaagcgaccggcctcaggaacgtcggacaagctatgaaccttttcacccaggccctagccccgtggatcacgactccctggagtccaagagaccccgtctggaacaggtgtccgactcccacttccagcgcgtttcagccgctgtgctgccactggtgcatcctctaccagagggcttacgggcatctgcagacgccaagaaggacccagctttcggagggaaacacgaggcgccttcaagtcccatctccggacagccctgcggcgacgatcagaatgcaagtccatcaaagctgagtaaggaggaactgattcagtctatggatcgcgttgatagagaaatcgctaaagtggagcaacagatcctcaagctgaagaaaaaacaacagcagctagaggaagaagccgcaaagcctcctgaaccagagaagccagtttccccgcctccggtggagcagaaacatcgctctatcgtccagataatctatgacgagaataggaagaaagccgaggaggcccataagattttcgaagggttagggcctaaagtagagctgcctctttacaatcaaccaagtgacacaaaagtttaccacgagaacataaagaccaatcaggtcatgcgtaaaaaactgattctcttcttcaagcgacgcaatcacgccaggaaacagagagaacaaaagatctgccagcgctacgaccagcttatggaggcctgggagaagaaagtcgacagaatcgagaataatccgaggagaaaggctaaagaaagcaagacgcgggagtactacgagaaacagttccctgagattcggaaacaaagggagcagcaggagagattccagcgcgtagggcagcgaggtgccggattgagtgcgacaatcgccagatcagaacatgaaatttccgagattattgatggcctgtccgaacaggaaaacaatgagaagcagatgaggcagctgtccgtaatcccacctatgatgttcgacgcagagcagcggagagttaaatttattaatatgaatggtctcatggaagatcccatgaaggtatacaaagaccggcagtttatgaacgtgtggaccgatcatgaaaaagaaattttcaaggacaagtttattcagcaccctaaaaacttcggcctgatcgcttcctacctggaaaggaagagcgtcccagactgcgtgctatactattaccttactaagaagaacgaaaactacaaggcactcgtgaggagaaactatggtaagcgcagggggagaaatcagcagattgccagacctagccaggaggagaaagtggaagaaaaggaagaggacaaagccgagaagacagagaaaaaagaggaagagaaaaaggatgaggaagagaaggatgagaaggaggacagcaaagaaaacacaaaggagaaggataaaatcgacgggacagccgaagagaccgaagagcgtgaacaggccaccccgcgtggcaggaagaccgctaacagtcagggacgcagaaaagggagaattacgaggtctatgactaatgaggctgcagcagcatccgccgctgccgcagccgcaacagaggaaccaccccctcccctgcctccccctcccgaacctatctcaactgagccagttgagacgtctaggtggacggaagaagagatggaggtagccaagaaaggactcgtagagcacggaaggaattgggccgcaatcgccaagatggtgggcaccaaaagcgaagcacagtgcaagaatttttatttcaattataaaaggagacacaacctggacaacctcctgcagcagcataaacagaaaactagtcggaaaccaagggaggagcgagatgtctcacagtgcgaatccgtcgcctctactgtttcagcacaggaggatgaggatatcgaagcctccaatgaagaagagaatcccgaggactcagaaggggctgagaacagctccgacacagaatccgcgccatctccttctccagtggaagccgtgaagccaagtgaggactcaccagaaaatgccacctctaggggcaataccgagcccgcagtggagctggagccaactacggagaccgcaccctctacaagcccttccctcgccgtgcctagcaccaaaccggctgaggatgagagcgttgagacgcaggtcaacgactccatttcggctgagacggcagaacagatggacgtagaccagcaggagcacagcgccgaggagggctcagtatgcgatccacccccagctacaaaggcagactccgtggatgtggaggtgagagttcctgagaaccacgcgtctaaagtagagggggataatacaaaagagagggacttggaccgggcatctgagaaggtggagcccagagacgaggacctggtcgtagctcagcaaatcaacgcccagcgcccagaaccccagtccgacaatgactcaagcgctacatgttccgccgacgaagacgtggacggcgaacccgaacggcagaggatgttccccatggattccaagccatccctgctgaacccaactggaagtatcctagttagctcccctctgaagcctaatccattagacctaccccagctgcagcacagggccgctgttatcccccctatggtgagctgcaccccatgcaatatcccaataggcacaccagtgtcaggctacgctctgtatcagagacacatcaaggccatgcacgagtcagcactgctcgaggagcagcgccagcgtcaggagcaaatcgatcttgagtgtcgctcctctacctccccctgtggaaccagtaagtctcccaacagagaatgggaagtccttcaacctgcgcctcaccaagtgattaccaacctccctgaaggcgtacgactgccaaccactcgccctacaaggccgccaccacctctcattccgtccagcaagaccactgtcgcctcagagaaaccctctttcatcatgggcggttccatttctcagggcactccgggtacttacctgacctcacataatcaggcaagttatacacaggagacgcctaagccctcagtgggctccatctccctgggactgccccgtcagcaagagtccgctaaatctgccacactgccttacatcaagcaggaagaattcagccccagatctcaaaactcacagcctgagggactcctggttagggcacagcatgagggcgtggtgaggggaaccgcaggcgctatccaggagggaagcatcacaaggggtacccccacatctaaaatttctgtcgagagtattcccagcctgcggggatctataacccagggtacccccgcactccctcagaccggtatccctactgaggccttggtcaagggatctatctctcgcatgccaatagaagactcaagtcctgaaaagggtagggaagaagccgctagcaaggggcatgtgatttacgaaggcaagtctgggcacatcctatcctacgacaatatcaagaatgccagagaaggtacacggagcccaagaactgcacatgagattagcctgaaacgctcttacgagtccgtcgaaggaaacataaagcaaggaatgtccatgcgcgagtctcccgtctctgctcccctcgaaggcctaatctgccgcgctctgccccgtggttcacctcactcagatctcaaagaacggacagtgctcagcgggagtatcatgcaaggcacgcctcgcgctacaacagagtcctttgaggacggcttgaaatatcccaaacagatcaaaagggaatctcctcctatccgcgcatttgaaggagctatcaccaaagggaaaccatacgatggcataacaaccattaaagagatgggacggagcatccacgagattcctagacaggatatccttacccaggagtccaggaagacgcctgaggttgttcaatccacccggcctatcattgaggggtctatatcccagggtactcctattaagttcgacaacaactccggacagtctgccatcaagcataatgttaagagtctgataacaggcccttcaaagttgagtaggggcatgccccctctcgagatcgtccctgagaacattaaggtcgttgaaaggggcaaatacgaggacgttaaagccggagaaactgtgaggagtcggcacacaagcgtggtgtccagcggaccttcggtgcttcgaagcacactgcatgaagcccctaaagcgcagctctcaccaggcatatatgatgatacaagcgcacgacggacccctgtcagttatcagaacacaatgtctagaggatctccgatgatgaacaggactagcgacgtgacaatctcgagcaacaagagtaccaaccatgaaagaaagtccaccttaaccccaactcagagggagtccattccagcaaagtcccccgtccccggagtggatcctgtggtctcacactctccttttgacccccatcaccgcggtagcaccgcaggagaagtgtatcgctcccacttaccgactcatctcgatcccgcaatgccattccatagagcactggacccagctgctgccgcatacttgtttcaacgtcaattaagcccgacgcccggttatcctagtcaataccagctttatgctatggagaatacaaggcagactatccttaacgattacataacctctcaacagatgcaggtgaacctccggccagacgtagcacgaggactgagtcctcgtgaacagccattgggcttgccttacccagcaacacgtggtatcatcgaccttacaaatatgccacctaccatcctggtcccgcatccaggaggtacgtccacccctccaatggatagaatcacctatattccgggtacccagatcacctttcctcctcgaccttataattcagcaagcatgtcccccggacaccccacccatctggccgctgccgcttcggcagaaagggagagagaacgggagcgtgaaaaagagcgtgagcgcgaacggattgcggctgcctcctctgatttgtatctgaggcccggatcggagcagcctgggagaccagggtcccatggttatgtgcggtccccttctcccagtgtgcgaactcaagagaccatgctgcagcagcgcccatccgtcttccaggggacgaacggtacctcggtcataaccccactggatcccactgctcagctgaggataatgcctttgccggctgggggacctagcatcagtcagggcttacccgcaagccggtacaatactgccgctgatgccttggctgcactcgtggatgctgctgcgagtgctccacagatggatgtgagtaaaacgaaggagatcagtagccatcggtacgagaccccatcagatgcaattgaggtcatctctccagctagttcgccagcgcctccccaggagaagcttcagacctatcagcctgaagttgttaaggcaaatcaggcagaaaatgaccctacgagacagtacgagggccctttgcaccactaccggcctcagcaggaatctccaagccctcaacagcagttgcctcctagctcacaggccgaggggatgggacaagtgccacggacacaccggctgattacccttgcagaccatatctgtcagattatcacccaagattttgcaagaaatcaggtgtcttcacagacaccgcaacagcccccaacctccaccttccagaacagcccctctgctcttgtatctacgccggtacggaccaaaaccagcaatcgctatagcccagaatctcaggcccaatctgtgcaccaccagaggcccggatcaagagtgagccctgaaaacctggtagataagagcaggggtagcaggcccggtaaaagccctgagagaagccacgttagttccgagccttacgagcctatctcgccaccccaagttcctgtggtccatgaaaagcaggattccctcctgcttctcagtcagagaggggctgagcccgcagagcaaagaaacgatgccaggagtcccggttcaattagttacttgcctagctttttcacaaaactggaaaacacatctcctatggtgaagtctaaaaagcaagagattttcaggaaactcaatagttcaggcggaggagatagcgacatggccgcagcccaaccgggaaccgaaatcttcaacctgccagccgttactacgagcggcagcgtatcctcacgaggacacagttttgccgatcctgccagtaaccttggtctggaggatattatacgcaaagccctgatggggagctttgacgataaggtggaagatcatggtgttgtcatgtcacagcctatgggtgttgttcctgggaccgccaatactagcgttgttacctccggtgagacccgcagggaagagggagacccttctccacactctggcggtgtatgcaaacccaagttaattagtaaaagtaactcacggaaaagtaaatctcccatcccaggtcaagggtacctggggacagaacgcccttcatccgtgtcctccgttcacagcgaaggtgactaccacaggcagactcccggatgggcttgggaggaccggccttcgtcaaccggttctactcagttcccctacaaccctcttaccatgaggatgctgtctagtacccccccaaccccaatagcttgtgctccgtcggctgtgaatcaagccgcacctcatcagcaaaatcggatttgggaacgcgaacccgcaccactcctgtctgcccagtacgagacactgtcagatagtgatgatta

SEQ ID NO: 29511 - DNA, 3075 bp, synthetic construct
  source 1..3075: mol_type = other DNA; note = Synthetic coding sequence
atgcctccattggagattgtgccagagaatataaaggtagtggagcgaggcaaatatgaagacgtaaaggcaggcgaaaccgtaagaagccgtcacacttctgtagtcagttccggacctagtgtcctgcgttctacgctgcatgaagcccctaaggcccaactgagccccggaatttatgacgatacttccgcgagacggactcctgtatcatatcagaacacgatgtctaggggttctccaatgatgaatcggacaagtgatgtcactatttcatcaaacaaaagtaccaatcacgagcgtaagtctacattaactcccacacagagagagtcaatccccgctaagtcccccgtgcccggtgtggatcccgtggtatcccattctccgtttgatccccatcatcggggttctacggcgggtgaggtgtaccgtagccacctcccgacccatttggacccagccatgcctttccatagagctctcgaccctgccgcagctgcatacctctttcagagacagctctcacccactccagggtaccctagccaataccagctctacgccatggagaacacaagacagaccatactgaatgattacattaccagtcaacaaatgcaggtgaacctcaggcccgatgtggccaggggattgtcccctagagagcagcccctcgggctgccctacccggctacacgaggtatcatagatctcaccaacatgccgcctaccatcctcgtccctcaccctgggggtacaagcacgcctcccatggatcggatcacctacatcccagggacccagatcacgttcccacctcggccatacaactccgctagcatgagccccggtcaccctacacatttagccgctgccgcttctgcagagagggagagagaaagagagcgggagaaggagcgggagagagaacgcattgccgcagcttctagcgacctttatctgaggcccggaagcgagcagccagggagacctgggagccacggctacgttcggagcccatccccatccgtccggactcaggaaaccatgctgcagcagcgccctagcgtgttccagggaactaacggcacgtcagtcatcactcctctggatcccaccgctcagcttaggataatgccattgccggctggcggaccaagcatatcgcagggcctccccgcatcccgctataacacagctgccgacgctctggccgctctggtcgatgccgctgcgtccgccccacagatggacgtctcgaagacaaaagaatcgaaacatgaagccgctcggctggaagaaaatctgcgcagtcggagcgccgcagtttcagaacagcagcagctggagcaaaagaccctagaggtcgaaaaacgctccgtgcagtgcctctatacaagttcagcttttcctagcggcaaacctcagcctcacagctctgtagtgtactctgaggcgggaaaggacaagggccctccgccaaagagcaggtacgaggaggaactccgtactcgaggcaagaccaccattaccgctgcaaattttatcgatgtaattattacacgacaaatcgcaagtgacaaggatgcgagggagcgtggtagtcagagcagtgatagctcttcaagtttgtcttctcaccggtacgaaacgccctctgatgcgatcgaggtgatctcacccgcttcctcacccgctccaccccaggaaaagctgcagacttatcagcctgaagttgtcaaagccaaccaggccgaaaacgatcccacaaggcagtacgaagggcctctccaccactacaggccccaacaagagtcccctagcccccagcaacagttgcctccttcttcacaggcagaaggaatggggcaggtgcctcgtactcaccggctgattacactagccgaccacatttgccagatcattacccaggactttgcacgcaaccaggtgtcctcacagaccccccaacagcctcccacgagcactttccaaaactcaccatcagcactggtgtctactcctgttcgcaccaagaccagtaaccgctatagccccgaaagccaggcccagagtgtccaccaccaacggccaggctctcgagtcagtcccgaaaacctcgttgacaagtcccggggttctcgcccaggaaagagccctgagagaagccatgtaagcagcgagccatatgagcctatcagccccccacaggtgcctgtagtgcatgagaagcaagattcactactgttgctaagtcagcggggtgcagaacccgcagaacagcggaacgatgcgagatccccaggaagcatatcctatctgccatcatttttcaccaaattagagaacacgagcccgatggttaaatccaagaaacaggagatttttcgaaagttgaactctagcggaggaggggatagtgatatggccgcagctcagcccggaactgaaatcttcaacctaccagccgttaccacaagcggctctgtgtcctcacggggacatagctttgctgacccggcttccaatttaggactggaggatataattagaaaagccttaatggggtccttcgacgataaggtggaggatcacggggtggttatgagccagccaatgggggttgtgcctgggactgctaacacaagtgtggtcacatcaggagaaactagaagggaagagggtgatccaagcccgcactccggaggagtttgtaaaccaaaactgataagtaaaagtaatagccgtaaatcaaaatctcccattccaggccaggggtacctggggacagagagacccagcagcgtgagctccgtccattcggaaggagactaccatcgccagacccccggatgggcctgggaggaccgtccaagtagcaccggcagcactcagtttccctataatcctctgacaatgcggatgctgtcttccactccgcctaccccaattgcatgcgcacccagcgctgtgaatcaggcagccccacaccagcagaataggatttgggaaagagaacccgcacccctgctgtcagcccagtatgagactctctctgattcagacgattag

SEQ ID NO: 29512 - DNA, 4821 bp, synthetic construct
  source 1..4821: mol_type = other DNA; note = Synthetic coding sequence
atgctgctgcatctgtgctctgtcaaaaacctgtatcagaatcgcttccttggcttagccgcaatggcatcacccagccgcaattcgcagagtaggcgtcgctgtaaggagcctctgcgctactcatacaaccctgaccaatttcataacatggatttgcgcggtggcccacatgatggagtgaccatcccgcgatccacttcagatacagacctggtgactagcgattctaggtccactttaatggtatcgtcgtcttattacagcatcggccattcacaggacttagtgatccactgggacatcaaagaagaagtcgatgctggcgactggatcggcatgtatttgattgatgaggttctgtccgaaaactttctggactacaaaaatcgcggagtgaacgggtcccaccggggtcagattatttggaaaatcgacgctagctcctatttcgtggaacccgaaacgaagatctgctttaagtactatcatggtgtgtcgggagcccttcgcgctaccacaccaagtgtgacagtcaagaacagcgcggcacctatctttaagtccataggcgctgatgagaccgtccaggggcagggtagccggagattaatcagcttctccctcagcgacttccaggccatgggcttaaagaagggaatgttctttaacccagacccatacctcaagataagcatacaaccgggtaaacactctattttccctgcactgcctcaccacggccaggaacgaaggagcaaaattatcgggaatacagtgaaccccatctggcaggccgagcagttctccttcgtaagcctacctacagacgtccttgaaattgaggtcaaggataaatttgccaagtcaaggcccattataaagcggtttctcggcaaacttagtatgcctgtccagcgtctgcttgagcgacatgccattggagatcgggttgtgtcatatacccttggaaggcggctgcccaccgatcacgtgtccgggcagctgcagtttagattcgagatcacatcatctattcacccggacgatgaagagatctcactgtcaacagaaccagagagcgcgcagatccaggattctccaatgaataacctgatggagtccggcagtggagagccacgaagcgaggctccagagagcagcgagagctggaaacccgaacagctcggcgaaggtagcgtacctgatggtcccggaaatcaatcaatcgagctttccaggccagccgaggaggcagctgtgatcaccgaggccggtgaccaaggtatggtcagcgtaggcccagagggagcaggagagctgctggcccaggtgcagaaggacatccagcctgcaccgagcgccgaagagctggccgaacagctggacctgggggaagaagcatctgccttacttctcgaagatggcgaggccccagcctcaaccaaggaggagcccttagaggaggaggctactacccaaagtcgggctggccgagaagaagaggagaaagagcaggaggaggagggcgatgtgagtactctcgagcaaggtgagggcaggcttcagctccgcgcatcggttaagaggaaatctaggccctgttcactcccagttagtgaattagagaccgtgattgcctcggcctgtggtgatcctgagaccccaagaacgcattatatccgcatccacacacttctccactccatgccatcagctcagggcggaagcgccgctgaggaagaagacggtgctgaggaagagtcaacactgaaggacagttcagagaaggatggtctaagcgaagtagatactgtagcagcagatccatccgcccttgaggaggatcgagaggagcccgaaggagctactccaggaaccgcacaccccggtcatagtggaggtcactttccgagtcttgcaaatggcgctgcgcaggatggcgacactcaccctagtaccggatcagagtccgacagctccccgaggcaggggggtgaccattcctgtgagggctgtgacgcatcttgttgtagtccatcttgttatagttcctcatgctactccacatcttgctactccagcagctgctacagtgccagttgttacagcccctcctgttacaacggcaaccgctttgcatcccacacccgtttctcctccgtggactccgctaagatcagtgagagcacggtctttagtagccaggatgacgaggaagaagagaactccgcttttgaatcagtgcctgacagtatgcagtcgccagagctagaccctgagtcgacgaatggtgctggaccctggcaagatgagcttgccgcaccttccggtcatgtggagagatcacctgagggtttggaaagtcccgtcgctggcccttccaaccgccgagagggcgagtgtcccatacttcataacagccaaccagtgtctcagctaccctccttacgcccagagcatcaccactatcccacgattgacgagcctttgcctcccaactgggaggcgagaatagatagccacggcagggtcttttacgtagaccacgtgaataggacaacaacatggcagaggccaactgccgcagctactcctgacgggatgcggagatcggggtccatccagcaaatggaacagcttaatagacgataccagaatatacagagaaccattgcaacagagcgcagtgaggaagactccggatctcagagttgcgagcaggcccctgcaggcggaggaggcggtgggggaagcgattcagaggccgagagcagccagtcatcccttgacctgcgcagagagggctccttgtccccagtgaacagtcaaaaaattactctactgctccagtcccctgctgtgaagtttattacgaatccagagttctttacggttctccacgccaactattctgcctacagggtctttactagtagtacctgcctcaaacacatgatcttgaaagtgcggagggacgcgagaaactttgagcgttaccagcacaaccgcgatcttgtgaactttatcaacatgttcgcagatactcgccttgaactgcccagagggtgggagatcaagaccgatcagcaggggaagtcctttttcgtggatcacaactcaagagcaacaacctttatcgatcccaggatccccctccagaacggccgtctcccaaatcatctgacgcatcggcagcacctgcaacggcttcgttcgtactcagccggagaagcatcggaggtgagccggaatagaggagcctccctgctggctaggcctgggcactcacttgttgccgcaattcggagtcagcatcagcacgaatcactccctctggcctacaatgacaagatcgtcgccttcctgcgacagccaaatatctttgagatgttacaggagagacagcccagtctggccaggaaccatactctcagagaaaaaatccattacatccgcaccgaaggcaatcacggcctggagaagctgtcctgtgatgcagacctggttatacttctttcactctttgaagaggaaatcatgagttacgtgcccttgcaagcagcttttcacccagggtattccttctcacccagatgctccccatgctcctcaccccagaactcacctggtctccagagggcatccgcccgtgccccttcgccgtatcgccgagatttcgaggctaaactgcgtaacttctatagaaagcttgaggcaaagggatttggccaggggccaggaaaaatcaagctcattatccgtagggatcacctgcttgagggtactttcaatcaggtgatggcctattcccgcaaagagctgcagcgaaataaactctacgtaaccttcgtcggcgaagagggcctcgactactccggaccctctcgtgaattcttctttttgctttcccaggaactgttcaatccctactacggtttgtttgagtactccgccaacgatacttacaccgtgcagatctctcctatgagcgcatttgtcgagaaccacctggaatggtttaggttttctgggaggatcctcggtctggcactcatacatcagtacctattggacgccttcttcactcgacctttttacaaagcactgcttcgactaccctgcgacctcagtgaccttgagtatttggacgaagagttccatcagagcctgcagtggatgaaggacaataacatcacagacatactagacttaacgttcaccgtgaacgaagaagtgttcggccaggtgaccgaacgggagctgaaaagtggcggagctaatacccaagtgaccgaaaagaacaaaaaagagtacatcgaaagaatggtgaagtggcgagtggagcgtggcgtggtccagcagaccgaggccttggtccgtggtttctatgaagtagtggattcccggctcgttagtgtgtttgacgcaagagagctcgaactcgtgatcgctggcacggctgagattgacctgaacgattggaggaacaacaccgagtaccggggtggataccatgacggacacctcgttattaggtggttttgggctgctgtggaacgcttcaacaacgagcagcgactaagactgctccagtttgtcaccggcaccagcagcgtcccctatgagggctttgctgccctcaggggaagcaatgggctgaggcggttctgcatagagaaatggggcaaaattacatccctaccacgcgcacacacatgcttcaatagactggaccttcccccttatccgtcctacagcatgctatacgaaaagttgcttacagcggtcgaggagacatctacattcggccttgagtag

SEQ ID NO: 29513 - DNA, 1209 bp, synthetic construct
  source 1..1209: mol_type = other DNA; note = Synthetic coding sequence
atggcagctctgtgtcggaccgctgagagccaagcagaacttcagtgcacgcagctggatcttgaaaggaaattgaaactaaacgagaacgccattagtcggctacaggctaaccagaagtctgtcttagtgtccgtctccgaggtaaaagccgtggcggagatgcagtttggagaactcctcgctgctgttagaaaggcccaggcaaacgtgatgctgtttctggaggagaaagagcaggccgcacttagtcaggccaatggcatcaaggcacacctggaatataggagcgctgagatggagaaaagcaagcaggaactggagacgatggcggctatttccaatacagtgcagttccttgaggaatattgcaaattcaaaaataccgaagatatcaccttcccatctgtgtacatagggctgaaggacaagttatccggaatccgtaaagtgatcaccgaatccaccgtgcatctgattcagctgttagagaactataagaaaaagctacaggagtttagcaaggaggaggagtacgacattcgcactcaagtgagtgccatcgtccagcgcaagtactggacaagtaagcccgagcctagtacacgagaacagttcctacagtacgtgcacgatataactttcgatcccgacacagcccataaatacctccgactgcaggaggaaaatcgaaaagttaccaatactactccctgggagcacccctaccctgatctgccttcaaggttcctccattggagacaggttctgtcccagcagtcgctctatctgcataggtattactttgaagtggaaatattcggcgcaggcacttatgtaggcctgacgtgtaagggtatagaccagaagggagaggagcgcagcagctgcatcagcggaaacaatttctcttggtcactccaatggaatggaaaggagtttaccgcatggtactccgacatggaaacgcctctgaaagcaggaccgttttggagactcggcgtctacatcgacttccccggaggcatactgtctttttacggtgttgaatacgacagcatgaccctggtacacaagttcgcatgcaagttcagcgaacctgtctacgctgccttctggctttcgaaaaaagaaaatgctatcagaattgtagacttgggcgaggagcccgagaaaccagccccttcactggtgggcacagctccatag

SEQ ID NO: 29514 - DNA, 1677 bp, synthetic construct
  source 1..1677: mol_type = other DNA; note = Synthetic coding sequence
atgcatcgctctgcaccttcacagacaactaagcgttccagatctcccttttccactacgcgcaggtcctgggatgactcagagagttccggcacaaacctcaatatagataatgaagattattcaagatatcctccaagagaatacagggcctccggcagccggcgtggaatggcctacgggcatattgactcctacggagccgacgacagcgaggaagaaggcgcagggccagtcgagaggcccccagtgcgtggcaagacaggcaaatttaaagatgacaaactccttgatcctgttccagccgcaaggtgcagtgcaagccgggcagactttctgcctcagtcttccgtggcctcacaaagcagttctgaagggaagctagctacaaaaggagacagtagcgaacgcgagcgacgggaacaaaatctgcccgctcggcctagtcgtgcccctgttagtatatgcggcggtggcgagaacaccagcaagtctgctgaggaacctgtggtgcggcctaagatcagaaatctggcctcgcccaattgtgtcaagcctaagatattttttgataccgatgacgatgacgatatgccacactccacaagccgttggcgggacacagcaaacgataatgagggacacagtgatggtctggctaggcgcggtagaggcgaatcttccagcggataccccgaacctaaatatccagaagacaaaagagaggcgagaagtgatcaggtgaagcctgaaaaggtgcctaggcggagaaggactatggctgaccctgatttctggactcactcagacgattactataaatactgtgatgaagactctgactccgacaaagaatggattgctgctcttagacggaaatacaggtctcgggagcaaactctgtcatcttctggtgaaagctgggaaaccttgcccggaaaggaggagcgggagccccctcaggctaaggtgtcagcctcgaccggcacatctcccggaccgggagctagcgcaagtgccggagccggagcgggtgctagcgcgggatctaatggctccaattacctagaagaggtccgggagcctagcctgcaggaagaacaggccagtctcgaagaaggtgaaatcccttggctgcaatatcacgagaacgattcatcctctgagggcgataatgattctgggcacgagctcatgcaaccaggagtgtttatgttagatggaaataataatctggaggacgactccagcgtgtccgaagatctggaggtagattggtccctgttcgatggtttcgcggatggcctaggtgttgcagaagcaatttcctatgttgaccctcagtttctgacttacatggcactagaagagcgcctagctcaggctatggagacagcgcttgcccatctggagagcttagcggttgatgttgaagtggccaacccccctgcctctaaggagtccatcgacgcgctgcctgagatcctagtaactgaagatcatggggctgtgggccaggagatgtgctgtcccatttgctgttccgagtacgtaaagggcgaagtcgccacagagttgccctgtcaccactatttccataaaccatgcgtgtcaatttggcttcagaaatccggaacatgtccagtatgtcgatgcatgtttcccccacccttgtag

SEQ ID NO: 29515 - DNA, 3591 bp, synthetic construct
  source 1..3591: mol_type = other DNA; note = Synthetic coding sequence
gtgccgccatgtcccgctgaactgaggtccgtgactaatggccaaagtaatcagccaagcaacgaaggagacgcgatcaaggtatttgtgcgaatcagacctcctgcagagaggtctgggtcagctgatggagagcagaatttatgtctaagtgtgctatcctctacatctcttagactgcattcaaatccagagccgaagacattcacttttgaccacgtggccgacgtggacaccacacaggaatctgtctttgctaccgtagcaaagtcgatcgtcgagagctgtatgtcaggttataatggcacaatttttgcgtacggccagacaggatctgggaaaaccttcacaatgatgggtccgtctgagtcggataacttcagccacaatctgcggggagttattccgagatcttttgagtatttgttcagcctcattgaccgcgagaaagagaaggccggagccggaaagtccttcctttgcaaatgctctttcattgagatctacaatgaacagatatacgacttgctggactctgctagcgccggattgtacctgcgagagcacatcaaaaagggagtctttgtggtgggggctgttgaacaagtggtcacttctgctgctgaagcgtaccaagtcctaagcggtggatggagaaacaggcgagtcgcttctacctcgatgaaccgggaatcatcacggtcgcacgccgtttttacaattactatcgaatctatggagaagtcaaacgaaatcgtgaacatcagaaccagtttgctgaatctggtggacctggcaggatcagagagacagaaggatacgcacgccgaggggatgcgtttaaaggaagccggaaatatcaaccggagtctgtcctgccttgggcaggtgattacagctctggttgacgtgggcaacggaaagcagaggcacgtttgctaccgcgacagtaagttaacatttctgctgagggattcgctgggcggaaacgcaaagactgcgataatcgcaaatgtccatcctgggtcacgctgtttcggtgaaaccctgagtacgttgaactttgcacaaagggctaagctgatcaaaaacaaggctgtggtcaacgaggatactcagggaaatgtgagccagctccaggctgaagtcaagcggctgaaggaacagttagctgagctcgcatcagggcagacccccccagagtccttcctgacacgtgacaagaagaagaccaattatatggagtatttccaggaagccatgctcttcttcaagaaatcagagcaagaaaaaaaaagtctcatcgaaaaagtaacacaactggaagacctgaccctcaagaaagagaaatttattcagtcgaataagatgattgttaaatttagggaggaccagataattcggctggaaaaactgcataaagaatctaggggtgggtttctccccgaagaacaggatagactgttgtccgaactgagaaacgagatccagaccctaagagaacaaatcgagcatcaccctagagttgccaagtatgccatggaaaaccactctctacgggaagagaatagacggctgcggctgctggagcccgttaagcgggcacaggagatggacgcacagactatagcaaaactggagaaagcctttagtgagatctctggaatggagaaaagcgataagaatcagcagggattcagtccgaaggcccaaaaagaaccctgtcttttcgcaaacacagagaaactgaaagcccagttgctgcagattcagacggaattaaataattccaagcaggaatatgaggaatttaaagagctgacacggaaaaggcagttagagctggaatctgaacttcaatccctgcagaaggccaacctgaacttggaaaacctgttggaggctaccaaggcctgcaagcgccaagaggtatcccagctcaacaaaatccatgccgaaacccttaagattataaccactcctacgaaggcataccagctgcattcccgtcctgtccctaaactgagtcccgaaatgggctcgtttggaagcctgtatacacaaaactcaagcatccttgataacgacatcctgaatgagccggtgcctccggaaatgaacgaacaagcgttcgaggccatcagcgaagaactgaggaccgtgcaggaacagatgagtgccttgcaggccaagctggacgaagaagagcacaagaatcttaagttgcaacagcatgtcgacaagttagagcatcacagcacccagatgcaggagctgttctccagcgaacggattgattggaccaaacagcaggaagaacttctttcccagctgaatgtcctggaaaagcaattgcaggaaactcagacgaagaatgacttcctgaagtctgaagtccatgatcttcgagtggtattacatagcgccgataaggagttgagcagtgtcaaattagaatactcatcttttaaaacaaaccaggaaaaagagttcaataagctgtctgagcgtcacatgcatgtgcagttacagcttgataacctgaggctggagaatgagaagctactggagtctaaggcttgtctccaagattcctacgacaacctgcaagaaataatgaagttcgaaatagatcaactgagcaggaacctgcagaacttcaagaaagagaacgagacacttaaaagtgatctgaataacctgatggagcttcttgaagctgagaaggaacggaataacaagctctcactccagttcgaggaagacaaagaaaactctagtaaggaaattcttaaagtgctggaagccgttaggcaagaaaaacaaaaggagactgctaagtgcgagcagcagatggccaaagtccagaaactggaggaatctctcctggctactgaaaaagttatatccagcttggaaaagtctcgggactctgataaaaaagttgtggcagacctgatgaaccagatacaggagcttagaaccagtgtgtgcgagaagacagagacaatagacacattgaaacaggagctgaaagacatcaattgcaagtacaatagcgcactggtcgatagagaggagagcagggtgttgatcaaaaaacaggaggttgatatcctcgacctaaaagaaactctcaggctgcgtatcctgagtgaagatattgagagagatatgctgtgtgaggacctggcacatgcaactgaacagcttaacatgctaactgaagcgtcaaagaagcatagcggcttgctccagtccgcccaacgcactgatcaggagggctctcccgattctgggaccagtgcacaagccaaaccgaaggaacgcggatccaggaccgaagaagagtacaacttcaaaatgcgccaactggagcacgtcatggattccgccgctgaggaccctcagagccccaagacgcctccacacttccagactcaccttgcaaagctgctcgagacacaggaacaggagattgaggacggcagggcgtctaagaccagcctggagcatctcgttacaaaactcaacgaggatagagaggtcaaaaatgccgagatacttagaatgaaagagcagctccggtag

SEQ ID NO: 29516 - DNA, 3264 bp, synthetic construct
  source 1..3264: mol_type = other DNA; note = Synthetic coding sequence
atggacccattcacagaaaaattgttggaaagaacacgcgctcgccgtgaaaatctacagaggaagatggccgagaggcctaccgctgcccctcgtagcatgacccatgctaaacgtgcgagacagccattgagcgaggctagcaatcagcaaccactgagtggaggtgaggaaaagagctgcacaaagcctagcccgagtaagaagaggtgctcggataacaccgaagtagaagtgagcaatctggagaataaacagcctgtggagtccaccagcgctaagtcatgcagccctagcccggtgtcgccacaggtgcagccccaagccgctgatacaatctccgattccgtcgcggtccctgctagcctgctcggaatgcgacgtggccttaactcaaggctggaggccacagcagccagcagcgtcaagactcggatgcaaaaattggccgaacagcgccgacgctgggataacgatgacatgacggatgatatcccagagtcctccctctttagtcccatgcctagcgaagagaaggctgcctctcctccccgtccgctattgagtaatgcgagcgccactcctgtcggcaggagggggcgtctcgcgaatctggccgcaacaatctgttcatgggaggacgatgttaatcatagcttcgctaagcagaactcagttcaggagcagcctggtaccgcctgtctgagcaaattcagctctgcctccggagcctctgcaaggattaattcaagctccgtgaagcaggaggccaccttttgtagccagcgcgacggcgatgcctctctgaacaaggccttgtcctcgagcgcggatgatgcatctctggtgaacgccagcattagtagttctgtgaaggcgacctctccagtgaagtccaccacctcaatcaccgacgccaagtcttgcgaagggcagaatcccgagctgcttcccaagacaccaatttctcccttaaagacaggtgtctcaaagccaatcgttaagagcaccctcagccaaactgtccctagcaaaggggagctgtccagggagatttgtctgcagagccagtccaaggataagagcacaacaccagggggaacaggcattaaacccttcttagagcgctttggagaacgatgccaagaacactcaaaggagtctcccgcaaggtccaccccacacagaacccccataattacacccaacacaaaagctattcaggaacggttatttaaacaggatacctcttctagtacaacccatctggctcagcagcttaagcaagagaggcaaaaagagctggcttgtttgcgtggacggttcgacaaggggaatatctggagtgccgagaaagggggaaactccaagagcaagcagctcgaaaccaagcaggaaacgcactgccagagtacccctcttaagaagcatcagggcgtgagtaaaacccagagcctcccagtgactgagaaggtcaccgaaaatcaaattccggcaaaaaacagttcaactgaacccaaggaagtgatacgggagattgagatgtcagtggatgacgatgacattaacagcagtaaggtcatcaacgacctgttttcagacgtgctagaggaaggagagttggatatggaaaaatctcaggaggagatggaccaggccttagcggaatcatccgaagagcaggaagacgcactgaacatctcgtctatgagtctgctcgccccactcgcgcagaccgttggcgttgtgagccctgagagcctagtgtctacaccccgacttgaattgaaggacacgtcgagatcagacgagtcacccaagcctggtaagtttcagcggaccagggtgccgagagccgagagtggagattctctcgggtctgaagaccgtgacctactctactctattgatgcgtataggagccagcggttcaaagaaacagagagaccaagtatcaaacaggtcatagtccgcaaggaggacgtgacatccaagctagacgaaaagaataatgccttcccttgtcaggtgaatattaagcagaaaatgcaggagctgaacaatgagatcaacatgcaacaaacggttatctaccaggcgagccaggcactgaattgctgcgtggatgaagaacacgggaaaggcagcttagaagaggcggaagctgagaggctgctattgatcgccaccggcaaacgcacactgctgattgatgagctaaataaattgaaaaacgagggtccacagcgaaagaacaaagcttccccacaatccgagtttatgccatctaaggggtccgtgaccctttccgagatccgcctgcctctgaaagcagacttcgtgtgtagcacagttcaaaaacctgatgcagccaattactattacctaatcatcctaaaagctggggcagagaacatggttgctacaccgttggcaagcacctccaacagcctgaacggagacgctctgaccttcaccaccacattcaccctgcaggatgtttctaacgacttcgaaatcaacatcgaagtctactccctggttcaaaagaaagatccatccggattagataagaagaaaaagacgtccaagtcaaaggctattacccctaagcggctgctgaccagcatcaccacaaaatccaacatccattcctctgttatggcttcgccgggtggcctgtccgcagtgagaacgagcaattttgctctggttggttcttatacgttgagcttaagctctgtgggaaatacgaagttcgtgctagacaaagtgccgttcctgtcgtctctggagggacacatctatctgaagatcaagtgtcaggtaaactcaagcgttgaagagagaggcttcctgacaatatttgaggacgtcagcggtttcggagcatggcaccgccgttggtgcgtcctgagcggtaactgtatctcttactggacatacccagatgatgagaaaaggaagaatccaatcggcaggattaacctggccaactgtacatcgagacagatagagccagcgaacagagagttctgtgctagacggaacacgttcgagctcattacagtgcgccctcaaagggaggatgatagagaaacattggtgagccagtgcagggataccctgtgtgtcaccaagaactggctgtctgctgatacaaaagaagagcgagacctgtggatgcagaaactgaaccaggtcctggtggatatccgcctgtggcagcccgatgcgtgctacaagcccataggaaaaccatag

SEQ ID NO: 29517 - DNA, 648 bp, synthetic construct
  source 1..648: mol_type = other DNA; note = Synthetic coding sequence
atggtgttcagacgcttcgtcgaggttggaagagtggcctatgtttcatttggtccccacgccggtaagctagtggccattgtggacgtgatcgaccagaaccgcgcattggtcgacggaccctgcactcaagttagacggcaagcgatgccattcaagtgtatgcagctgaccgacttcatcctgaagttccctcattcagcccatcagaagtacgtaaggcaagcgtggcagaaagccgacattaataccaagtgggctgctacacgatgggccaagaagatcgaagcacgggaacggaaggcgaaaatgaccgactttgatcggttcaaagtcatgaaagcaaagaaaatgagaaataggattatcaagaacgaagtgaagaagcttcagaaagcggctcttctcaaagcatcccccaagaaagcacctggcaccaaagggaccgcggctgccgctgcggctgcagcagctgcgaaggttcccgcaaaaaaaattaccgccgcatccaagaaagcaccagcccaaaaggtgccagctcagaaggcgactggccaaaaggcagcgccagcgcctaaagcacagaaaggacagaaagcacccgctcagaaagcgcctgcacctaaagcctccgggaaaaaggcatag

SEQ ID NO: 29518 - DNA, 2976 bp, synthetic construct
  source 1..2976: mol_type = other DNA; note = Synthetic coding sequence
atggaggaatacgagaagttctgcgaaaagagcctcgctaggattcaagaggcttcactctccacagagagcttccttcccgcacagagcgaatccatcagcctgatccgttttcacggagtggccatcctgagtcctctgttgaatatcgagaaacgaaaagagatgcaacaggagaagcaaaaggctctggacgtggaggcccgtaagcaggtgaacaggaagaaagcgctcttgacaagagtccaagaaatactcgataacgtgcaagtgcgaaaggcgcctaacgcctccgacttcgaccagtgggagatggagacagtatactcaaacagcgaagtcagaaatctgaacgttcctgcaacctttccaaatagtttcccatcacacactgaacactctacagcagccaaactggacaagattgctggaattcttcctctggacaacgaggaccagtgcaaaaccgacggaatagacctggccagagactcggaggggttcaatagccccaagcaatgtgattcctccaacatctcacacgttgagaacgaggccttcccaaaaacatctagtgctactccccaagaaactctcatctctgacggaccttttagcgtaaatgagcagcaggatttgccattgttggctgaagttattccagacccatacgtgatgagcttgcagaacctcatgaaaaagtccaaggagtatattgagagagaacagagtcgacgatccttgcgtggctcaatcaaccggatcgtcaacgaaagccaccttgacaaggaacatgatgccgtggaggtggcagactgtgtcaaggaaaaaggtcagctcaccggaaagcattgtgtttccgtgatccccgataaaccttcattaaataagtcaaacgttctgctgcagggggcatccactcaggcttccagcatgtcaatgccagtcctcgcttcattcagcaaagtcgatatccctattaggactggacaccccaccgtgctggagagtaactctgacttcaaagtgattcccactttcgtgaccgaaaataacgtgattaagtcactgacgggttcctatgccaaactccccagccccgaaccttcaatgtcgccgaagatgcacaggcgccgttcaaggacgagttcggcgtgtcacattcttatcaataatcccataaatgcgtgtgagctgtcccccaagggtaaggaacaggcgatggacttaatcatacaggacactgatgaaaatacgaacgttccggaaattatgccaaagctcccaactgatctggccggagtgtgctctagcaaggtctatgtgggcaaaaatacctcagaggtgaaggaggatgttgttttaggaaaatcaaatcaggtttgccagagttcgggaaatcacttagaaaacaaggtgacgcatggattggtgaccgtagagggccagctgacctctgacgaaagaggcgctcacattatgaactcaacctgcgctgccatgcccaagctgcatgaaccgtacgcctcctcccaatgcatcgccagccctaatttcggcaccgtctcaggcttgaaacccgctagtatgttggagaagaactgtagcctccagaccgaactgaataaaagctatgacgtcaagaacccatccccgctcctgatgcagaaccaaaacaccagacagcagatggacacgcccatggtgtcttgcggcaatgaacaatttctggataattccttcgagaaagtgaagcgtagactggatctggatattgacggtttgcagaaggaaaattgtccctatgtgattacgtctggcatcacagaacaagaaaggcagcacctacccgaaaaacgctaccccaagggctccgggttcgttaacaaaaataagatgctcgggacaagttccaaggaaagcgaggaactgctgaagtctaagatgctggctttcgaggagatgaggaagcgcctggaggaacagcatgcacaacagctgagcctgctaatcgcggagcaggagcgagagcaggaacggctccagaaagaaatcgaggagcaagagaagatgctcaaggaaaagaaagctatgacggcggaagcctctgaactagacataaacaatgccgttgagctggagtggcgtaagatatccgattccagcctcctggaaaccatgttatcacaggctgatagcttgcatacctctaattccaacagctccggctttacaaatagtgccatgcaatattctttcgtgtctgcaaatgaagctcctttttacttgtgggggagctcaacttcaggactgactaaactgtctgttactcgcccatttggcagagctaagacacgctggagccaggtctttagtctcgaaattcaggctaaattcaacaaaattacggccgtcgccaaagggtttctcacaagaagactgatgcagaccgacaaactcaagcagctgaggcagaccgtcaaagacaccatggagtttattcgtagtttccagagcgaggctcctctcaagcgtggaatcgttagtgcccaggacgccagtctgcaggaaagagtgctggcccagctgagagctgcgctctacggcatccacgatatcttttttgtgatggacgctgctgaacgaatgtcaattctccatcacgatagagaggtgcggaaggagaagatgctgcgacagatggacaaaatgaaaagccctcgtgtcgctttgtctgctgccactcaaaaaagcctggacagaaaaaaatacatgaaggccgctgagatgggtatgccgaacaaaaagtttttggttaaacagaatccctccgagacccgagtgctccagccaaaccaaggacagaatgcccctgtccacagactcctgtcccgccaggggtccatctgcaggaagaatccaaaaaaggccgcaaaatgttgcgacaatctccggaggcagcatagcctcggatag

SEQ ID NO: 29519 - DNA, 2976 bp, synthetic construct
  source 1..2976: mol_type = other DNA; note = Synthetic coding sequence
atggaagagtatgaaaaattctgtgaaaagtccctggcccgaattcaggaagcctctctctctacagagagtttcctgcccgctcagtcagaaagcataagtttaattcgatttcacggggtggctatcctttcaccactactgaacatcgagaagaggaaagagatgcagcaggagaagcaaaaggcgttggacgttgaagcaagaaaacaggtcaacagaaagaaggcccttctgacacgggttcaggagatcctggataatgtacaagtgagaaaagcaccgaatgctagtgattttgaccagtgggaaatggagacagtctattcaaatagcgaggttcggaatctgaacgtacctgctacgtttccaaactcctttccctctcacaccgagcactcaactgccgcaaaactggataagatcgccggtattttgccgttggacaatgaggaccagtgcaaaacagacggcatcgacctcgccagggattccgagggcttcaactctcctaagcagtgtgacagttctaacatctcccacgtggagaacgaggcatttccgaagacttccagtgctacgccccaagagacactcatttctgacgggcctttcagcgtcaatgaacagcaggatctcccactactggccgaagtgattcctgacccttatgttatgtcactacagaacctaatgaaaaagtcaaaagaatatatagagagagaacaatcaaggaggtccttgaggggcagcatcaatcgcattgtgaatgaaagtcatctcgataaggagcatgacgcagtcgaggtcgccgattgtgtgaaggagaagggtcaactgacaggtaaacactgtgtctctgtgattcctgacaaaccttctttgaacaaatctaacgtgctgttgcagggcgcttctacacaggctagctccatgagcatgccagtgctcgcctcattctctaaggtcgatatccccatcagaactggccatccaactgtcctggagtctaacagtgacttcaaggtaatccccaccttcgttacagaaaataatgttatcaaatccctcaccgggagttacgccaagttaccctccccagaaccctctatgagccctaaaatgcatagacggcgttcccggacaagttccgcatgtcatatactgataaataacccaatcaatgcctgtgagcttagccctaagggaaaggagcaggctatggatctcatcatccaagataccgacgaaaacaccaacgtacccgagatcatgcccaaactcccaaccgacctagccggtgtttgctcatcaaaagtttatgtcggtaagaatacatccgaagtgaaggaggacgtcgtgcttggtaagagcaaccaagtgtgccagtcgtccggaaaccatctggaaaacaaagtgacgcacggcctggttaccgtcgaaggccagttaacatccgacgagagaggggcacatattatgaactcgacttgtgccgctatgcctaaactccacgagccctatgcatctagccagtgcatagccagccccaattttggaacagtgagtggactcaagcccgctagcatgttggagaaaaattgcagcctgcaaacagagctgaataagagctacgatgttaagaatcccagcccactgctgatgcagaaccagaacacccgtcagcagatggataccccgatggtcagctgcgggaacgagcaatttctggataacagttttgaaaaagtaaaaagacgtctcgacctggacattgacgggcttcaaaaagagaattgtccttacgtcataacaagcggcattacagagcaggagagacaacacttgccagaaaaaagatatcctaaagggtcaggttttgtcaacaagaacaagatgctcggaacaagttctaaggaaagtgaggaattgctaaaaagtaagatgctggctttcgaagaaatgcgcaagcgccttgaagagcagcatgcgcagcaactctcactcttgatagcggagcaggagagagagcaggaacggctgcagaaagagattgaagaacaggagaaaatgttgaaagagaagaaagccatgactgcagaagcctccgagctggatatcaataatgctgtggagcttgagtggaggaagatcagtgactcatccctactggaaaccatgctctcacaggcggattctcttcacacctcaaactcgaacagctccggcttcactaactccgctatgcagtactccttcgtcagtgccaatgaagctccattctacctgtgggggtcgagcacatctggtctaaccaagctcagtgtcacgcggccttttggtagagcaaaaacaaggtggagccaagtgttcagtctggagatccaggccaaattcaataagattactgcggtcgccaagggtttccttaccaggcggttgatgcagacggataaactgaagcaacttcgacagaccgtcaaagatacaatggagtttatacgatctttccagagcgaagccccacttaaacgcggaatagtgagcgctcaggacgcttctctacaggagagggtcctggcccagctgagggcggcactttacggcatccacgacattttcttcgttatggacgcggcagagagaatgagtatcttgcaccatgatagagaggtacggaaggaaaaaatgctacgccagatggataagatgaaaagtcccagagtggctttatctgcagctactcagaagagcctggatcggaagaaatacatgaaggcggctgagatgggaatgcctaacaagaaatttcttgtgaagcagaatccttccgagactcgcgtgcttcagcctaatcagggacagaatgcaccagtccaccgcctcctctccagacagggatctatctgtcgtaagaaccccaaaaaggctgccaaatgttgtgacaacctcaggcgtcagcacagccttggctag

SEQ ID NO: 29520 - DNA, 999 bp, synthetic construct
  source 1..999: mol_type = other DNA; note = Synthetic coding sequence
atggcaactattaaaagcgaactgatcaaaaacttcgcggaagaggaagccatccaccacaataagatctccatcgtcggaaccggatctgttggcgtagcatgcgctatctccatcctgctgaagggcctctcagacgaattagtgctggtagacgtcgatgagggaaaacttaaaggcgagacaatggacctgcagcatggctcccccttcatgaagatgcccaacattgtttccagcaaggattacctcgtgacagcaaactctaaccttgtgatcatcacagcaggtgcaaggcagaaaaaaggcgagactagactcgatttggtgcagcggaatgtcagcatcttcaaactgatgatcccaaacattactcagtattctccacactgcaaattgctgattgttaccaatccagtcgatattctcacatacgtggcgtggaaactttcaggctttccgaagaaccgggttattggcagcggatgtaaccttgacagcgccaggttccggtatttcataggccagcgacttggcatccactcagagagctgtcacggcttaatacttggcgaacacggcgattcgagtgtgcccgtctggtcaggcgtcaatatcgccggagtccccctgaaggacctgaatcctgacatcgggaccgacaaggatccagagcaatgggagaatgtgcataagaaggtgatcagcagtggatacgagatggtgaaaatgaaaggttatacctcctggggaataagtctgtccgtcgcagatcttacagaatcgatactgaagaatttacgcagagtccacccagtcagcactctgagcaaaggtctatacgggattaacgaagatatcttcctgtccgtgccatgtattttgggggaaaatggtatcactgacttaattaaagtcaagttgactctcgaagaggaggcatgtctgcagaaatccgcggagactctgtgggagatccagaaggagctcaaactgtag

SEQ ID NO: 29521 - DNA, 888 bp, synthetic construct
  source 1..888: mol_type = other DNA; note = Synthetic coding sequence
atgatggccaaaaaaccgccaaaaccagctcctagaaggatttttcaggaaaggcttaagattacggcattacccctctacttcgaggggtttctcttgatcaaaagatctggttaccgggaatatgagcactactggaccgagctgaggggaaccactctgttcttttataccgacaagaagagcatcatctacgtcgacaagctagatatcgttgacctgacttgcctcactgagcagaactcaacggagaagaactgtgccaagttcaccttagtcctcccaaaggaagaagtgcaactgaagacagaaaataccgaaagtggtgaggagtggaggggttttattttgaccgtgaccgaactttccgtccctcagaacgtcagcctgctgccaggccaggtcattaagctacatgaggtcctggaacgagaaaagaaacgacggatagagacagaacagagcaccagcgtcgagaaggagaaggagccgacggaggactatgttgatgtgctcaaccccatgcccgcatgtttctataccgttagtcggaaggaagccactgagatgttgcaaaagaacccatctctaggtaacatgatcttgcgccctgggtcggatagcaggaactacagtattacgattagacaagaaatagacatcccaaggattaaacattacaaagtcatgtctgttggccagaattacaccattgagctggagaagcccgtgacccttcctaacttgttctccgtcatcgattactttgtgaaagagactcggggaaatctccggcctttcatctgctctacagacgagaacacaggtcaggaaccttctatggaaggaaggagcgagaagctaaagaagaatccacacatagcctag

SEQ ID NO: 29522 - DNA, 1368 bp, synthetic construct
  source 1..1368: mol_type = other DNA; note = Synthetic coding sequence
atggagggcgtgctctataaatggacaaattacctgagtggctggcagccccgttggtttctcctttgcggtggaatcttaagctattatgatagccccgaagacgcctggaagggctgcaagggaagtatccagatggcggtgtgcgaaatccaggtccattctgtcgacaatactcggatggaccttatcattccgggagagcaatacttttacctcaaggctaggtccgtggcggagcgccagcgctggttggtggctctgggcagcgccaaggcttgcctaaccgattctcgcactcaaaaggaaaaagagttcgcagaaaatacggagaacttgaagaccaagatgtctgaactgcgactctactgcgacttactcgtccagcaggttgataagactaaggaagtgacaaccacaggggtcagcaactccgaggaaggtatagacgtaggcacacttcttaagtctacgtgcaatacctttctcaaaacactggaggaatgcatgcaaatagcaaatgctgcgttcacttctgaactactgtacagaaccccacctggaagtccccaactggctatgctgaagagttctaagatgaagcatccaataatccctattcacaattcccttgagagacagatggaactgagcacttgcgagaacggcagcctgaacatggagattaatggcgaagaggagatattgatgaagaacaagaactccttatatctcaagtcggcggagattgattgcagtatttcctctgaagagaatacagacgacaacattacagtgcagggcgagattaggaaggaggatggaatggaaaatctgaagaatcatgataataaccttactcagtcgggcagcgatagcagctgtagtcccgaatgtctctgggaagagggcaaggaggtaattcctactttttttagcaccatgaacaccagcttctccgacattgagttgctggaagactccggaattcccacagaggcgttcttggcatcttgctatgccgttgtaccagtgctggacaagctcggacccacagtattcgctcctgtcaagatggacctggtaggcaatatcaagaaagtcaaccaaaagtatattacaaataaggaagagtttactacgttacagaaaatcgtgcttcatgaggtcgaagcagatgttgcacaggtccggaattcagctacggaagccctgctctggttgaaaagaggcctgaaattcctgaagggtttcctgaccgaggtgaagaacggcgagaaagatattcaaactgcactcaataacgcatacgggaaaactctgcgccaacatcatgggtgggtcgtgagaggtgtgtttgcagtgtag

SEQ ID NO: 29523 - DNA, 1320 bp, synthetic construct
  source 1..1320: mol_type = other DNA; note = Synthetic coding sequence
atggagggggtgctgtataaatggaccaactacctgtctggctggcagcctcgttggttcctcctgtgcggaggcatcttgtcttattacgattcacctgaggatgcttggaagggctgcaaaggatcaattcagatggcagtgtgcgaaattcaggtccactccgtggacaatacaaggatggatctgatcatcccgggagagcagtatttttacttgaaagctagaagcgtagccgagaggcaaagatggctagtcgccctgggttcagctaaagcttgccttactgatagtaggactcagaaagagaaggaatttgctgagaatactgagaacctgaaaacaaagatgtcggagcttaggctctattgtgacttgctagtccaacaggtggataagacaaaagaagtgactaccactggcgtttctaactctgaagaaggaattgacgtgggcaccctgcttaagagcacctgtaacacctttttgaagacactggaggagtgcatgcagattgccaacgctgccttcacgtccgagttgctctaccggacccccccagggtccccccagttagcaatgctaaaatctagcaagatgaagcacccaatcatcccaatccacaacagtctggagcggcagatggaactcagcacctgcgagaacggcagtctgaacatggagatcaacggcgaggaggaaattttgatgaaaaataaaaatagcctgtacctgaaaagcgcagagattgactgcagtatttcatccgaggaaaatacggatgataacattacagtgcagggagagattaggaaggaagacggtatggaaaaccttaagaaccacgacaacaatctgacgcagagcggctcagatagcagctgcagtcccgaatgtctgtgggaggaagggaaagaggttattcctacctttttctcaactatgaatacatctttctccgacatcgaactgctggaggactccggaattcctaccgaagcttttttggcttcatgctacgccgtcgttccggttctggacaaactggggcctactgtgttcgcccctgtgaaaatggatttagttggcaacatcaagaaggtcaaccagaaatacattacaaataaagaggaattcactaccttgcagaagatcgtattgcatgaggtcgaagcggacgtggctcaggttcgcaactccgcgaccgaggctttgctgtggttgaagagagggttaaaatttctgaaagggtttttgacagaagtgaagaacggcgaaaaagacatccagacagccctctctgttggaatgtgggtttag

SEQ ID NO: 29524 - DNA, 984 bp, synthetic construct
  source 1..984: mol_type = other DNA; note = Synthetic coding sequence
atgtgctccacttcagggtgcgacttggaggagattcccttggacgacgacgacctcaacaccattgagttcaaaatcctggcttattacactcgtcatcacgtctttaagtcaaccccagcactgtttagcccgaaactgttgcgtacaagaagcctcagtcagagaggattggggaactgcagtgcaaatgaatcatggacagaagtgagctggccgtgtcggaactcacaatcctctgagaaagcaattaatctggggaagaaaaagagcagttggaaagcgtttttcggagtcgtggagaaggaagatagtcaaagcacccccgcaaaggtttctgcgcaagggcagcgcacacttgaatatcaagactctcattcacaacagtggagtaggtgtctctccaatgttgagcagtgtttagagcacgaggccgtggaccctaaagtgataagcattgctaacagggtggcggagatagtttatagctggccaccccctcaagccacacaggcaggcggattcaaatccaaggaaatattcgtgaccgagggtttgtcctttcaactgcagggccacgtgccagtggcctcatctagcaagaaagatgaagaggaacaaatcctggcaaagatcgttgagctgctcaaatatagtggcgaccagctggagcgaaagctaaagaaagacaaggctttaatgggtcactttcaggacggcctcagctatagcgtctttaaaacgatcacagaccaggttctgatgggagtggatcccaggggggagtcagaagtaaaggcacagggcttcaaagctgctctggtgattgacgtgaccgctaaactgacggccattgacaatcaccctatgaatcgggtactgggattcggcaccaaatacctcaaggaaaatttctccccatggattcagcaacacggcggatgggagaagatactgggaatcagtcacgaagaggtagattag

SEQ ID NO: 29525 - DNA, 5228 bp, synthetic construct
  source 1..5228: mol_type = other DNA; note = Synthetic coding sequence
atgatggaaggaaacggaactgagaactcttgctccagaactaggggttggctccagcaggacaacgatgccaagccttggctgtggaagttctcaaactgcttttcgcggccagaacaaaccctgccacacagcccgcaaacaaaagagtacatggagaacaaaaaggtggccgtagagcttaaggacgtgccatcgccacttcatgctggaagcaaactgttccccgcagtgccccttcccgacatcaggagcctgcagcagccaaagattcagctgtcaagcgtaccaaaggtcagctgctgcgcgcactgtcccaacgagcccagcacttcccccatgcggtttggcggtgggggaggcggatctgggggaacttcttctttaatccacccgggagcattacttgactcccagtcaacgcggacgattacctgtcaagttgggtcgggattcgcctttcagtccgcatcctctcttcagaatgcaagcgccagaaacaacttagcgggaatcgcgtccgactttccgagtatgtgcttggagtcaaacctttcttcatgtaagcacctgccctgttgcggaaaactgcattttcagtcttgccacggtaacgtccataaactgcaccaatttccttctttgcagggatgtacctcagccggttatttcccatgtagcgacttcacatccggtgctccgggacatttggaggagcacatttctcagtccgaactcaccccccatctgtgcaccaatagcttgcatttaaatgtggtgccccctgtatgcctgaaaggaagcctctattgcgaagactgcctcaacaagcccgcacgcaactctatcatcgacgctgcgaaagtctggccgaacatcccaccaccgaatactcagcccgctccccttgctgtgcctctatgcaacgggtgtggaacgaagggaaccggcaaggaaaccaccttgctcctcgcaacctctttaggcaaggctgccagcaagtttgggagtcctgaggtggcagtggcaggacaggtattagagaacctgccacccatcggcgtcttttgggatatcgagaattgcagcgtgccttccggacgctctgccactgcagttgtgcagaggataagggagaagtttttcaagggacatcgcgaagccgagttcatatgtgtttgcgacatttcaaaagagaataaggaggtgattcaggaacttaataactgccaagtgacggtcgcccacattaatgcgacagccaagaatgctgcagacgacaagctgcgccagtctctgcgcagatttgcaaatacccataccgctcccgcaacggttgtgcttgtctcaactgacgtcaactttgccttagagttgagcgacctgagacatcggcacggcttccacatcatcctggtgcacaaaaaccaggcaagtgaggccctgctccaccatgcaaatgagctgattaggtttgaagaatttattagcgatttgcccccacgactgcctcttaagatgccccagtgccacaccctgctgtacgtctataacctgcccgcaaataaagacggcaaatccgtgtccaaccggctgcgcagattgtctgacaactgcggagggaaggtcctgtcaatcacagggtgttccgctattctgcgcttcattaaccaggattccgcagagcgggctcagaaaagaatggagaacgaagacgtgttcggaaaccgcatcattgtcagtttcaccccaaagaacagagaactttgcgagactaagtccagtaatgccattgcggacaaagttaaatctccaaagaagttgaagaatcccaaattgtgcctgattaaggatgcctctgaacagtcttcaagtgccaaggccacaccagggaaagggagtcaggctaattccggatcagccaccaagaacacaaacgtcaagagcctgcaagaactttgccgaatggagtctaagaccggacaccggaattcggagcaccagcagggacatttaaggttggtggtgccaacgcatggcaactcttcggcagctgtctctaccccaaagaatagcggcgtcgcagagcccgtgtacaagacatctcagaagaaagaaaacctaagcgccagatccgtcactagttctcccgtggagaagaaggacaaggaggaaacagtgttccaggtatcatacccgtccgccttcagcaaacttgtggcgtctcggcaagtttctcctttactcgcgtcgcagtcatggtcttcaaggtccatgagtcccaaccttctgaatcgcgcaagccctcttgctttcaatatcgcaaactcctcttctgaagctgactgccctgacccgttcgctaatggtgcggatgtgcaagttagtaatattgattatcgcctatctcggaaggagttgcagcagctgctgcaggaggcgtttgccaggcatgggaaggtgaaaagtgtggagctgagccctcacacagactatcaattaaaggcagtggtgcagatggaaaacttgcaggacgcgattggcgctgtgaactcccttcaccgctataagatcggatcaaaaaagattctcgtatcacttgcaacaggagccgcaagtaaatccctgagtctcctgtcggccgaaacaatgagtgtactccaggacgctcctgcctgctgcctgcccctcttcaagttcaccgatatttacgagaaaaagttcggccacaaactgaatgtgagtgatttgtacaaactgaccgacacagtggccattcgtgagcagggaaatggcagactcgtgtgcctgcttccaagtagtcaagcacggcagtcacctctcggctctagccagtcacacgacggtagctctacaaactgttcccccataatctttgaggaactggagtatcacgagccagtctgccgccaacattgctcaaacaaggatttctctgagcacgagttcgaccccgactcatacaaaatcccttttgtgattctttcacttaaaactttcgctccccaggtgcattctctgttgcagactcacgaggggacggtgcccctgctgtcgttcccagattgctatatcgcagagttcggagatctggaggtggttcaagagaaccaggggggtgtgccacttgagcatttcatcacctgtgtacccggagtcaatatcgccacagcccagaacggaatcaaagtggtgaagtggatccacaacaagcctccacctcctaataccgacccatggctccttagaagcaaatccccagtggggaatcctcagctgattcagtttagtagggaggtaatcgacctgctcaaatcgcagccatcttgtgtgattccaatcagtcatttcatcccttcctatcaccaccatttcgctaagcaatgcagagtcagcgactacggttatagtaaactgatcgagttactggaagcagtgcctcacgtgctccagattttgggcatgggatccaaaagactactgactctcacccatagggcccaggttaaacgctttacccaggacctgctcaaactgctgaagagtcaggcaagtaagcaggtgattgtccgtgagtttagccaggcttaccactggtgcttttctaaagactgggacgtgaccgagtatggagtgtgtgagttaatcgatattgtgtccgaaattcccgacacaaccatctgcctctctcagcaagataatgagatggtgatctgcattcccaaacgtgagcgcacccaggatgagattgaaaggacgaagcagttctcaaaggatgtcgttgacctgttaagacatcagccacactttcgtatgccatttaacaagtttatcccttcttaccaccaccatttcggtagacagtgtaaactagcttactatgggttcacaaaactgttggagttatttgaggctatccccgacacgctccaggtcctggagtgcggcgaagagaagatactcacgttgacagaagtggaaagatttaaggctctcgccgcacaattcgtgaagttgttacgcagccagaaggataattgcctgatgatgactgatttgctgacggagtatgctaagacttttggctatacgtttcgcctgcaagattatgacgtgagcagcatctcagcgttgacacagaaactgtgccacgttgtgaaggtagcagacattgaaagcggcaggcagattcagcttatcaaccggaagagccttagatcactgactgcccagctcctagtgctgttaatgagttgggaaggtaccacccacctcagcgtggaggagctgaaacgacactacgagtcaacccataatactcccctgaacccgtgtgagtacggatttatgactctgacagaacttctcaaaagcctgccttacctggtagaagtgttcacaaatgacaagatggaggagtgcgtaaaattgacaagcctttatcttttcgcaaaaaacgtgcgatcactactccacacataccattaccaacagatctttctccatgagttttctatggcctatactaaatacgtgggtgaaaccctgcagcctaagacctacggccacagttctgtggaagaattgctgggtgctattcctcaggtggtctggattaaggggcatggtcataaaaggatcgtagtgctgaagaacgatatgaaatcaaggctgtccagcctgtcattatccccggctaatcacgagaaccagcctagtgaaggggagcgcattctggaggtacccgaatcgcataccgcctctgagcttaagctcggcgcagatgggtcagggccttctcatacggagcaggagttgctaaggctgaccgacgattcacccgtggatctcctctgcgcgccagtgccaagctgtctgcccagtccacaactccgcccagaccccgtcatactgcagagtgctgacttgattcagtttgaggagagacctcaggagcctagtgagatcatgattttaaatcaagaagagaagatggaaatccccataccaggaaaatcaaaaaccctcacaagcgatagctcttcttcctgcatctcagccgctgtgccggtgcctccatgtcccagctctgaaacatcggagagtctgctgtctaaggaccctgtcgagtctccagccaagaagcagccaaaaaatcgagtaaaactggccgctaacttttcactcgcacctataaccaaactata

SEQ ID NO: 29526 - DNA, 831 bp, synthetic construct
  source 1..831: mol_type = other DNA; note = Synthetic coding sequence
atgtgcagcacatctggatgcgacctggaggagatcccccttgacgatgacgatctgaacaccatcgaattcaagattttagcctactacacccgacatcatgtcttcaagtcgacccccgctctctttagtccaaaacttctgcggacaagatcactgagccagaggggcctcggcaactgtagcgcgaatgagtcttggactgaggtaagctggccttgcagaaactcacaaagcagcgaaaaagctataaaccttgggaaaaaaaaaagctcttggaaggccttcttcggggttgtagaaaaggaggacagccagtccaccccggcaaaggtgtctgcccaaggacagaggaccctggagtatcaagactctcactctcaacagtggtcacgatgcctttcaaacgtcgaacagtgtctggagcacgaagccgtcgacccaaaggttatcagcatagctaacagagtcgcagagatcgtgtacagctggccacccccacaagcaactcaggctggagggtttaaatccaaggagattttcgtcacggagggtctgagcttccagctccagggtcatgtgccagtggcatcatcttccaaaaaggacgaagaggaacaaatccttgctaagatagtggaacttcttaagtattccggggaccagttggaacggaaggagaaggagtgggaagaatccgccaagaccaaaatcaaaatggccctcctttggaggtctagtggtgggggtcctagggttttgagcatccccgaggcttttatgaagaattcattcacactcactccaccaggcttttccgaacataactag

SEQ ID NO: 29527 - DNA, 552 bp, synthetic construct
  source 1..552: mol_type = other DNA; note = Synthetic coding sequence
atggcctctaacaagacaacattacaaaaaatggggaagaagcaaaatggaaaatctaaaaaggtggaagaagctgaaccggaggagtttgtcgtagaaaaagtgctggataggcgggtcgtgaacggcaaagtcgaatacttcctgaaatggaaaggctttactgatgccgataatacctgggagcccgaagaaaatcttgattgtccagagcttatcgaagcctttctgaatagtcagaaggcgggtaaggagaaggatggcaccaagcgtaaaagtctttcagatagcgagtcagatgatagcaagtctaaaaaaaagcgcgatgcggcagacaagccaagaggttttgcacgcggactggaccccgaacggattataggcgctaccgacagctccggggaactaatgttcctgatgaagtggaaagattcagatgaagctgatctggtgcttgcaaaggaagccaatatgaagtgtccgcagattgttatcgccttctatgaagagcggctcacctggcacagctgccctgaagacgaagcccagtag

SEQ ID NO: 29528 - DNA, 960 bp, synthetic construct
  source 1..960: mol_type = other DNA; note = Synthetic coding sequence
atgctcaggtgtgggcagatgatattcgctcaggccttggtctgccgccatctcggacgcgactggcgatggactcagcgcaagaggcagcctgattcttacttttcagtgctgaacgcatttatcgatcggaaggattcctattactccatacaccagatcgcacagatgggtgtgggagaaggtaagtcaatcggacagtggtatggtccaaataccgtggcccaggtattgaagaagttggctgtttttgacacctggtctagcctggctgttcatatcgctatggacaacaccgtggtgatggaggaaattcgtagactgtgcaggacatcagtgccttgtgccggagcaactgcttttcctgctgattcggaccgtcactgcaatggtttccctgccggtgcggaagtgacaaacagaccaagtccatggcgaccgctggtgctgctaatcccacttcggcttggccttacagacattaatgaggcgtatgtggaaacccttaaacactgctttatgatgcctcagagcttgggagtgataggaggcaagcctaactccgcgcattatttcatcggttatgtaggcgaggagctgatctatcttgacccccacaccactcagccagctgtcgagcctacagatgggtgtttcatccctgatgagtcttttcactgccaacacccaccttgtagaatgtcaatcgccgagcttgacccaagcattgccgtcggttttttctgcaaaaccgaagatgacttcaatgattggtgtcagcaggtcaaaaagttaagtttactggggggagctctccccatgtttgagctagtcgaactgcaacctagtcatctggcttgccctgacgtattgaatttaagtctcgactcgagcgatgtggaacggctcgagagattcttcgactccgaagatgaagattttgaaatcctcagcctttag

SEQ ID NO: 29529 - DNA, 564 bp, synthetic construct
  source 1..564: mol_type = other DNA; note = Synthetic coding sequence
atgaacggacgcgcagacttcagagaacctaatgcagaagtgccacgtcccattcctcacatcggcccagactacatcccaaccgaggaggaacggagagttttcgctgagtgcaatgatgagtccttctggtttcgttctgttcctcttgctgcgacatctatgctgattacccaaggactgatttcaaaggggatcctttcaagtcatcccaagtacgggtctatccctaaattgatacttgcgtgtattatgggctattttgcaggcaagctctcatacgttaaaacttgccaagagaaattcaaaaaattagagaactctccattaggcgaggcattacgctcaggacaggcacggcgttcctcaccgccaggccattattatcagaaatctaagtacgattcatccgtaagcggacagagctcctttgtgacctcgcctgctgccgataatatagagatgcttcctcactatgaacctattccattttcaagctcgatgaacgagtctgcccctacaggtatcacagatcatatcgtacagggacgaaatttcagttag

SEQ ID NO: 29530 - DNA, 270 bp, synthetic construct
  source 1..270: mol_type = other DNA; note = Synthetic coding sequence
atgtcagaacaaggggacctcaaccaggccattgctgaggaggggggaacggaacaggagaccgcaacccccgagaatggaatcgtcaaatccgagagcttagacgaggaagaaaaactggaactccagcgtcggttggaagcccagaaccaggaaaggagaaagagtaagagcggcgctggtaaaggcaagttgactcgttctctggccgtgtgcgaggagtcaagcgcaaggccgggaggtgaaagcctccaggatcaaaccttatag

SEQ ID NO: 29531 - DNA, 270 bp, synthetic construct
  source 1..270: mol_type = other DNA; note = Synthetic coding sequence
atgagcgagcagggggacttaaatcaggctatcgccgaagagggagggacagagcaggagactgccacacctgaaaacggtattgtgaaatccgaatccctagacgaggaggaaaagctagagctgcagagaaggctggaggctcagaatcaggagagaaggaagtccaagtccggagccggaaagggaaaactgactcgctcattggctgtctgtgaggagtcctccgcgaggcccggtggagagagtctacaagatcagacgctctag

SEQ ID NO: 29532 - DNA, 1473 bp, synthetic construct
  source 1..1473: mol_type = other DNA; note = Synthetic coding sequence
atggaggattccgccagcgccagcttaagtagtgcagctgctactggcaccagtacgagcactccagctgccccaactgcaagaaaacagctggataaagagcaagtgcggaaggccgttgatgccctgctgacccactgcaaatcccgaaagaataactacggcctcttgctgaacgagaatgaatctctgttcctgatggtggtgctgtggaagataccgtccaaagagctgcgcgtgcggcttactcttccacactccatccgatccgattccgaagacatctgtctgttcacaaaagacgagcccaactccacccccgaaaagacagagcaattctatcgcaagctactgaacaaacatggaattaaaaccgtttcgcaaatcatctccctccagactttgaaaaaggagtataagagctacgaggcgaagctgcgtctgctgagctcctttgatttctttctgacggacgccaggattcgtagacttctaccgtcgctgattgggaggcacttctatcagaggaaaaaggtgcccgtctctgtgaacctgcttagcaagaacctgtccagggaaattaacgactgcatcggcggtactgtgctgaatatctccaagtcggggagttgctctgcaattagaatcggacatgtgggtatgcagatcgaacacattattgaaaacatcgtggctgtgactaaaggcctctccgagaaacttcccgagaaatgggagagcgtcaaactgctgttcgtcaagacagagaagtcagccgcactcccaattttctctagttttgtgtctaactgggatgaagccacaaagcggagcctcctgaacaagaaaaaaaaggaggctcgtcgtaagcgacgtgagcggaattttgagaaacagaaggaacggaaaaagaaaagacagcaagcaagaaagactgcctccgttctttcaaaagacgatgtggctccggaatctggcgacactaccgtgaaaaagcctgagtcaaaaaaggagcagacccccgagcacggaaaaaaaaaaagagggagaggcaaggcacaagtgaaggctaccaacgaatctgaagatgaaattccgcagctggttcccatcgggaagaagactccggctaatgagaaggttgagatccagaagcatgcaaccggcaaaaagtcaccagcgaaatcccccaatccaagtacccctaggggaaaaaagcggaaagcgctgccagcatctgaaactcccaaggctgcggaatctgaaactccaggcaaatcacccgagaaaaagcctaaaattaaggaggaggcagtgaaggagaaatccccttctctgggcaaaaaggatgctaggcagacaccgaagaagccagaggctaaattctttacaaccccctcgaagtctgttaggaaggcatcccacacccccaaaaagtggccaaagaaacctaaagtcccacaatccacatag

SEQ ID NO: 29533 - DNA, 495 bp, synthetic construct
  source 1..495: mol_type = other DNA; note = Synthetic coding sequence
atggccgaacccgcttcagttgctgcggagagtctggctggtagcagagcccgagcagctcggacagtgctggggcaggtggtgctgcctggagaagaactgcttctgccagaacaagaggacgctgagggccctggcggagcagtagagagacccctctcactcaatgctcgcgcttgttccagggtgcgggtggtgtgtggccctggtttacggagatgtggagaccggctgcttgtgaccaagtgcggccgtttacgccataaggaacccggtagcggaagcggcggaggtgtgtactgggtcgacagccaacagaagcgatatgtgcctgtgaagggagaccacgtcatcgggatcgtcaccgccaaatcaggggatattttcaaggttgatgtaggcggatctgaacccgcttctcttagctacctgtccttcgaaggtgcaacaaagcgaaaccgtcccaacgtccaagccattagctcgcgtttgtag

SEQ ID NO: 29534 - DNA, 2508 bp, synthetic construct
  source 1..2508: mol_type = other DNA; note = Synthetic coding sequence
atgacttgtaataagcatgggtgtagacaggcctttcacgtcacatgcgcccagttcgctggcctcctctgcgaagaggaaggtaacggcgcagataacgtgcagtactgcggatactgcaagtatcacttctctaaattgaagaaatccaagcggggtagcaacagatcatatgaccagtcactttcggatagcagttcccattcccaagacaagcatcatgagaaagagaagaagaagtacaaggagaaggataaacataagcagaagcataaaaagcagcctgagccgtccccggcactcgtaccgagcttgacagtgaccactgaaaaaacttatacgtccacaagtaataattccatatctggtagcctgaaacggctagaagatacaacagctaggtttactaacgcgaatttccaggaggtgagcgcacatacttctagtgggaaggatgtgtcagagactaggggcagtgaaggaaaaggaaaaaaatcatctgcgcacagctctggacagcgtgggagaaagccgggtggcggtaggaaccccggaacaactgtgagcgctgctagtcccttcccacagggatctttcagcggcacccccggatcagtaaagagctcttcaggaagttcggtgcagtcaccgcaagatttcctgtcgtttacagacagcgacttgcgaaacgatagctattcacattcccagcagtcttcggcaacaaaggacgtacacaagggagagtctgggtcacaggaggggggagtcaactccttctcaacccttatcggcctgcccagtacctctgccgtgactagtcagcccaagtcattcgagaatagtcccggtgaccttggcaactcttctctccctaccgctgggtacaagcgggcacagacctcagggattgaagaagagaccgtcaaggaaaaaaagaggaaggggaacaaacagagcaaacacggcccagggaggccgaaaggcaacaagaatcaggaaaatgtcagccacttatccgtctcctcagcgagtccaaccagtagtgtggcatcggccgctggcagcataacatcctcttcccttcaaaaatctcctacgctgctccggaacggtagcctgcagtcgctgtctgtggggtccagtccagtcggttccgaaatttctatgcagtatagacacgatggcgcatgcccaacgactagcatctacaattccaatgacgtggccgtctcgttccccaacgtcgtatcaggcagcggctcatccactcccgtctcgtcctctcacttgcctcagcaaagttccggccaccttcagcaggtgggagcgctgagtccgagcgcagtgtccagcgcggcaccagccgtcgctaccacgcaagctaacaccctgagtggctcatctttatctcaagcccctagccatatgtacggaaaccgctccaactcttccatggctgcactaatcgcacagagtgagaataatcagacagatcaggatctgggcgataacagccgaaacctggtcggcaggggcagcagcccaaggggatcgctgtcccctcgatcgcccgtcagttccctgcaaattcgatatgatcagccgggaaacagttctctggagaacctgccccctgttgccgctagcatcgaacagctgcttgaacggcagtggtctgagggccaacagttcctcttagagcagggaacaccaagcgatatccttggcatgttaaaaagcctgcaccagctgcaggttgagaaccgccgactagaggagcagattaaaaacctgacagctaaaaaagaaaggctacagctgctgaacgcccagttgagtgtgccttttccaacgatcacggccaacccatcaccttctcaccagatacatacattttctgctcagactgctccaacaacagattcattaaactctagtaaatctccgcacattggcaactctttcctccctgataacagtctgcctgttctaaaccaagaccttacaagtagcggccagtcgaccagtagcagttcagccctgagcacaccccctccggcaggccagtctcccgctcagcaaggcagcggggtctccggagtacagcaggtgaatggggtcacggttggagccctggcgagtgggatgcagcctgtgacctcaacaatacctgccgtgagcgccgttggaggtattatcggggctctgcccggaaaccagttggccataaacggtattgttggagcactgaatggcgtcatgcagactccggtcaccatgagccagaaccctacccccttgacccatacaaccgtcccacctaacgcaacacaccctatgcccgcaaccctgacgaacagtgcatctgggctgggtctgctttcagaccagcaaagacagatccttatccaccaacagcagttccagcagctcctaaactcccaacaactgacaccaaatatggtgaaagaattcagcgcccagattattgcttggcgcccatag

SEQ ID NO: 29535 - DNA, 1620 bp, synthetic construct
  source 1..1620: mol_type = other DNA; note = Synthetic coding sequence
atggctacttcggccccactgcggtctcttgaagaggaagtaacctgcagtatttgtttggactatctcagagacccagtaaccatcgactgtggccacgtattttgccgcagttgcaccacagacgtccggcctatctccgggagcaggccggtttgtccactgtgtaagaagccgtttaagaaggagaatataaggcctgtttggcagttggcgagcttggtggagaatattgagcgtctcaaagtagacaagggaagacaaccaggtgaggtgactcgggaacagcaagacgccaagctgtgcgaacgtcacagagaaaaattacactattattgtgaagatgacgggaagctgctttgcgtgatgtgtagggagagtagggagcataggccccatacagccgtgctgatggagaaagctgcccaaccccacagggagaagatcctgaatcatctaagtactctgcggagagatcgggataaaatacagggctttcaggcgaagggcgaggcagatattttggcggctctcaagaagttgcaagaccagcggcaatatatcgtcgcagagtttgagcagggacaccagtttctccgtgagagagaggagcacctcctcgagcaattggccaagctagagcaggaactaaccgaagggagagaaaaattcaaatcacggggtgttggtgagctggccagattggccctcgtaatctccgagctagagggtaaggcacagcagcccgctgctgaactcatgcaagacacaagggatttcttgaatagatacccacgaaaaaaattctgggtgggcaagcctatagctcgcgtggtaaagaaaaaaacgggcgagttcagtgataagttacttagcctgcaaaggggtctgagagagttccaggggaagttattgagagacctcgaatacaaaacggtctccgtgaccctcgatccccagtccgcctcaggctacctgcaactcagcgaggattggaaatgcgttacctataccagcctgtataagagtgcttacctccatccacaacaatttgattgtgaaccaggagtgctggggagtaaggggtttacatggggaaaggtctactgggaggtagaggtggaacgggaggggtggagtgaagacgaggaagaaggcgatgaggaggaagagggtgaggaagaggaggaggaagaagaggcagggtatggcgatggctatgacgactgggagaccgatgaggacgaagaatcgttgggcgacgaagaagaagaggaggaggaggaggaggaggaggttctcgagtcatgcatggtgggcgtggcacgcgattctgttaagagaaaaggagatctatcccttcggcctgaagacggcgtgtgggccctcagactgtcctccagcggcatttgggctaacaccagtcccgaggctgagctatttccagccctgcgacccaggagggtaggtattgcacttgactacgagggcggtaccgtgacttttactaacgcagagtcacaggaacttatttacactttcacagccacgtttactaggaggctggtgcccttcctgtggctgaagtggccgggaacgcgcctgctgctgaggccttag

SEQ ID NO: 29536 - DNA, 444 bp, synthetic construct
  source 1..444: mol_type = other DNA; note = Synthetic coding sequence
atgtcatccgagccacccccacctcctcagccccctactcatcaggcatctgttggcctcttggacacacctagatcccgggagcgttctccatcccccttgagggggaacgtcgtccccagtccgctgcccacaagaaggaccagaacattcagtgctacggttcgcgcaagccaggggcctgtgtacaagggagtatgcaagtgtttctgcagaagtaagggccatgggttcatcactcctgcggacggcggtccagatatctttcttcatatatcagacgtggagggcgaatatgttccagtggagggcgacgaggtcacatacaagatgtgtagcatccccccaaaaaatgaaaagttgcaagcagtcgaggtggttatcactcacctggcccctggcactaaacatgaaacctggtcagggcatgtgatctcctcttag

SEQ ID NO: 29537 - DNA, 951 bp, synthetic construct
  source 1..951: mol_type = other DNA; note = Synthetic coding sequence
atgaccccctctgagggggcacgcgctggcaccggccgtgaacttgagatgctggattcacttctggcgttggggggactagttctactgagagactctgtggagtgggagggccgaagcctgctgaaagccctggtaaaaaagagcgccctctgtggtgagcaggtgcatatcttaggttgcgaagtgagtgaggaagagtttagggagggctttgattccgatataaacaacaggctggtttaccacgattttttcagggacccgctaaactggagtaagacagaagaggcatttcccggtgggcctttgggcgctttgagggccatgtgtaaaagaaccgaccctgttcctgtgacaatagccctggattccttgagttggctgttactgcggctcccctgcacaacattatgtcaggtcctgcatgcagtaagccaccaggactcatgtcctggagactccagcagcgtaggtaaagttagtgtcctgggactcctgcatgaagagctgcatgggcctgggcctgtcggcgcactgagttcattagcacagacagaggtaactctcgggggtaccatggggcaggcctccgctcatatactgtgcagacgcccacgtcagcgcccaaccgaccagactcagtggttttctatacttcctgacttttctctggacctgcaggaggggccttccgttgaaagccagccctattccgatccccacatcccgcctgtagaccccaccacccacctgaccttcaatctccacctgagcaagaaggaacgcgaggcgcgagactccttaattctaccttttcagttttcaagcgaaaagcagcaggctcttctgaggcccagacccggtcaggccaccagtcacatcttttatgagcccgacgcatatgacgatcttgaccaggaggaccctgacgatgatcttgatatctag

SEQ ID NO: 29538 - DNA, 951 bp, synthetic construct
  source 1..951: mol_type = other DNA; note = Synthetic coding sequence
atgacgccgtccgagggggcacgggctggcacaggcagagaattagagatgctcgattctctgctggcactgggaggactggtcctgctgagagatagcgtggaatgggagggtcggtctctgttgaaggccctcgtcaaaaaatccgccctgtgtggggagcaagttcacattcttgggtgcgaagtctcagaggaagagtttcgggaaggttttgactcagacataaacaacagactcgtttaccacgatttttttcgcgatccactgaactggagtaagaccgaggaggcttttccaggcggtccgctgggtgcgcttcgggcaatgtgtaaacgtacagaccctgtgcctgtgaccattgcactcgacagtttgagttggttactccttagactgccctgtaccactctctgccaggtgttacacgctgtgtcccaccaggactcatgccccggagacagttccagtgtcggcaaagtatctgtgctaggactgctacacgaggaactccatggacctggccctgtgggagccctgtctagtttagcacagaccgaggtgaccctgggaggaaccatgggacaggcgtctgcgcacatcctgtgcagaaggcccagacagagacccactgatcaaacccaatggttttcaatcctgccagacttctcgctggacctgcaggagggccctagcgtggagtcacagccctattccgacccacatatcccaccagtggatcccactacccatttaacgtttaatcttcatctgtctaaaaaagagagagaagcgcgagacagcctgatccttcctttccagttcagcagtgaaaaacagcaggctctgctgcggcctcgaccgggtcaggcaaccagtcacatattttacgaaccggacgcctacgacgatctggaccaggaagaccctgatgacgatctcgacatttag

SEQ ID NO: 29539 - DNA, 810 bp, synthetic construct
  source 1..810: mol_type = other DNA; note = Synthetic coding sequence
atgaatcaagaggacctggacccggatagcacaacggatgtcggcgacgtcaccaacacagaagaggaactcataagagagtgcgaagagatgtggaaagacatggaagagtgccagaacaaactgtcactgatcggcaccgaaacactcacagacagtaacgcccagttatccctactcatcatgcaggtcaagtgcttgacagctgaactgtcccagtggcagaaaaaaacacccgaaacaattccgttaaccgaagatgtgctcattactctggggaaagaggagtttcagaaactccgtcaagacctagaaatggtccttagtactaaagaatccaagaatgagaagctaaaggaagatctggaacgggagcaacgctggcttgatgagcaacagcagatcatggagtctctcaacgtgttacatagtgagttaaagaataaggtcgaaacattctctgaatctaggatttttaatgaactcaagacaaaaatgcttaacatcaaggaatacaaagaaaagctcctgtccacattgggagagttcctcgaggaccattttcctttgccagatcgctccgtcaaaaagaagaagaagaacatccaggaatcatcagtaaatctgatcaccttgcatgaaatgctcgaaattttaatcaatcgattgttcgacgtccctcatgatccctatgtgaagatcagcgactctttctggcccccttatgtggagctgctcctgcggaatggaatagccttgaggcaccctgaagatccaacaagaatccggttagaagcattccaccaatag

SEQ ID NO: 29540 - DNA, 1173 bp, synthetic construct
  source 1..1173: mol_type = other DNA; note = Synthetic coding sequence
atggccactggggacctgaagaggtctttgaggaacttagagcaggtactccggctcttgaactacccagaggaggtcgattgtgttggattgatcaagggcgacccagctgcttctctgcccattatttcttattcgtttacctcttattctccctatgttacggagctgatcatggaatctaacgtcgagctcatcgccaagaatgacctcaggttcattgatgctgtttacaaattgctacgagatcagttcaactataaacccatcttaactaaaaagcagttcatccagtgcggatttgccgaatggaagattcaaattgtgtgcgacatacttaactgcgttatgaagaagcataaggagttgagctcattgcaaaagattccctcacagcaaagaaagaagatttcgtctggaaaaagtgaacccccattaggaaatgaaaagatctctgcagaggctgtaggggtggatatctcgggccgtttcatgacaagcgggaagaaaaaagccgtggtgatcagacatttgtacaacgaggataacgtcgacatttcagaggatactctgagccctataaccgatgtgaacgaggctgtggatgtctctgacctgaacgcaacagagattaagatgcctgaagtgaaggtgcccgaaattaaggctgagcagcaggacgtgaacgtgaatcctgagattacggcactccaaacaatgttagccgaatgccaggagaatctgaagaagctaacaagtatagaaaagcgtcttgactgcttggagcagaaaatgaaagggaaagtgatggtagatgaaaacacatggaccaacctcttgtcaagagtgacattgctggagacagaaatgcttctgagcaaaaagaacgacgagtttattgagttcaatgaagtgagcgaggactatgcctcttgctccgatatggacctactcaatccacatcgtaagtcagaagtagagcgccctgcctcgatccctctgagctccggatacagtacagcatcctcagactccacaccacgggcatcaaccgtgaattactgcgggctgaacgaaatcagcgaagagacaaccattcaaaaaatggagcgcatgaaaaagatgttcgaagagaccgccgaactgctgaagtgcccgaaccattacctttag

SEQ ID NO: 29541 - DNA, 381 bp, synthetic construct
  source 1..381: mol_type = other DNA; note = Synthetic coding sequence
atgcctttcttcgggaataccttctcaccaaaaaaaacacctccacgaaaatcggcctctttgtctaacttgcattctctggaccggagcacacgggaggtcgagctgggcctggagtatggttcacccactatgaatttggctggccagtcattgaaatttgaaaatgggcagtggatcgctgaaaccggggtctcagggggtgtggataggcgcgaggtgcagcgcctgcggcgtagaaaccagcagctggaagaggagaataacctactccggctgaaagtggacattctcctggacatgctcagcgaaagtaccgctgagtcccatttgatggagaaggaattagacgaactgcgtatcagcagaaagcgtaaatag

SEQ ID NO: 29542 - DNA, 711 bp, synthetic construct
  source 1..711: mol_type = other DNA; note = Synthetic coding sequence
atgcaagtgcaggacgacggggtgaacttaattcccttcgcaaagtgctcccgcgtggtgagcaggtctccaccgccacgcctgcctagccagagtctgcggcctatgcctcagcgttacggtgacgttttctggaaaaatctgaaccagcgaccaacacccacatggttagaagaacaacacataccacccatgctcagagcaactggttgttctcagcttggcctgtatcctcctgagcagctgcccccacctgagatgttatggaggcgcaaaaagagaaggccttgtctagaggggatgcagcagcagggcttgggcggagttcccgcacgtgtgcgagcagtgacataccaccttgaagacctaagacgtcgacagtccatcatcaacgaacttaagaaagcccagtggggatcatctggcgcagctagtgagccggtggtgctcggagaggaaggttgcggtttccctagtacaaacgagtaccctgatttggaggaggaacgggcaacgtatccacaagaggaggatcgcttcctgacacccggaagagcccagctgctctggtccccctggagccccctcgaccaagaggaagcttgcgctagtagacagctccattcgctggcctccttttccacggtgaccgctcgcagaaatcctttacacaacccatgggggatggagctggctgccagtgaagaatag

SEQ ID NO: 29543 - DNA, 1680 bp, synthetic construct
  source 1..1680: mol_type = other DNA; note = Synthetic coding sequence
atgaatcccctatttgggcctaacctgtttttgctgcagcaggaacaacagggcctcgctggcccactgggagattcccttggcggagaccatttcgcaggcggtggggacctacctcccgctcccctgagccctgcgggaccagccgcatattcaccacctgggcctggaccagcaccacctgccgctatggccctgagaaatgaccttggatctaacattaacgtcttgaagacactgaacctccggttcagatgtttcctggcaaaagtgcacgagcttgagaggcgaaaccgcctcttggaaaagcaattgcagcaagccttggaagagggtaagcagggcaggcgcggtcttggacggagggatcaggccgttcagaccgggtttgtgtcgccaatccgccctctcggcttgcagctgggagcacgtccggctgcagtgtgcagtccctcagctagagtgcttggcagtccagccagatcacctgctggccctcttgcgccttccgccgcaagcctgtcttcctcctctacatcaacatcaactacttactcaagctcagctaggttcatgcccggtacaatctggagcttttcacacgccaggcggttgggcccaggcctggaacccaccttggtacaggggccaggactctcctgggttcatcctgatggtgtgggagtgcagattgacacgatcacacccgagattcgcgcactctataacgtgttggcaaaagttaagagagagagggacgaatacaagcgacggtgggaggaggaatatacagtgaggattcagctgcaagatcgcgtgaacgaactgcaagaggaggcccaagaagccgacgcttgtcaggaagagctcgcattgaaagttgagcaactcaaagcagagcttgtggtcttcaaagggctgatgtctaataacctgtctgagctggatacaaagattcaggagaaagctatgaaggtggatatggatatctgccgaaggatagatataaccgcaaagctatgtgatgtggctcagcagcggaactgcgaagacatgattcagatgttccaggtaccatctatgggtggtcggaaacgggagcgcaaggctgctgttgaggaggacacatctttaagcgagtctgaggggcctagacagccagatggcgacgaggaagaatcaactgcgctgtcaattaatgaggaaatgcaaagaatgctcaatcaattgcgcgaatatgactttgaggacgactgtgactccctgacctgggaagagaccgaggaaaccctgctgctatgggaagatttttccggctacgctatggcggctgctgaggctcagggagagcaggaggactcgctggaaaaggtcattaaggacaccgagagtctgttcaagactagagaaaaagaatatcaggaaacaatcgaccagatagagctggagcttgccaccgccaagaacgacatgaatagacacttgcatgagtatatggagatgtgttccatgaagcgcggactagatgtgcagatggagacttgtagacgtctgattacccagtcaggcgacagaaagagcccagcctttacggccgtgccactaagtgacccacccccaccacctagcgaggccgaagactcagatcgggacgtgtccagcgacagcagcatgcgctag

SEQ ID NO: 29544 - DNA, 1182 bp, synthetic construct
  source 1..1182: mol_type = other DNA; note = Synthetic coding sequence
atggcttcaggcagagctagatgcacgcggaagttgagaaattgggtcgtggaacaagttgagagcggtcagtttcctggtgtatgttgggacgacacagcaaaaaccatgtttaggattccctggaaacatgctggaaagcaagacttccgtgaggaccaggacgcagctttcttcaaagcctgggccatcttcaaagggaagtacaaggagggggataccggcggacccgctgtttggaaaacccggctgcgctgtgcattaaataaatcctccgagttcaaggaggttccagagcgcggacgcatggatgtggccgaaccttacaaggtttatcagctgttgcctccgggaatcgtgtccggacagcccggaacccaaaaagtgcctagcaaacggcagcatagtagtgtgtcttccgagaggaaagaagaggaggacgccatgcagaattgtacactaagccccagtgtcctgcaggattccctcaacaatgaggaggagggcgcaagcggcggagccgtccatagcgacattggcagcagtagttcctcgagcagcccggagccacaagaagtgacagataccacagaggctcccttccagggcgaccagaggagtctggagttcttattgcctccggaacccgattactcactgctcttgacctttatctacaatggtagggttgttggcgaagcgcaggtgcaatctctcgattgcagactggtggctgagcccagtgggtctgaaagttccatggaacaggtgctcttccctaaacccggtccacttgagcccacccagcgcctcctcagccagctggaaaggggcattttggtggcctcgaacccaagggggctgtttgtccagcggttatgccctatccccattagttggaacgcaccccaggcgcctccgggacccggaccccacctcctaccttccaatgaatgcgtcgagctctttaggactgcttatttctgcagagacctggtccgctatttccagggcctgggccctccccctaagtttcaggtgacgttaaacttttgggaggagtcccacgggagcagtcacactcctcagaaccttatcactgttaaaatggagcaggctttcgctcgctatctgttggagcaaacgcccgagcaacaggccgctattctttccctagtttag

SEQ ID NO: 29545 - DNA, 2454 bp, synthetic construct
  source 1..2454: mol_type = other DNA; note = Synthetic coding sequence
atgtggtctctgactgcaagcgagggagagtccactactgctcacttcttccttggagcaggagacgaggggctaggcacccgaggcatcggaatgcgtcccgaggagtcagattctgaactgctcgaggacgaggaggacgaggtcccgccagaaccccaaatcattgtcgggatttgtgccatgactaagaaaagtaaaagcaaaccgatgacccagattcttgaacggctgtgccgcttcgactatctgaccgttgttattcttggagaagatgtgatcctcaatgagcccgtggagaactggccctcctgtcattgcctgatcagctttcacagtaaggggtttcctttggacaaggccgtggcttattccaaactgaggaatccctttctcataaacgacctggccatgcagtactatatccaggaccggcgagaggtatacagaatactgcaagaggagggcattgacctgccacgctatgcagttctgaaccgggaccccgctcgcccagaggagtgcaatctgattgaaggcgaggaccaggtggaagtcaatggggcagtgttcccaaagccctttgttgagaaacccgtgagtgccgaggatcacaacgtgtatatatattacccctcttcagccggaggcggtagtcagcggctctttaggaagatcggttccagatctagtgtatattcacccgagtcctctgtcaggaagaccggctcatatatatacgaagaattcatgcccacagacgggaccgacgtcaaagtgtacacagtaggtcccgactacgcccacgccgaggctcgaaaatctcccgcactggatgggaaagtggaacgggatagtgaaggtaaggagattcaatacccagtgatgctgacggcaatggagaagttggttgccaggaaggtgtgtgttgcctttaagcaaactgtatgcggattcgatttgctcagggctaatggacattcttttgtatgtgatgttaatgggttcagcttcgtcaagaattccatgaaatactatgacgattgtgcaaaaattcttggaaacaccatcatgcgggaactcgcaccgcagtttcaaatcccctggtcaataccaactgaggccgaagatatcccgatcgtgccaaccacatcagggactatgatggagttgcggtgtgtaatcgccattatccgacatggcgatcgcactcctaagcagaagatgaaaatggaagtcaaacaccctcgcttcttcgctttgtttgagaagcatggaggctataagactggcaagctcaagctgaaacgccctgagcagctccaggaggtactcgatattacaaggttgctgctggccgaattggagaaagaacccggtggggagatcgaggagaagacaggaaagctggagcagctgaagtccgtgctggaaatgtatggacacttcagcggcatcaaccgcaaagtccaactgacctattacccccacggggtgaaggctagcaatgaaggacaggacccccagcgcgaaaccctcgcccctagccttctcctggtgctgaagtggggcggagaattgacccctgcgggacgggtgcaagccgaggaactcgggagagcatttcgctgtatgtatcccggtggccagggcgactacgccggattcccagggtgcggcctgctgaggctgcatagtaccttccgacatgacctcaagatctacgcttccgatgaaggacgggtacagatgaccgcagccgcattcgccaaggggttactcgcattggaaggggagctgacaccaatcctggtgcagatggtgaagagcgccaatatgaatgggctgcttgactccgacggtgattctctgagttcatgccaacatagggtaaaggcccgattacaccatatattacaacaagatgcccctttcggcccagaggattacgatcagctggctcctacaagatcaacttccttgcttaactcgatgacaattattcagaatcccgtgaaggtgtgcgatcaagtgtttgccttaatcgaaaatctaacacaccagatccgagaacgtatgcaggatccgcgatcagtggatctccagctgtaccactcggagactctggagcttatgttgcagaggtggagcaaattagaacgcgatttcagacagaagtcgggtagatacgacatatcaaagattcccgatatttacgactgcgtaaagtacgacgtccagcacaacggaagtctgggtttgcagggcacggcggagttgcttagactctcaaaggctctggcagacgtcgtgattccccaagaatacggaataagtcgcgaagagaaattggagatcgccgtaggcttctgtttaccgttattacgaaaaattctgctggatctccagcggacccatgaagatgaatcggttaataagcttcatcctctctag

SEQ ID NO: 29546 - DNA, 417 bp, synthetic construct
  source 1..417: mol_type = other DNA; note = Synthetic coding sequence
atgatattgcagcagccgctgcagagaggcccacagggtggggctcagagattaccccgtgccgctctaggcgtgacctggggcctggacgcctcgtcgccacttaggggcgctgtccctatgtccactaagcgacggctagaggaggaacaagagcctctccggaaacagttcctatcagaagagaacatggctacacacttcagccagctgagcctgcacaatgaccacccgtactgttcccctcccatgacattttccccagctttgcctcctctgaggagcccttgctctgagctgctattgtggcgctaccccggttccctgatcccagaagccctcagattgctgaggctgggcgacacaccctctccaccttaccctgccactcctgcgggtgatatcatggaactgtag

SEQ ID NO: 29547 - DNA, 4302 bp, synthetic construct
  source 1..4302: mol_type = other DNA; note = Synthetic coding sequence
atgtggtcgttgacagcttctgaaggagagtccacaactgcccatttctttctgggcgctggcgacgagggcttgggaacacggggtatcggaatgagaccggaggagagcgatagcgagctgttggaggacgaggaagatgaggtgccgccagagccgcaaatcatagttggtatatgcgctatgaccaaaaagtcgaaatcaaagcccatgacacaaattctcgagcgactatgtcggttcgactacttaacggtggtgatcctcggggaagacgtgatcttgaatgaacccgttgagaattggccctcttgtcactgcctgattagctttcactcaaagggttttccgttggataaggctgttgcatatagcaaacttcgtaacccgtttctcattaacgacttagccatgcagtattatatacaggatcggagagaagtctataggatcctgcaggaggagggtatcgatttacccaggtacgccgtcctgaaccgagatccggctcgaccagaggaatgcaacctgatcgagggagaagaccaggtcgaggtgaatggagctgtgttccctaaaccattcgtagagaaaccagtctccgcagaagatcataatgtgtatatctattatccctcatccgctggaggcggttcacaaagattgtttcgcaaaatcggctctcgatctagtgtgtattcacctgagtcctccgtccgtaaaacaggctcctacatttatgaagaattcatgcccaccgacggtacggacgtgaaggtgtatactgtggggcctgattacgctcatgcagaagcgcgaaaatcacccgctcttgatggaaaggttgagagggattccgagggcaaggaaatacgctacccagtgatgctgactgctatggaaaaactagtagccagaaaggtctgcgtagcttttaagcagaccgtttgtgggttcgacctgctgcgggcaaatggtcacagttttgtgtgtgatgtgaacggcttctcgttcgtcaagaatagcatgaaatattacgatgactgcgctaagattctcggcaataccataatgagggaattggcccctcagttccagatcccctggtccatacccacagaagccgaagatattcctatcgtacccactacttccggcacaatgatggaattgcgctgcgtcattgctataattcgtcacggtgatcggacgcccaagcagaaaatgaaaatggaggtgaaacacccaagatttttcgctctgttcgagaagcatggaggatacaagactgggaagttgaagctgaagaggccagagcaacttcaggaggtgttggatatcacgcgacttctcctagcagaattagagaaagaacccggtggagaaatcgaggaaaaaacagggaagctcgaacagctcaagtctgtcctagaaatgtacggccacttttccggcattaataggaaagttcagctgacctattatccacacggcgtgaaggcttcgaatgagggacaggatcctcagcgcgaaactcttgctccatccttgctactcgtcctgaagtggggaggggaattaactcctgccggtcgggtgcaggcagaggaactaggaagggccttcagatgcatgtatcccggaggtcagggggattacgccggattcccgggttgcggcctgctgaggcttcacagcacttttcgacatgacctcaagatttatgcttccgatgagggcagggttcagatgaccgctgcagccttcgctaaaggactgttggctctggaaggggaattaacacctattctggtccagatggtgaagtccgcaaatatgaacgggctcctcgattctgacggcgatagcctgagctcttgtcagcatagagtcaaggcccgtctgcaccatattttgcaacaggacgccccattcggcccagaagattatgatcagctggctccaacaaggtccacatcacttttgaacagcatgaccataattcagaaccctgttaaagtatgcgaccaggtcttcgcattaattgaaaatttgactcaccagattagggaaaggatgcaggacccaaggtccgtagacctgcagctgtaccactctgagacactggaactaatgctgcagcgatggagtaagttagagagagattttaggcagaagagtggccgatatgacattagcaaaatccccgatatatacgattgcgttaagtacgacgtacaacacaatgggagtcttggactgcagggaaccgcagagctcctgcgcctatcaaaggccttagccgacgtcgtgatcccccaggaatacggcatctctcgagaagaaaaactggagatcgcagttggcttctgtctacccctccttcgaaaaattctgctcgatttgcagagaacgcacgaggatgagtccgtcaataagctccatcctctctgctatttacgctatagcagaggggtattatcaccgggacgccatgtgcgaacccgtctttattttactagcgaaagccacgttcatagtctcttgagcgtgtttcgctacggaggccttctggacgagactcaagacgctcagtggcagagagctcttgactatctttctgcaatcagtgagctgaactacatgacacagattgttatcatgctgtatgaggacaatacgcaggaccctctcagcgaagaacgctttcacgtggaattgcattttagtcccggtgtgaaaggcgtcgaagaagaagggagtgcacccgctgggtgtgggtttcgcccagccagttctgagaacgaagaaatgaaaacaaaccagggctcaatggaaaacctttgtcctggcaaggcaagtgacgaacctgatcgagcactgcagacgtcccctcagcctccagaggggcctgggttgcccaggcgtagtccactgattcgcaataggaaagctggctctatggaggtgctttctgaaactagttctagcagacctggtggctatagattgttttcgtcctcgcgtcctcccacggaaatgaagcagtcaggtttaggaagccagtgcacaggccttttcagtaccaccgtgctggggggttcctccagcgcgccaaacctccaggattacgctcggtcccacggcaagaagctccccccagcatctctgaaacacagggacgagctgttatttgtgcccgcagttaagcgattctccgtgtcattcgcgaagcaccccactaacggctttgagggttgcagcatggtgcccaccatatatccactagagaccctgcataatgccctgagtctgcgacaggtgtccgagtttctcagtcgtgtctgccagcgccacacagacgcccaggcccaggcatctgcagctctatttgacagcatgcactcaagtcaggcctcagacaatcctttctctccaccgagaaccctccacagtccacctctgcagctgcagcagcgaagcgagaagcctccgtggtactcttcagggccatcttcgactgtgtcatctgctggaccctctagcccaactacggtcgacgggaatagtcagttcggcttctccgatcagccctcgctcaattctcacgtggccgaagagcatcagggcctgggcctcctccaggagacccctggtagcggagcccaggaactctccatcgagggtgaacaggagctgtttgaaccaaaccagtctccccaggttcccccaatggagacatcccagccgtatgaagaagtctctcagccctgccaggaggttcccgacatatcccaaccgtgtcaggacatcagtgaggctctttcccagccgtgtcagaaggtgcccgacatatcccagcaatgccaagagaaccacgacaatgggaaccacacttgccaagaggtgccacacatttcccaaccatgccaaaagtcttctcagctctgccagaaagtttccgaggaggtgtgtcagctgtgcctggaaaattccgaagaagtgtcacagccatgtcagggcgtttcagtagaagtcggaaagctggtgcacaagtttcacgtgggggttgggagcctggtgcaggagacgctggtcgaagtgggctcaccggcagaggagattcccgaggaggtgatccagccataccaggagttcagcgtcgaagttggccgattggcacaagagacctcagctatcaacttgttgtctcaagggatcccagagatagataaacccagccaggagtttccagaggagatcgacctgcaggcacaagaagttcctgaggaaattaactag

SEQ ID NO: 29548 - DNA, 435 bp, synthetic construct
  source 1..435: mol_type = other DNA; note = Synthetic coding sequence
atggcggaagtgcaggtgttagtgctggacggtcgagggcacctattgggacgactagcggctatcgtggccaagcaggtgctgttgggtcgcaaggtggttgtcgttcggtgtgagggcattaacatttctgggaacttttacaggaataagctcaagtacctagcattcctgagaaagcgcatgaatactaacccttcccggggaccttatcacttcagggctccctcccggattttttggagaactgtacgaggcatgcttccacataagactaaacgaggtcaggccgctctcgatcggctgaaggtgtttgatggaatcccacccccatacgggaacaggcccaggcgtacgtggaggagaaaactaaccaatactcagcggagctcccgtccaaccgactcctggtccgaacccaataaagactgttag

SEQ ID NO: 29549 - DNA, 408 bp, synthetic construct
  source 1..408: mol_type = other DNA; note = Synthetic coding sequence
atggccgcactgcgccctctggtaaagcccaagattgtcaaaaagcgtactaagaaattcatcagacaccagtctgacaggtacgtgaaaattaagagaaactggcggaagccacggggaattgataatcgggtgcggaggaggtttaagggacagattttgatgcccaatatcggctacggatccaataagaagaccaagcatatgctcccttccggattcaggaaatttctggttcacaatgttaaagagctggaggtgttactaatgtgtaacaaaagttactgtgccgagattgcccacaatgttagcagcaaaaacaggaaagctatcgtggagcgggctgcccagcttgctatccgcgttactaatcctaacgctagattgagatccgaagagaacgagtag

SEQ ID NO: 29550 - DNA, 408 bp, synthetic construct
  source 1..408: mol_type = other DNA; note = Synthetic coding sequence
atggccgctcttcgccctctggtaaagcccaagattgttaaaaagagaacaaagaaatttattagacatcagtctgacaggtatgtgaagatcaaacgcaactggagaaagcctaggggcatagataacagggtaagaagaagatttaagggtcagatcctgatgcctaacattggctacggaagtaataaaaagacaaagcacatgttgccttctggcttccgaaagtttcttgtgcataacgtcaaagaactggaggttctactgatgtgtaataagtcgtactgcgccgaaatagcacacaatgtaagttcaaagaatcggaaagcaatagtagaacgggcagcacagctggctatccgggttactaacccaaatgcacgtctccggagcgaagagaatgagtag

SEQ ID NO: 29551 - DNA, 684 bp, synthetic construct
  source 1..684: mol_type = other DNA; note = Synthetic coding sequence
atggaacctcagggatacccagccttcggttgggaccactccctccacaagaggaagaggttgcctccagtcaagcgctctctggtgtattatctgaaaaaccgggaggttcgacttcaaaatgaaactagttacagtagagttctacacggctacgcggctcaacagttgccgtcactgttgaaggagcgagagttccatttgggaactttgaacaaggtgtttgcctctcaatggctgaaccaccggcaggttgtctgtggcacaaagtgtaacaccttattcgtcgtagatgtgcagacaagtcaaatcaccaagatcccaatactaaaggatcgggaaccaggtggggtgacccagcaggggtgcggaatccacgccatcgagcttaatccatccaggacactgctcgctaccggtggcgacaaccctaattcattggcgatttatcgccttcctactcttgatcctgtctgcgtgggtgacgatggacacaaggattggattttcagcattgcgtggatctccgatactatggccgttagcgggagccgtgacgggtccatgggcctgtgggaggttactgacgacgttttgaccaagtcagacgccagacataatgtcagcagggttcccgtatatgcccacataactcacaaagctctcaaggacattcctaagtag

SEQ ID NO: 29552 - DNA, 1554 bp, synthetic construct
  source 1..1554: mol_type = other DNA; note = Synthetic coding sequence
atgaccagactcgggaccgtaccaagaaaagctctggaaatgagttgtgccatacagaaccagttggcgaggatccttgccgagttcgaaatgaccctcgagcgtgacgtgctgcaacccctttctcgcctctctgaggaagaacttccagccatcttgaaacacaaaaagagcctgcagaagctggtttctgattggaatacccttaagtcccggctgtcgcaggccacaaagaattcaggttcgtcgcaagggctcggtggcagcccaggaagccacagccacacaactatggcgaataaagtggagacactgaaagaggaggaagaggaactaaaaaggaaagtcgaacaatgtagagacgagtatttggctgatctttatcactttgtaaccaaggaggactcctacgctaactactttatccggctgcttgaaatccaggccgattaccataggcgcagcctcagtagccttgatactgctctcgcagaattgagagaaaatcacgggcaagccgaccatagtccatcaatgactgcgacgcacttccccagggtgtacggtgtgagtttggcaactcacctccaggagctcggaagagagatcgccttgccgatcgaggcatgcgtgatgatgctactctcagaaggcatgaaagaggagggcctttttagacttgctgccggtgcctcggtgctgaagcgacttaagcagaccatggcgtctgaccctcattcactcgaagaattttgttcggacccccatgctgtcgccggtgcccttaaatcatacctgagggaactccccgagcctctgatgacattcgatctttacgatgattggatgagggcagctagcctaaaggaacccggagctagattacaggccttacaagaagtgtgtagtcgcttgccgcctgaaaatcttagtaacctgcggtacttgatgaagtttctggcgagactcgctgaagaacaggaagtgaacaaaatgaccccctcgaatatagcaatcgttctcggtcctaacttgctgtggccccctgagaaagagggcgaccaagcccaactggatgctgcctctgtgagctctatccaggtcgtcggggtggtcgaggcccttatccagtcagctgatacattgtttccaggtgatatcaatttcaatgtaagcggtctgtttagcgcggtgactctgcaagataccgtgtctgaccgtctagcttccgaggagctgccttcaaccgcagttcccacacccgctacaacaccagctccggcacctgctcccgcacctgcccctgcgccagccctcgcctctgcagccaccaaggagagaaccgaaagtgaagtaccacctagaccggctagcccgaaagtgactaggagtccaccagaaacggcagctcccgtagaggatatggcacgacggagtccacgcggtgctaccggcagaaaggagagatttgcttgctcatatggaacggatagtagtttggccgatatgttcttcgtgcgactcgtaaataaactgttttggacgaagctgtag

SEQ ID NO: 29553 - DNA, 918 bp, synthetic construct
  source 1..918: mol_type = other DNA; note = Synthetic coding sequence
atggatttgagcggggtgaagaaaaagtcactgttgggggtgaaggaaaacaacaagaagtcttccacccgcgctccgagccccactaagcgcaaagataggtcagatgagaaaagtaaggatagatctaaggacaagggagcaactaaggaatcatccgagaaggaccgcggacgtgacaagacgcgcaaaaggaggagtgcctcttcaggatcctcctcaaccaggagcaggtcttcatctacttcatcctctggcagctctactagcactggatcttccagcggctcatctagttccagtgcatcctcgcggtccggatctagtagtacctctaggtcttcttcctcatcctcctcctccgggtcaccctcaccaagccgcaggaggcacgataataggaggaggtcccgttcaaaaagcaagccccctaaaagggatgagaaagagcggaagcggcgtagcccctctcctaagcccaccaaggttcatatcgggagacttaccaggaacgtgaccaaagatcacattatggaaattttttctacatatggcaagataaaaatgattgacatgcccgtagaacgaatgcacccgcacctgtccaaggggtacgcctatgtggagtttgagaacccagatgaggctgagaaggcgctcaaacatatggatggcggtcagatagacggtcaggaaatcaccgcaacagctgtcctggctccatggcccaggcctccacccagacgtttctcccctcctagacgaatgcttcccccaccacccatgtggaggcgaagccctccccgaatgaggcgaaggagccggtcccctagacggagatccccggtgcgccgaagaagcaggagccccggacgccgtagacatcgctctcgaagtagttccaactcctccagatag

SEQ ID NO: 29554 - DNA, 927 bp, synthetic construct
  source 1..927: mol_type = other DNA; note = Synthetic coding sequence
atgattcacgacgcccagatggattactatggcactcgcctcgccacatgctcatccgatcgatcagtgaaaatctttgatgtgaggaacggagggcagattttaatcgccgatctgagaggtcacgagggacctgtctggcaagtggcctgggcccacccaatgtacgggaatatcctggccagctgtagttacgacaggaaagtcattatctggcgggaggagaatggtacctgggagaaatcccatgaacatgctggccacgactcatccgtcaacagcgtgtgttgggccccacacgactacggtctcatcctagcttgtggaagctcggatggcgctatatccctgctgacatacactggcgaaggacagtgggaagtgaaaaagattaataatgcccatactattggttgcaatgcagtctcctgggccccagcagttgtgcctggatcactcattgaccacccttccggacagaaaccaaactacatcaaacggttcgcaagcggcggatgtgacaacctcatcaaactttggaaagaagaggaagacggccaatggaaagaagagcaaaagctggaggcccactctgactgggtcagggatgtggcctgggccccaagtattggcttaccaacaagcacaattgcgagctgttctcaagacggcagggtattcatctggacatgcgatgacgcatcctccaatacatggtccccaaaactcctgcacaagttcaatgatgttgtttggcatgtgagttggagcataacagccaacatcctagctgtaagcgggggtgacaataaagtgaccctctggaaggaaagcgtggacggccaatgggtgtgcatttctgacgtgaacaagggtcagggatctgtcagcgcgtccgtaaccgaaggacagcagaacgaacagtag

SEQ ID NO: 29555 - DNA, 1542 bp, synthetic construct
  source 1..1542: mol_type = other DNA; note = Synthetic coding sequence
atgtctatcgagattgagtctagcgatgtcatccgtttgatcatgcagtacttgaaagagaactctctacacagggctctcgctaccctccaggaagaaacgaccgtgagtctgaacactgtggactccattgagagtttcgtcgccgacattaactccggccactgggacacagtactccaggcgatccaaagcctgaagctgccagataagaccctgatcgatttatacgaacaagttgtgctcgaacttatcgaactgcgcgagttaggggctgctcggagcctactcagacaaacagatccaatgatcatgctgaaacaaacacaacctgagcgctacattcatctagagaatttgctcgcacgatcatattttgacccaagagaggcctatcccgacgggtcatcaaaggaaaagcgcagagccgcaatagcccaggctctggctggcgaagtgagtgtcgttccaccctccaggctcatggccctgttgggccaggcgctgaagtggcagcaacaccagggattgctgcccccaggtatgacaatcgacttattcagagggaaggctgctgttaaagatgtcgaggaggagaaattcccaactcaactgtctagacatattaagttcggacagaagtcacatgtcgaatgcgccaggttttctcccgatggccagtacctcgtgactgggagtgtcgacgggttcatagaggtctggaacttcaccacaggtaagattcggaaagatttgaaataccaagctcaggacaacttcatgatgatggatgacgctgttctctgtatgtgcttttcccgagataccgaaatgctggctacaggggcacaggacggaaaaattaaagtgtggaagatccagtccgggcaatgtctccggaggtttgagcgggcacattcgaaaggcgtaacatgtctctctttctccaaagattcctcccagattctttctgcctctttcgatcagacaatccgcatccatgggttgaaaagtggaaagacccttaaagagtttagaggacattcaagctttgtgaatgaggccacttttacccaggatggccattacatcatatctgcttccagtgatgggaccgtgaagatctggaacatgaaaacaacagaatgcagcaatacgttcaagtccttgggtagtaccgccggaactgacatcacagtgaactcagtcattctgctgcccaagaatcctgaacacttcgtggtgtgtaaccggtccaataccgtagtaattatgaacatgcaaggtcagatcgtgcgtagcttttcttctggcaagcgggaggggggtgactttgtctgttgtgcccttagcccacggggagaatggatttattgcgttggcgaggacttcgtgctgtactgtttcagcacggtcactggtaagctcgagagaaccctcaccgttcacgagaaggacgtgataggcatcgcgcaccacccccaccagaacctgatcgccacctactccgaagacggcctgctcaaattgtggaagccatag

SEQ ID NO: 29556 - DNA, 2136 bp, synthetic construct
  source 1..2136: mol_type = other DNA; note = Synthetic coding sequence
atgtcttcggtgcagtcccagcaggagcagctgtctcaatccgatccatctccatcccccaattcctgctcctcatttgagcttatcgatatggatgcaggcagtctgtatgagcccgttagtcctcactggttctattgtaagataatcgactcgaaggagacatggatcccctttaatagcgaggactcccagcagcttgaggaggcctactcatccggcaaggggtgtaatggcagagtggtgcccacagatggcggtagatacgacgtgcacttgggagagaggatgcggtatgcggtctattgggacgagttggcctctgaggtgagacgctgtacatggttctataagggagacaaagataacaaatatgtgccttactcggaaagcttctcacaggttctggaagaaacgtacatgctggcagtgactctggatgagtggaaaaaaaagctcgagtcccccaaccgggagatcatcattctccacaaccccaagttaatggtgcactatcaaccagtggccggttcagacgactggggctccacccctaccgaacaggggagaccacggacagttaaacggggagtcgaaaatatttccgtggatattcactgcggagaacctcttcagattgatcatcttgtgttcgtggtgcatgggatcggcccagcatgtgatctcaggttccgtagcattgtgcagtgtgtgaatgattttaggtctgtaagcctcaacctgctgcagacgcactttaagaaagcccaggaaaaccagcagattggccgagtcgaatttttacccgttaactggcactcacctctccattccaccggagtagacgtagacctacagagaatcacactgccaagtatcaacagattgaggcacttcaccaacgacaccatcctcgacgtctttttctacaacagtccaacctattgtcagacaattgtagacactgtagcctcggagatgaacaggatctacaccttgttcctacagagaaatcccgatttcaagggcggagtttcgatcgccggtcactcattgggatcactgattctgttcgacattctgactaatcaaaaggattcgcttggtgatatcgattctgaaaaggactctctgaacattgtcatggatcaaggcgatacaccaactctggaggaagatttaaaaaagttacaactgagcgagttcttcgacatatttgagaaggagaaggtggataaagaggccttagctctctgcaccgaccgggacctccaagagatcggcatccccctgggccctcgtaaaaaaatcctgaactatttctccacacggaagaacagtatgggtattaagcggcctgcccctcagcctgcctccggagccaacatccccaaagagtctgaattctgctccagttctaatactcgaaatggggattacttggacgtgggtatcggccaagttagcgtgaagtaccctcggctcatttataaacccgaaattttttttgctttcggctcacctattggcatgttcctgacagtgcggggtcttaaaaggattgacccaaattataggttcccaacttgtaagggcttcttcaacatataccatcccttcgatccggtagcgtaccgtattgagcctatggtcgtgcccggagttgaattcgaacctatgctgatacctcaccataaaggcaggaaacgcatgcacttggaactccgcgagggccttaccagaatgtctatggacctgaaaaataatctgctgggttcactccggatggcttggaaaagtttcacccgcgcaccttaccccgctttacaagcgtcagagacgccggaggaaaccgaggctgagcctgaatcaacctctgagaaaccatccgatgtcaacaccgaggaaactagcgtggccgtcaaagaggaggtgcttccaatcaacgtgggaatgttgaacggaggccaacggattgattatgtattgcaagaaaagcctattgaaagtttcaatgagtacctgtttgcgcttcagtctcatctttgctattgggagtccgaggacaccgtgctgttagttctcaaggagatctaccaaacacagggaatcttcctggatcagcccctgcagtag

SEQ ID NO: 29557 - DNA, 3351 bp, synthetic construct
  source 1..3351: mol_type = other DNA; note = Synthetic coding sequence
atgtatggcagcgcccgatctgtgggcaaagttgaaccgagctctcagtcgcccggacggagcccccgattaccccgatcccctcggttaggccacagacggactaattctaccgggggtagttctggatcctccgtgggtggcggaagcgggaagacactctctatggaaaatattcaatcactgaacgcagcttatgcaacgtccggaccgatgtatcttagcgaccacgaaaatgtgggttctgaaaccccgaaaagcaccatgaccctgggacgctcaggtggccgattgccgtacggagtgaggatgaccgcaatggggtccagcccaaatattgccagcagcggggtggccagtgatactatagcttttggtgaacaccacctccccccagtgtccatggcaagcactgtgccccatagcctgcgtcaggcaagagataatacaatcatggatctgcaaacccagctcaaggaagtgttgcgagagaacgatctgctgcgtaaggatgtggaagtaaaagagagtaaactaagctctagcatgaactccattaagaccttctggagccccgaactcaagaaggagcgggctctgcggaaggatgaggcatcgaaaattacaatctggaaggaacagtacagggtggttcaagaagagaaccaacacatgcagatgaccattcaggccttacaggatgaactccgcatccagcgcgacttaaaccagttgtttcagcaggactcctcttcccggactggtgagccctgtgtggcagagcttactgaggaaaactttcaacgcctacacgcggaacacgagcgccaggctaaggagctcttccttctgaggaagactcttgaggaaatggaactgcgaatagaaacccaaaagcaaaccctcaatgcaagagatgaaagcatcaagaagctgctcgagatgctgcagtcaaagggtctgtccgccaaggcgactgaggaggatcacgaacgcaccaggcgcctcgctgaagctgagatgcacgtccaccacttggagtctcttttggagcaaaaggagaaagagaacagcatgctgcgcgaagaaatgcaccggcgtttcgaaaacgcccctgattcagcaaaaacaaaggccctccaaactgtgatcgaaatgaaggactcaaagatctccagcatggagagggggttgcgagatctcgaagaggaaattcaaatgttgaagtcaaacggggctttgagcaccgaggagcgggaagaggagatgaagcagatggaggtataccgctcccacagcaagtttatgaaaaataaagtcgagcagctcaaggaggagctttcaagcaaagaagcacaatgggaagaactgaaaaagaaagcggcagggctgcaggcagagattgggcaggtcaaacaagaactgtctcgaaaagataccgaactgttggccctgcagactaagcttgaaaccctgaccaatcagttctccgacagcaaacagcatatcgaggtgttgaaggagtctttgaccgccaaggagcagcgcgctgccatattgcagaccgaagtggacgcgttgaggctgcgcctagaggagaaagaaacaatgctaaacaagaagacaaaacagatccaggacatggcggaggagaagggcactcaagccggagaaattcacgatctgaaagacatgctcgacgtgaaggagagaaaggtgaacgtactgcagaaaaaaatagaaaatctgcaggagcagctccgtgacaaggagaagcaaatgtcaagcctaaaggaaagagtgaagtccttgcaagctgacacaacaaatacagacacagccctaaccaccctggaagaggccttggcagagaaagaaaggactattgaaagattgaaggagcagcgggaccgagatgaacgggagaaacaagaggagatagacaactacaagaaagacctgaaagatctgaaagagaaggtttcactgttacaaggcgacctatcggagaaagaggcttccctgctggacttgaaagaacacgcgtcatcccttgccagcagcgggttgaaaaaagattctagactgaagacccttgaaattgcactagagcaaaagaaagaggaatgtctcaagatggagagtcagttgaaaaaggcccatgaagccgctctcgaggcccgagcctccccagagatgtctgatagaatccagcacctggaacgggagataacacggtacaaggacgagtcttctaaagcccaggctgaggtcgaccgtctcctagagatactgaaggaggttgagaatgaaaagaacgataaagataagaagatcgctgagcttgaaagacaggtgaaggaccagaacaagaaagtagcaaatctgaagcacaaagagcaggtggagaaaaaaaaaagcgcccaaatgcttgaagaggctcgcaggcgggaggataacctaaatgattcatcccagcagctgcaggatagtttaagaaagaaggacgatcggattgaggagctcgaggaagcactcagggagtcagtccagatcactgctgaacgggagatggtactcgcccaagaggaatctgctcgaaccaacgccgaaaagcaagtagaggaactcctgatggccatggaaaaggtgaagcaagaactggagagcatgaaggctaagctctcctccacacaacagagtctggcagagaaagagacccatttgacaaatctgagggctgagcgcagaaaacacctggaggaggttttggagatgaaacaggaggccctacttgcagccattagcgagaaggacgcaaacatcgctctgctggaactatcttcctccaaaaagaagacgcaagaggaggtcgccgctcttaagagagaaaaagatcgactggtgcagcaattgaagcaacagacacagaatcggatgaaactgatggcggacaactacgaagacgaccacttcaagtctagtcactctaatcagaccaatcacaagccctctcctgaccagatcatccagccacttctggaactcgatcagaatcgctcaaaactgaagttgtacattggacacctcacaaccctgtgtcacgacagggatccgcttattctccggggactgactcctcccgcatcatataacctggacgatgatcaggccgcttgggagaatgaactccagaaaatgactagggggcagcttcaggatgagctggagaagggggagcgcgacaacgccgaattgcaggaatttgccaacgcaatcctgcagcaaattgctgaccactgccccgacattctggagcaggttgtcaatgccttggaggaaagcagctag

SEQ ID NO: 29558 - DNA, 1233 bp, synthetic construct
  source 1..1233: mol_type = other DNA; note = Synthetic coding sequence
atgcagaacatacacggcaaagagatcgacttgctcaggactactgtgaaggttccaggaaagcgtcttcccagagccactcctgctaccgcacctggaacaagtcctcgtgctaatggcttatccgtcgagcgctccaatacacaactcggaggtgggacggctagtggacccgcagaggtgctcagttcttcacctaagctagacccacctcccagtccccactctaaccgcaaaaaacatagacgaaagaaatcaaccggcacccccagacccgacggtccctcttcagcaacagaggaggctgaagagtcatttgagtttgtggtcgtatcgctgaccgggcagacctggcacttcgaagcatccaccgctgaggaaagggagctatgggtgcagtcagtacaagcccaaatactcgcttctcttcagggatgtcggagcgcaaaggacaagaccaggttaggaaatcagaacgctgccttggctgtgcaagccgtacggactgtcaggggcaatagcttttgcattgactgtgatgctcctaacccagattgggctagcctgaatttgggggcactgatgtgcattgagtgttccggcatccatcgccatttgggcgctcacttgagccgggtgcgtagcctggacctcgacgactggcccccagagctgcttgcagtcatgaccgccatgggtaatgctctggcaaatagcgtgtgggagggtgccttggggggatatagcaagccgggtccagatgcctgtcgcgaggaaaaggaaaggtggattagagccaaatatgagcaaaaactgtttctggcccctctgccttccagtgatgtgccactcgggcagcagctgttgagagcagtcgttgaagatgacctgcgcctgctcgttatgctcctggcacacggcagtaaggaagaggtcaatgagacttacggcgatggcgatggacgtacagctctccacctgtcaagcgcaatggccaatgttgtgttcacccagctactgatatggtatggcgtggacgtgagatccagagacgcgcgtggattgactccattggcctacgcccgtcgggctggatcacaggaatgcgcagatattcttatccagcacggatgccctggggaaggatgcggactggcccctaccccaaatagggaaccggctaatggtaccaacccatcggctgagctgcaccgttctccgtctcttctatag

SEQ ID NO: 29559 - DNA, 492 bp, synthetic construct
  source 1..492: mol_type = other DNA; note = Synthetic coding sequence
atgtcggacagtcctgccggatccaaccccaggacgcctgagtcatctggatcaggcagtggaggcggagggaagaggcctgccgtgcccgctgccgtttcattgctccccccagccgatcccctgaggcaggccaatcgactcccaatcagggtcctgaagatgttgtccgcccataccggccacctgctgcaccccgagtatctgcaaccattaagcagcacgcctgtgtccccgattgagctggatgcaaaaaaatctccacttgccctcttggctcagacatgctcccagattggctccccagggagcctttccctccgaaatccgcacacactcggcctgagcaggtaccacccttatgggaagagtcacttatcaactgcagggggattggctgtaccatccttacccacagcagggccttattactcaccctacgcactgtacggtcaaaggctcgcatccgcatcggcgctaggctaccagtag

SEQ ID NO: 29560 - DNA, 2736 bp, synthetic construct
  source 1..2736: mol_type = other DNA; note = Synthetic coding sequence
atgaactttcaagcaggaggcggtcaatctcctcagcagcagcagagcctcgccgctcctggaggcggaggtgcagctgcccagcagctggtttgtgggggacagttcggaggcgctggccctggggctggaggcggaggtgggccttctcagcaactggcagggggacctcctcagcagttcgccctcagtaacagtgccgctatccgagccgaaatccagagatttgaatccgtgcatcctaacatttacgccatctacgacctaattgagcggatcgaagatcttgccctgcagaatcagatcagggagcatgttatcagcatcgaagatagcttcgttaattcgcaagaatggactctctccagaagtgtgcccgagttaaaagttggcatcgtgggaaacctgagctccggtaagtctgcgctggttcaccgctaccttacaggcacatacgtgcaggaagagagccccgaaggcggtcgcttcaaaaaggagattgttgtggacggtcaatcttatttgctgctcatcagagatgaaggtggcccaccagagcttcaattcgctgcatgggtcgacgcagtagtctttgtgttcagccttgaggatgaaatcagcttccagactgtgtacaattactttcttaggctctgttccttcaggaatgcaagcgaggtgcccatggtactggttggcactcaagatgccatatcagccgcaaatcccagagtgatcgatgattccagagctaggaagttaagcacggatctaaaaagatgcacttactatgagacctgtgctacttacggccttaatgtggagcgcgtgttccaggatgtagcccaaaaggtggtggccctacgcaaaaagcaacagttagctattggcccttgcaagtctctgcccaattccccgtcacacagcgccgtgtctgccgcttccatcccggcagtgcatatcaaccaggcaacaaatgggggaggttccgcattcagtgactattcgagctccgtcccctctacaccatccatatctcagcgggaacttcgcattgaaaccattgccgctagtagtacgcccacccccattcgtaagcagagtaagagacgctcaaacatttttacaagtagaaaaggcgctgacctggatagagaaaagaaggctgctgagtgcaaggtagatagcatcggcagcgggagagctattccaataaaacagggcatcctactgaagcgcagtggaaaaagtctgaacaaagaatggaagaaaaaatatgtaacactctgcgataatggtttgctcacctatcacccctccttacacgactatatgcaaaacatccacggtaaggagattgatcttttaaggaccacagtgaaggtgcccggtaagaggttacctcgcgcaacgcccgctacagctccaggcacaagtcccagagctaacggattgtccgtcgaaagatccaacactcagttgggcggaggtacgggagcaccgcacagcgcttcaagtgctagcctgcactccgagcgcccactgtccagtagcgcctgggctgggccacggccagagggccttcaccagaggtcttgctctgtgtcctctgcagatcagtggtcagaggcaacgacctccttgccccctggcatgcaacatcccgcatccggacccgctgaggtcctaagctcctctccaaagcttgacccccctccatctcctcatagcaatagaaagaaacataggcgcaagaagtcaacagggactcctcgacccgatggaccctccagtgcaacagaagaggcggaagagtctttcgaattcgtggtagtgtccctgaccggtcagacgtggcactttgaggcttcgacagccgaagaaagggagctgtgggtccagtccgtgcaagcccaaattctggcctcattgcagggttgtcgcagcgcaaaagataagaccaggctagggaatcagaacgccgctctggcggtgcaggctgtgcgtaccgttcggggaaactctttttgtatcgactgtgacgcaccaaaccccgattgggcttctctgaacctgggagctcttatgtgtattgagtgcagcggaattcaccgccacttgggcgctcatttgagcagggtgcggtctctggacttggacgactggcctcctgagctgcttgcagtgatgactgcaatgggaaacgctctggccaacagtgtttgggagggtgcactagggggttactcaaagcccggaccggatgcctgccgcgaggagaaagagcgatggatccgcgcaaaatacgaacagaagttatttctggctcccctccccagttcggacgtgcctttagggcagcagctgttgcgtgcagtggttgaggacgacttgagactgttggtgatgttgcttgcgcacggtagcaaagaggaggtgaacgagacttacggagacggcgatggccgaactgctctacatttgtcatcagctatggcaaacgtggtgttcactcagctgctgatttggtacggagtggacgtgcgcagccgggatgccaggggcctaacgcccctggcatacgccaggcgcgctggcagccaggaatgcgccgatatcctgatccaacacggctgtcctggcgaggggtgcggactcgcccctacacccaatcgagagccggcaaacggaactaatccttccgccgaactgcaccgcagtccctccttgttgtag

SEQ ID NO: 29561 - DNA, 1059 bp, synthetic construct
  source 1..1059: mol_type = other DNA; note = Synthetic coding sequence
atggatatcgacaaagatttagaggcacccttgtacctgaccccagagggctggtcactgttccttcagagatactaccaggtggtccacgagggtgccgaattacgccacctcgatacccaggttcagcgatgtgaggatatcctgcagcaactgcaagccgtggtccctcagatcgacatggagggagatcggaacatttggatcgtgaagccgggtgccaagagtcgcggtagaggaatcatgtgcatggaccatctcgaggagatgctgaaattggtgaacgggaatccagtagtgatgaaggatggaaagtgggtagtacaaaagtacattgaaagaccactgctgattttcgggaccaagtttgacctgcgacagtggtttctggtgacggattggaacccgcttaccgtgtggttttatagggattcctacatcaggttttctacccagccttttagcttgaaaaacctggacaactccgtccacctgtgtaataatagtatccaaaagcacctcgaaaacagttgccaccggcatcccttattgcccccagataacatgtggtcctcacagcggttccaggctcacctccaagagatgggtgcccctaacgcctggtcaaccattattgtaccaggtatgaaggatgctgtgatccacgcgcttcaaacttcacaggatacagtgcagtgtagaaaggccagtttcgaactatacggcgcagatttcgtgtttggcgaggacttccagccttggctgatcgaaatcaacgcgtcccccacaatggccccatctactgcggtgacggccaggctttgtgcaggggttcaggcagatacgttgcgtgtcgtgatcgaccgcatgttagacagaaattgtgataccggagctttcgagctgatctacaagcagcccgtgaccacctcacccgctagcacccctcgtccaagctgcctgctgcccatgtatagcgacacaagagcgaggtcttccgatgactcaacagcctcatggtgggcgctccgcccttgtcggccacaagccagaccctag

SEQ ID NO: 29562 - DNA, 507 bp, synthetic construct
  source 1..507: mol_type = other DNA; note = Synthetic coding sequence
atgaccgccacgcttaggccctacttgtccgccgtccgcgctacgctgcaggctgcgctatgcctggaaaacttcagcagtcaagtggttgagcgacacaataaacctgaggtggaggtcagatctagcaaggaactgctgctccagcccgtgaccatctctcgaaacgagaaggaaaaagtgctgattgagggatcgataaactccgtgagggtgtccattgcagtgaagcaagcggatgaaatcgagaagattttatgccacaagtttatgcgctttatgatgatgagagcggagaattttttcattctccgcaggaaacccgtcgagggttacgacatatcatttctcatcacaaactttcacaccgagcagatgtataagcacaagctcgtcgacttcgttattcacttcatggaggaaattgacaaggaaatctcagaaatgaaacttagcgtcaatgcacgagccagaattgtggccgaagagtttctaaagaatttctag

SEQ ID NO: 29563 - DNA, 993 bp, synthetic construct
  source 1..993: mol_type = other DNA; note = Synthetic coding sequence
atggagcgctttatggagcaggtcgtgtttaaatacctgagagccgagccggaggaccactactttctaatgacagagccccctttgaacactcccgaaaaccgcgagtacctggcagaaataatgttcgagtcatttaatgtcccaggtctctacatcgcagtccaggccgtcctcgcactggctgccagctggacctctagacaagtcggagagcgcaccttgacagggattgtgatagactctggggacggagtcacccacgtcatcccggtagccgagggatacgtgataggttcttgtatcaagcatatacctatcgctggccgtgacatcacgtacttcattcagcagctattgagggagcgcgaggtcggaataccccctgaacagtccttggaaactgcaaaagcaataaaggagaagtactgctacatttgtccagatatagtgaaggagtttgctaagtatgacgtcgacccgaggaaatggattaaacagtacaccggcatcaacgccatcaaccaaaagaagttcgtaatcgacgtaggttacgagcggtttctgggacccgagattttctttcaccccgaattcgctaatcccgatttcatggagtcaattagcgacgtggtcgatgaagtgatacagaattgtcccattgatgttaggcgccctttgtacaagaatgtggtgctgtcaggcggttcaaccatgttccgcgattttggccgtcgcctccagcgtgatctgaagagagtcgtggatgcgaggctgcgtctgtcggaggagttgtctgggggacgcattaagcctaaaccagtggaggtgcaagtggttacccatcacatgcaacgttacgccgtctggtttggagggagtatgctggcctccaccccggaattctttcaggtctgtcacacaaaaaaggattacgaagaatatggcccatctatttgtcgacacaatccagtattcggcgtgatgagctag

SEQ ID NO: 29564 - DNA, 894 bp, synthetic construct
  source 1..894: mol_type = other DNA; note = Synthetic coding sequence
atgaagactctatcccctgacaggatacagcctcacatcatgaccgatgtccctgctacattcacccaggctgagtgtaacggcgataaaccaccagagaatggccagcagactattacaaaaatttcagaggaactgaccgatgtggactccccgctgccacactatcgggtcgaaccgagcctggaaggtgcgctcaccaaaggctcccaggaggagcggcgaaagctgcaagggaatatgcttctcaactccagcatggaggacaagatgttgaaggagaatcctgaagaaaagctattcattgtgcataaggcaatcactgatctcagcctgcaggagacctcagccgacgaaatgacctttcgtgagggccaccagtgggagaagatcccgctcagtggatcaaatcaggaaatacggcgtcagaaagagagaatcacagagcagcctctgaaagaggaggaggatgaggatcgcaaaaataagggccatcaagcagcagaaatcgaatggcttgggttccgcaaaccaagccaagccgacatgcttcactctaagcatgatgaggagcagaaggtctgggacgaggaaattgatgacgatgacgatgataattgtaataacgatgaggatgaagtgagagtcatagagttcaaaaagaagcacgaagaagtgtctcagttcaaagaagagggcgacgcctcagaggactcaccactctcttccgcatcttctcaggcggtgacgccggacgaacagccgaccctgggcaaaaagagcgacatctcccggaatgcatactcaaggtacaacactatttcgtaccgtaaaatcagaaagggaaacacaaaacagcgcattgatgaattcgaaagcatgatgcacctgtag

SEQ ID NO: 29565 - DNA, 1074 bp, synthetic construct
  source 1..1074: mol_type = other DNA; note = Synthetic coding sequence
atggtacagccgtttacaactattccctttcccccaccaccacaaaatggcattcccaccgaatatggggttccacacacgcaggattacgccggtcagaccggtgaacataacctgactctgtacggttctacgcaggcccacggtgaacagagtagcaactcaccgagtactcaaaacggctccttgacccagactgaagggggagcacagacagatggccaacaaagtcaaactcagtccagcgaaaatagcgaaagcaagagcaccccaaagcgcttgcacgtttcaaacatcccttttagatttcgtgaccctgatctccgacagatgtttggtcagttcgggaaaatactcgatgtggagatcatttttaacgagagaggctccaagggcttcggatttgttacgtttgaaaattcagccgatgctgaccgcgctagagagaagctccacggaacagtggtggagggtcgtaaaatcgaggtgaacaatgctactgcgagggtaatgaccaacaaaaagatggtaaccccctacgccaacggctggaagctctcccctgtcgtgggtgccgtgtacggccctgagctttacgctgcaagcagctttcaggccgatgtgtccctcggcaatgatgcagccgtgccactctcaggcagagggggaatcaacacatacatcccactgatcattccgggatttccttatccaaccgcagctactaccgccgcagcgtttaggggggcacacctgcgagggcgagggagaaccgtgtacggagccgttcgagccgtcccaccaacagctatcccagcctaccccggagtagtatatcaagacggattctatggggcagatctatacgggggttacgccgcttaccggtatgcgcagcccgcaacagcgaccgccgcaaccgcggcagctgctgccgcagcggcatactccgacggctatggtcgcgtgtatactgccgacccatatcacgccctcgcgccagcagcgagctacggcgtgggggctgttgcatctttataccggggaggttattcaaggttcgctccatattag

SEQ ID NO: 29566 - DNA, 387 bp, synthetic construct
  source 1..387: mol_type = other DNA; note = Synthetic coding sequence
atggtgcagccattcaccactattccgttccccccaccgcctcagaacggaattccaacagagtatggagtgcctcacacccaggattatgcgggtcagacaggagaacacaatctgacgctgtacggctcgacccaggcacatggcgaacagagctcaaactctcccagtacccagaatggctcactcactacagaggggggtgcccagacagatggacagcaatcccagactcagagtagcgaaaatagcgagtctaaatcaacgccgaaacggctccacgtgagcaacataccctttaggttccgagatccagatctgaggcaaatgttcggctttggaaaaatcctggacgtggaaattatctttaacgagcgaggatcttag

SEQ ID NO: 29567 - DNA, 1071 bp, synthetic construct
  source 1..1071: mol_type = other DNA; note = Synthetic coding sequence
atgcagggcattttgctactcgttttcgcgaagtatcagcacctgccctacattcagatattgagtacaaagagtactcctaccggcttgtttggctactggggcaataaagggggtgtgaatatttgtcttaaactatacggttactatgtgtctattattaactgtcatctgcccccacatatttccaacaactaccagaggctcgaacactttgaccggattttagagatgcagaattgtgaaggtagggatattcccaatatattggaccatgatctgattatctggtttggggacatgaacttcaggatcgaagacttcggtctgcattttgtgcgggagtctatcaagaatcgttgctacgggggactatgggaaaaggaccaattgtccattgcaaaaaaacatgaccccttgctccgggagttccaggagggcaggttgctctttcccccaacttataagtttgacagaaacagcaatgactacgacacgtcagaaaagaaaagaaagcccgcatggactgataggattctgtggagacttaagcggcagccctgcgcgggtcccgatactcctattcccccagcttcacacttttccctgtctctccgcggatactctagtcacatgacctacggtatcagcgaccacaagccagtatccggaaccttcgatctcgaacttaaacctcttgtttccgcccctttgattgtgctgatgccagaagacctctggactgttgagaacgatatgatggtctcctattcctcgacttcagattttcccagcagtccctgggattggatcggactttacaaggtgggactgagagatgtcaatgattacgtaagctatgcatgggtgggtgattctaaagttagttgtagcgataatcttaatcaggtgtacatcgacatctccaatatcccaaccacggaagatgagtttcttctgtgctactactccaattcccttcgcagtgtcgtgggtataagtcggcctttccagatccctccaggcagcctgagggaggaccctcttggagaagcccagccacagatatag

SEQ ID NO: 29568 - DNA, 1752 bp, synthetic construct
  source 1..1752: mol_type = other DNA; note = Synthetic coding sequence
atgctctctgagtccaaagaaggcgaagagaaggaggaggtaacaatggacacatctgagaatagaccggagaacgacgtccccgagccacctatgcccatcgcagaccaggtatctaatgacgatagaccagagggtagtgtagaagatgaggaaaagaaggaaagttctcttcctaagtccttcaagagaaaaatatcagtcgtaagcgcaacgaagggggtgcccgcaggaaactccgacaccgagggcggacagcccggtagaaagagaagatggggcgcatcaactgcgactacacagaaaaagccatccatatctattaccactgagtcactgaagagcctaattcctgacattaagccattggcaggccaggaggccgtggtggacctccacgccgatgactcaagaatttcagaggatgagactgagagaaatggtgacgatgggacacatgacaaggggctgaaaatctgtcgtacagtgacacaggtggtgccagccgagggccaggaaaatgggcagcgtgaggaggaggaagaagaaaaggaacctgaggcagaacccccagtgccccctcaggtgtcagtggaggtggcactgcctcccccagccgaacatgaagttaaaaaggtcacattaggagacaccctgactcgcaggagcatttcccagcaaaagagcggtgtgtcaataactattgacgaccccgttcgtactgcccaggtcccttccccaccgcgtggaaaaatcagcaatatcgttcacattagcaatcttgtcaggccatttactctcggccagctcaaagagctgctgggtagaactggaactcttgttgaagaagccttctggatcgacaagataaagtcacactgcttcgtgacctatagcaccgtcgaggaagcggtagccaccaggacagctctgcatggcgtaaaatggcctcagagcaacccaaaatttttatgcgcagattacgccgagcaggatgaactggattatcatcggggtctcctggtggacagaccgtccgagacaaaaacggaggagcagggaatccctcggcctctgcacccacctccccctcctcctgtgcagccaccgcaacaccctcgggcagagcagcgcgagcaggagagagccgtgcgcgagcagtgggctgagcgtgagcgagaaatggagcgcagagaacggaccaggagcgagagagaatgggatcgggacaaagttagggagggaccaaggagccgttcccgctcacgagaccgacgtaggaaagaacgcgcaaagagtaaggagaagaagagcgagaagaaagagaaagcacaggaggaaccgcctgcaaaactacttgacgatttgttccgcaagaccaaggccgctccttgcatatactggttgccactgaccgatagccagattgtccagaaagaggcggagcgagccgagagagcaaaggagcgcgagaaaagaagaaaggagcaggaggaagaggaacagaaggaacgcgaaaaagaagcagagcgcgaacggaacaggcagctggagagggagaaacggcgtgaacattccagggaacgggatagggagcgtgagcgcgaacgggaacgtgatcgcggagacagagatagggatcgcgagcgcgatagggaacgtggccgagaaagggatagacgcgatacgaaaaggcattctcggtcccggagcagatcgactccagtgagggatagaggcggaagacgttag

SEQ ID NO: 29569 - DNA, 1329 bp, synthetic construct
  source 1..1329: mol_type = other DNA; note = Synthetic coding sequence
atggcaaatagcttcgctgcccgtatcttcacaacactaagcgatctccagactaatatggcgaatctgaaggttataggcatcgtgatcggcaagactgacgtgaaggggttcccggaccgcaaaaatattggttccgagcgatatacattctctttcacgatcagggattctcccgctcacttcgtaaacgccgcttcatgggggaacgaggattacattaaatccttaagcgatagttttcgcgtgggagattgcgtcattatcgagaacccactcatacaacgcaaggaaattgagagggaagagaagtttagccccgctactcccagtaattgcaaattactgctcagcgagaatcacagcactgtgaaagtctgctcttcctatgaggtggatacaaagttgctgagcctgattcatctgccagttaaggaaagccacgattattatagcttgggggatatcgtggctaacggacacagcttaaacggcaggattataaacgtgcttgccgcagtgaagagtgttggtgaaccgaagtactttacaaccagcgacagaaggaaaggacagcgctgtgaggtccggctttacgatgagaccgagtcatccttcgctatgacctgttgggataacgaaagcatcctcctcgctcagagctggatgcctcgtgaaactgttatcttcgcttccgacgtgcgaattaacttcgataagttcagaaattgcatgacagccaccgttatttcaaagaccattatcacaaccaatcctgatattcctgaagccaatattctgttaaattttatccgcgagaataaagagacaaatgttcttgatgacgagatcgattcctactttaaagagagtataaacctgtccacgattgtggatgtctacacagtggaacaattgaaaggcaaagccttaaaaaacgaggggaaagctgatccaagctatggtatcctttacgcttacatatctaccctcaatatagatgatgagacaacgaaggtggtgagaaataggtgttcttcatgtggctacatcgtgaacgaggcttccaacatgtgcactacgtgtaataaaaactccctcgatttcaaatcagtgttcctaagctttcatgtgttaatcgacctcacggaccatacagggacactgcactcatgttcacttactggcagtgtggccgaagaaaccctgggttgtacattcgtcctaagccatagagcccgtagtggacttaagatcagtgtcctgtcttgcaaactggccgatcctacagaagcctcccggaacctaagcggtcagaagcacgtttag

SEQ ID NO: 29570 - DNA, 627 bp, synthetic construct
  source 1..627: mol_type = other DNA; note = Synthetic coding sequence
atggcaggaactgcccgtcacgatcgggagatggctattcaggccaaaaaaaaacttactaccgctacggacccaatcgagcgcctgcgccttcagtgtctggccaggggctccgctggaatcaagggccttggacgcgtatttaggatcatggatgacgacaacaatcgcaccctagacttcaaggagttcatgaaagggttgaacgattacgctgtggttatggagaaggaagaggtggaggaactattccggcgattcgacaaagacggaaatggaacgatagactttaacgagtttctgctcacactacgacctcctatgagtcgagccaggaaagaggttataatgcaggccttcaggaaactggataaaacaggagatggcgtgattacaattgaagatctccgcgaggtatataacgctaaacaccatccaaaatatcagaacggagaatggtctgaggagcaagtgttccgcaaattcttagataactttgatagtccctatgataaggacggcctggtgacacctgaagaattcatgaattattatgctggggtgagtgcttccatcgacaccgacgtgtactttatcatcatgatgcgcaccgcttggaagttgtag

SEQ ID NO: 29571 - DNA, 627 bp, synthetic construct
  source 1..627: mol_type = other DNA; note = Synthetic coding sequence
atggccggaaccgccagacatgatagagagatggccattcaagctaaaaagaagctgactactgcaactgatcctatcgaacgtcttcgcctgcagtgtttagcacgaggtagtgctggtattaagggattaggcagggttttcaggatcatggatgatgataataaccggactctggacttcaaggaatttatgaagggtctgaacgactatgccgtcgtcatggaaaaggaagaagtggaggagttgtttaggcgattcgacaaagatggcaatgggaccattgattttaatgagttcctgctcacgctgcgccctccaatgagccgggctcgaaaggaggtgataatgcaggcctttcgaaaactggacaaaaccggagatggagtgatcactatcgaggacctgcgtgaagtgtataatgccaagcaccaccccaaataccagaacggggagtggtccgaggaacaagtcttccggaaatttctcgacaactttgactcaccgtatgataaggatggattggtgactcccgaggagttcatgaattactacgccggagtgtctgcctcaatcgataccgacgtttacttcattatcatgatgagaactgcctggaagctgtag

SEQ ID NO: 29572 - DNA, 789 bp, synthetic construct
  source 1..789: mol_type = other DNA; note = Synthetic coding sequence
catagctactctgaaggcttgggccatccgagagtgtcacaggcgctggtcaccttccaccagcagaagccaattgaaccgaggcgcgagctcctaactcagccgtgtagacagaaggacccagccaacgtggattatgaggacttgtttctctattctaatgcagtggcagaggaagctgcctgtcctgtgtctgctcccgaagaagcgtcaccgaaaccagtcctctgccaccagagtaaagaacgcaagccctctgctgaaatgaatcgaattacaacaaaggaggcaacctcctcttgccccccaaaatcacctctcggcgagactcgacaaaagttatggagatcactcaaaatgctgccggagaggggacagagggtgagacagcagaaaagccacctggctactgtgaatctgagcagcttgctggatgtccggaggagcaccgtgatttctgggccaggcaccgggaaggggtcacaggatcactccggggatcctacatcgggggatagggggtatacagatccgtgcgtcgctaccagcctgaaatccccaagccaaccgcaggccccaaaagaccgcaaggtcccaacccgaaaggcagagcgatctgtgtcttgcatcgaagtgacgcccggagatcgctcttggcaccagatggtagtcagagccctgagtagccaagagtccaagccggagcatcaagggttagctgaacccgagaacgaccagctgccggaagaataccagcagcccccacccttcgcacctggttactgctag

SEQ ID NO: 29573 - DNA, 1941 bp, synthetic construct
  source 1..1941: mol_type = other DNA; note = Synthetic coding sequence
atgtcctatacggggttcgtgcagggctcggagacaacattgcagtccacctattctgacacttccgcacaacccacttgcgattacgggtacggcacgtggaactctggcactaaccgaggatacgaggggtatggctatggttacggatatgggcaggacaatacaaccaactatgggtatggcatggccacaagtcacagctgggaaatgccgagtagtgatactaatgccaacacaagcgcatcaggaagcgcctccgccgacagcgtgctgagtcgtatcaaccagagactggacatggtgcctcacctggaaactgacatgatgcagggcggtgtttatggaagcggaggagaaaggtacgactcttacgagtcttgtgacagccgcgcagtattaagcgaacgagatctgtaccggtcaggatatgactatagtgagctggaccccgaaatggaaatggcctacgaggggcagtacgacgcctacagggatcaattccggatgcggggaaacgacacattcgggcctcgtgcccaaggttgggccagggacgcgagaagcggcaggcccatggcttccggatacggccgtatgtgggaggaccctatgggcgctaggggacagtgcatgtccggcgctagcagactgccgtcccttttctcccaaaatatcatccctgagtatggtatgttccaggggatgcgcggtggcggtgccttccccggtggcagtcgtttcggcttcggattcggtaatggcatgaagcaaatgaggcggacttggaaaacctggaccaccgctgatttccgcactaaaaaaaagaaaaggaaacagggcggatctcccgatgagccagattctaaagccacccgcaccgactgttccgataatagtgatagcgacaatgatgagggtaccgagggagaggccactgagggtctggaaggcactgaggctgttgagaaaggtagtagagtcgacggtgaggacgaagaaggtaaagaggacggccgagaagaggggaaagaagacccagagaagggcgctctgacaactcaagatgaaaacggtcagactaagaggaagctgcaggccggaaaaaagagccaggacaaacagaagaaacgccagagggaccgcatggtggagcgcattcagttcgtgtgcagcctttgtaagtaccgtacattttacgaggatgagatggccagccacctggattccaagttccacaaggagcattttaagtatgtaggcaccaagctgccaaagcagactgccgacttcctgcaggagtacgtgaccaataaaaccaagaagacagaggaactgagaaaaacggtcgaggatctcgacggattgatacatcaaatctaccgagaccaggaccttacgcaggagatcgctatggagcatttcgttaagaaggtggaggcagcccactgcgcagcctgtgatctgttcatccccatgcaatttgggattatccaaaaacatttgaagactatggaccacaaccggaatagaagactgatgatggagcagtccaaaaagtcctccctgatggttgcccgaagcattctaaataataagctgattagcaagaaactggagcgctatctaaagggcgaaaatccttttacagattcccctgaggaagaaaaggagcaggaagaggcagagggcggagccctggacgagggcgcacagggcgaggcagcaggtatctcagagggggcagaaggcgtaccagcccagccgcctgtgcctcccgagccagctcccggtgcggtgagtccccctcccccaccaccacccgaggaagaagaggagggggctgtgcccctactcggcggagccctgcagagacagatcaggggaatccctggtcttgatgtcgaagatgacgaggaggggggtgggggagctccctag

SEQ ID NO: 29574 - DNA, 1401 bp, synthetic construct
  source 1..1401: mol_type = other DNA; note = Synthetic coding sequence
atgcgaggacctaacagcggtaccgaaaagggaagacttgtaattccagaaaagcaggggttcgactttctttgtatgccagtgttccaccctagatttaagcgggaatttatccaggagccagccaagaaccgcccaggtccacagactcgatctgacctgttgctgagcggcagggactggaatacgctgatagtcggcaagctgtcgccttggattaggcccgactccaaggttgagaaaataagacggaattctgaagccctggaggttcagtttattatcacgggaaccaatcatcactccgagaaggagttttgctcctacctgcaatatctggagtacttaagtcagaaccggcctccacccaacgcttacgagttgttcgccaaagggtacgaagattatttacaatcccctttgcagcccctgatggataacctcgaatcgcagacttacgaggtgttcgagaaagatccaattaagtactcacagtaccaacaggcaatctacaaatgcttgcttgacagagttcccgaggaggagaaggatactaatgtccaggtgctgatggtgctcggcgcaggccgtggccctctcgtcaatgcctcactacgagcagcaaagcaagctgaccggaggattaaattgtatgccgtggagaagaaccccaatgccgttgtaaccctcgagaactggcaatttgaggagtggggtagtcaggttacggtggtcagctctgatatgagagaatgggtggctccggagaaggcggacattatcgtgagtgagctgctcgggagcttcgctgacaacgagctctcccccgagtgtctggacggggcacaacactttctcaaagacgatggagtcagcatccccggagaatacaccagctttctggcccctatctcatcaagcaagctctataatgaagtgcgcgcatgtagggaaaaagaccgagaccctgaggcacagtttgagatgccctacgtggtgcgacttcataatttccaccaactcagcgcccctcaaccttgttttacattctcacacccaaatcgggatccaatgatagataacaataggtattgtactctggagttccccgtggaggtgaacaccgtacttcatggattcgccggttactttgagaccgtcctgtatcaagatatcacactgagcatacgcccagagactcactcccccggaatgttttcatggtttcccatactttttccaatcaagcagccaatcacagtgagagagggacaaacaatctgtgtgcgattttggagatgcagtaatagcaaaaaagtctggtatgaatgggcagtgactgccccagtctgtagtgcgattcacaacccaacaggccgatcatataccatcgggctctag

SEQ ID NO: 29575 - DNA, 1863 bp, synthetic construct
  source 1..1863: mol_type = other DNA; note = Synthetic coding sequence
atgcgtggccctaactcaggaacagaaaagggccgactggtgatccccgaaaaacaaggattcgatttcctgtgtatgcccgtgttccacccacgattcaagagagaattcattcaggaacctgctaaaaaccgacctggacctcaaacccgcagtgacttgttgctaagtgggagagactggaatactctgattgttggtaagcttagcccatggatcagacctgatagtaaggtggaaaagatcaggcgtaattccgaggccgcaatgctccaagagctgaactttggggcttacctgggattacccgcattcttgctgcccctcaaccaggaggataatacgaatttagccagagtcctgacgaaccatatccatacaggacaccattctagtatgttctggatgcgcgtgccacttgtggctccggaagacctcagggacgatattattgaaaacgccccaacaactcacactgaggagtattcaggagaagagaaaacgtggatgtggtggcacaactttcggacgctgtgcgactatagtaaacgcattgctgtggccctcgaaattggtgccgatttgccgtccaatcatgttattgatagatggttgggggagcctatcaaagctgcgattttgcctacttccatcttcctgaccaataaaaaggggttccctgttttatctaagatgcatcagaggttaatctttcgtttacttaagctcgaagtacaattcataatcaccgggacaaaccatcattccgaaaaggaattctgcagttacctccagtacctcgagtatctgtctcagaatcgccctcctcccaacgcttacgagctgtttgccaagggctacgaggactacctccaaagtcctctgcagcctctcatggataacctcgaatcacagacttacgaagtatttgaaaaggaccccatcaagtattctcaatatcagcaggcaatttacaagtgtctcctcgatcgagttcctgaggaagaaaaagacaccaacgttcaagtgctgatggtacttggggctggaagaggacctctggtgaatgcatctctgagagcagccaaacaggcggaccgccgaatcaagctatatgccgtcgagaaaaaccctaacgcagtggtgacgctggagaactggcagtttgaggagtggggttcccaggtgactgttgtgtcctctgatatgcgggaatgggtggcccctgagaaagctgatattatcgtcagcgagctgctcggttcatttgcggataacgaactctctcctgaatgcctggacggggcacaacacttcctgaaggacgacggagtctcaatacccggtgagtacacttccttcttggctcccatcagcagcagtaagctctacaacgaggtacgagcctgtcgcgagaaggacagggaccccgaggcccagtttgaaatgccctacgtcgtccggctacataacttccatcagttatctgccccacaaccctgcttcacgttctcccaccctaacagagacccaatgatcgacaataatagatactgcactctggaatttcccgtggaggtgaacactgtgttacacgggttcgcaggctactttgagacagtcctctatcaggacataacactttcaatacgtcctgagacccactcacctggtatgttctcgtggttcccgattctgttccctataaagcaaccgataacggtgagagagggccaaaccatctgtgtgagattctggagatgctccaattcgaaaaaagtctggtatgagtgggccgtaaccgccccagtgtgcagcgcaattcataaccctacaggaaggtcatacacgatagggctctag

SEQ ID NO: 29576 - DNA, 2271 bp, synthetic construct
  source 1..2271: mol_type = other DNA; note = Synthetic coding sequence
atgcccagcgtgtccaaggcagccgcagccgctctgagcggctccccgccacagaccgagaaacctacacactaccgctatttgaaagagttcaggaccgaacaatgccctttatttagccaacacaagtgcgcacaacatcggccttttacctgctttcattggcacttccttaaccagcgacggagaaggccgctgaggcgacgggacggtaccttcaattatagtcctgatgtctactgttcgaaatacaacgaggccacaggcgtatgtccagatggagatgagagcctactcggagtgctgtaccctctttgggctccacctcctgttccagctcctgtcggggctccgaccgttcaccccttcttggctagatggttttcccatgtcccctgggagccagccggatctgcagatcctagggcatcctcaactcctgctggagggacgacctgggctacaggcctactgggtgacttcgatgcttgtggttcccagagccgagaatgcgttaagggcgtgtggtggacactgctcggatttcgatgtccctacttacacagaaccacaggtgatacggagagaaagtaccaccttcggtactataaaaccggcacctgcatccacgagaccgacgcacgtggccattgcgtgaagaacggactgcattgtgccttcgcgcacgggcctttggatttgaggcccccagtctgcgacgtcagagagctccaagcacaagaagccctccagaacggtcagctaggtggcggtgaaggtgtgcccgaccttcagccaggagtcctggcgtcccaggcaatgatcgagaagattctttctgaggatcctcgctggcaagcccttctgcccgtcgcgctcctacgccacagagtggcacactttagcgatgcgaattttgttttaggatcgtacaaaactgagcagtgtccgaagccccctcgcctgtgtagacagggctatgcgtgcccgcactaccacaatagccgtgaccggagaagaaacccaaggcggttccagtatagatcaacaccttgtcctagcgtgaaacatggcgatgagtggggcgagccaagtagatgtgacgggggtgacggttgtcagtattgtcactcgaggactgagcagcagttccaccctgaagggcctgtgggctccccagtgagcggcgctttctctgtatttagtcacgctggcctagttgccgacccctctctttggtacccggcagaatggtcctggcaccacgtgggccactcacggaccatcaacccggagggtgacaaaccttctcgcctagggcctgcacccgaaaatattaagcggggtaacgatttcgcttgtgatgggagagcagacgccgcaggaatggccccacatgtgtgtgtattccctatatataaatcaacgaagtgtaacgacatgaggcagacggggtactgtccccgtggaccattctgtgcttttgctcatgtggaaaagtctctcggtatggtaaatgaatggggctgtcatgacctgcaccttacctctccgtcctcaacggggtctggccagccgggaaacgcaaaacgaagggactcaccagcagagggaggccctagagggtcggagcaggattccaaacagggtgtcagggctcatggagtctatgtattcgagcagaaccacctggcggtctttgccgctgtgcatcctcccgctccctccgtgagcagctcggttgcctctagcctggccagttctgctggatccggtagtagctcgcctacagccctgccggcaccaccggctagagccctgcctctgggacctgcttctagtaccgttgaggccgttttggcgttagagcccacaccatcctctcctacctcttccgccgtccagggggttgccggagagctgggtatgggaagcggcggacaggggtgctggtcacatgttgttggagcattggcggcagtgccggcatggacgcatagcggggatctcgagtgggacccaagtaccatacggaccagagtgaacgtcggtggcggtcccgcagcacgaccagctatgactcttgcgagagaaccacagttattggtcgtgggtggctgccccacaaggaattgcagcggacctgcagcctcaccacagcagctcttggatgacgccggtcagggtgggagaggtgaacgcgatagtagtcagagacctctgcggcctcagaccactcatcgacaggatacacgacctgtgccctcatag

SEQ ID NO: 29577 - DNA, 549 bp, synthetic construct
  source 1..549: mol_type = other DNA; note = Synthetic coding sequence
atgacgccccctcaacagccccctccactgaggtctgagcctggcaccctcggttccgctgcctcatcctatagccctcttggtttaaatggggtacctggcagtatttgggattttgtgtcagggtctttctctcccagccctagtcctatcttgtctgccggacctcccagctcatcaagcgctagccccaatggcgcagaactggcaagggtgagacgccagctggacgaggctaaacggaagattcggcagtgggaggaatcctggcagcaggtcaagcaggtctgcgatgcttggcagagagaggcccaggaagccaaggaaagggccagggttgccgatagtgaccgacagcttgccctgcagaagaaggaggaggtcgaggcacaagtcatattccagctgcgcgcaaagcagtgcgtcgcctgtcgggagagggcccatggagccgtgttgaggccctgtcagcatcacatcctctgcgaaccatgtgccgcaaccgctcctgagtgtccctactgcaaaggacaaccgttacagtggtag

SEQ ID NO: 29578 - DNA, 444 bp, synthetic construct
  source 1..444: mol_type = other DNA; note = Synthetic coding sequence
atggaaggagagcccccaccagtcgaggagcgccgaagactgcaagaggaattaaacgagttcgtcgagtctggctgccgcacgctggaggaggtaacagcatcgctaggatgggatttggactcactcgatcccggagaagaagaagctgcagaggatgaagtggtcatttgcccatacgactcaaaccatcacatgccgaaatccagcctggctaagcatatggcaagctgccgcttgagaaagatgggttacactaaggaagaggaagacgagatgtataatcctgaatttttttatgagaacgttaagatccctagcattacattgaataaggacagccagttccagattatcaagcaggccaggaccgccgttggcaaagacagcgattgctacaatcagattatcggggtttcaataaagcgcaactacaaaatttag

SEQ ID NO: 29579 - DNA, 522 bp, synthetic construct
  source 1..522: mol_type = other DNA; note = Synthetic coding sequence
atgggcactttcgatctatggaccgactaccttgggctggcccacctcgttcgggctctcagtggaaaagaagggcctgaaacccgattgagtcctcagccagagccagaacccatgctggaaccggaccagaagaggagtctggaatcaagtcctgccccagagagactctgcagtttctgcaaacacaatggagagtcccgcgctatctaccagagccacgtgctgaaagatgaagccggacgagttctttgccccatcctccgagattatgtgtgtccacagtgcggcgctaccagggaacgcgctcacacaaggcgtttttgccccctgacaggtcagggatacacatctgtttacagtcatacaacaaggaactctgcaggcaaaaagctggtaagaccagataaggcgaagacgcaagataccggccaccgcagggggggtgggggaggggctgggttcaggggcgctggcaagtcagagccgagcccatcatgttcgccaagcatgtcgacttag

SEQ ID NO: 29580 - DNA, 1722 bp, synthetic construct
  source 1..1722: mol_type = other DNA; note = Synthetic coding sequence
atgtctgctttctgcctgggcctggtgggaagagcatctgcgcctgctgaaccagattctgcttgctgcatggaactgcccgctgccgctggagacgccgtgcgtagcccagccgctgccgcagccctgatattcccgggaggctcaggggagctggagttggcactagaagaggagcttgcgcttctcgccgctggtgagaggccttcagacccgggtgagcatccccaggcagaacctgggtcactggctgaaggcgcagggccacagccacccccatcccaagatcccgaactactgtctgtcatccgtcaaaaagagaaggatcttgtgctggcggctaggctgggcaaggctctgcttgagcggaaccaggatatgtccaggcagtacgagcagatgcataaagaactgacagacaagctcgagcatctggaacaggaaaaacacgagctgcgcagacggtttgaaaatcgcgagggggagtgggagggccgtgtttcagaattggaatccgatgtaaagcagctccaggatgagctggagcgccagcagattcatctgcgtgaggccgatagggaaaaatccagggctgtgcaggagttatctgagcagaatcagaggttgctggaccagttgtctcgggcaagcgaagtagagcgccagttatccatgcaggttcatgccctccgagaagacttccgggaaaaaaactcgtctaccaaccagcatattattcggttggagagcctccaggctgaaattaaaatgctgagcgacaggaagcgagaactcgaacatcggttatcagcaaccctagaagaaaatgacctgctgcaggggacagtcgaggaattgcaagaccgcgtgctgatactagaaaggcagggccatgataaggatctacagctgcatcagagccagctcgaattgcaagaagttagactatcctgtaggcagctgcaggtgaaagtcgaagaattgactgaagagagatctctgcaaagcagcgcggcaactagtaccagcctactgtccgagatcgagcagagcatggaagctgaggaactcgaacaggaacgggaacagcttcgccttcagctctgggaggcttactgtcaagtaagatatttgtgtagtcatttacgtgggaacgattcagccgacagtgcagtgtctaccgatagcagcatggacgagagttctgagacatccagcgctaaagacgtgcctgccggttcactcagaaccgccctgaacgaattgaaacgcctgatccagagcattgtggatggcatggagcccactgtgactctgttgtcagtcgaaatgactgcactcaaagaggagagagatagattaagagtcacctccgaggacaaggagcccaaagaacagctgcagaaggccatcagagatagagatgaggccatagctaaaaagaacgctgttgagctggagctcgcgaaatgtaggatggacatgatgtctcttaattctcagctgctagacgccatccaacagaagctcaacttgtcccagcaacttgaggcctggcaggacgacatgcatagagtgattgaccgccaactcatggacacacacctgaaagaaaggtcccagccagcggctgccctctgccgaggtcactcggccggtagaggcgacgagccgagcatagccgagggcaaaaggcttttctccttttttaggaaaatctag

SEQ ID NO: 29581 - DNA, 1086 bp, synthetic construct
  source 1..1086: mol_type = other DNA; note = Synthetic coding sequence
atggccttgaacgttgcccctgtcagagacacaaagtggttgactctggaggtttgccggcagttccagcgcggtacttgtagtcggtccgatgaagagtgtaagttcgcacatccacctaaaagctgtcaggtagagaacggaagagtaattgcctgctttgacagtctaaagggcagatgcagtagagaaaattgtaagtacctgcatccgcctacccatctcaagacacaattagagatcaatggccgaaacaatctgatccagcagaaaacagccgctgccatgctggcacaacagatgcagtttatgtttcctgggactcccctccatcccgtgccgactttccctgttggaccagctatcggtaccaacaccgcaatctctttcgctccctacctagcacccgtgaccccaggagtcggactggttcctacggagattcttccgacaacacctgttatcgttccaggtagtcccccagttacagtgcccggaagtactgcgacccagaagcttttgcgtactgacaaactggaagtgtgtagagaatttcagcgcggaaactgtgccaggggggagaccgattgtaggttcgcccatccagccgatagtacaatgattgacacctcagataacaccgtcaccgtgtgcatggattatatcaaaggaagatgcatgcgtgagaagtgcaaatactttcatccgcctgcccaccttcaggctaagatcaaggccgcacagcaccaggccaatcaggctgcagtggccgcacaggcggcagcggctgcggctacagtgatggcattccccccaggagcccttcatccattgccaaaaagacaggccttagaaaagagtaacggcacctccgccgtgtttaatccctctgtcctccactaccaacaggctttgacttcagctcaactgcagcaacacgccgcatttattcctaccgataactctgagatcatctctcgcaacggaatggaatgtcaggagagtgctctgcggattacaaagcattgttactgtacttattatccagtgagtagtagcattgaactgcctcagacggcatgttag

SEQ ID NO: 29582 - DNA, 3099 bp, synthetic construct
  source 1..3099: mol_type = other DNA; note = Synthetic coding sequence
atggccttcactaactatagctccctcaatcgggcacaactcactttcgagtacctgcacacaaacagtacaacacatgagttcctgttcggggcactggccgaactagtggataatgctcgggacgctgacgctactcgtatcgacatctacgcggagagacgtgaagatctgagaggaggctttatgctctgcttcctggatgacggagctggtatggacccctccgacgcagcctcagttatccagtttggaaagtctgccaagcgcaccccggaaagtacacaaattggccagtatggtaatgggcttaaatccggctcaatgcgcattggcaaggactttatcctctttaccaaaaaagaggataccatgacctgtctctttctgtccagaacattccatgaagaggaaggaatcgatgaggtgattgtgcccttgccgacttggaatgccaggacacgcgagcccgtgactgacaacgttgagaagttcgccatcgagaccgaactcatctataaatatagcccattccggacggaggaagaggtgatgacgcagttcatgaaaattccaggcgacagcggcacgttggtgataattttcaacctgaagctgatggataacggcgagcccgaattagacattatctccaatccacgtgacattcagatggcagagacctcccctgaagggacaaagcctgagcgacgctcatttagagcctatgcagccgtcctatacatagatcctcgcatgcgaatcttcattcatgggcacaaggtacagaccaaaagactatcatgctgtttgtataagcctaggatgtataagtatacctcttctagattcaagactcgcgcagaacaggaagtcaagaaggcagaacatgtggcccgaatagccgaagaaaaggccagagaagccgaatctaaggcacgaaccttagaggttcggttaggcggtgatttgactcgggattctcgcgtgatgctccgccaggtgcaaaacagggcaattactctgcgaagagaggcagatgtgaagaagaggatcaaggaagctaagcagcgagccctgaaggaaccaaaggaactgaactttgttttcggggtgaacattgaacacagagaccttgacggaatgttcatctataattgctcccgcttgattaaaatgtatgagaaagtgggcccacagctggaaggcggtatggcctgtggcggagtggtaggggtcgttgacgtaccctatctggtgctcgagcccacacacaataaacaggattttgccgatgcaaaagagtataggcacctgctgcgagccatgggagaacacttggcccagtactggaaggatatagcgatcgcccaacggggaattatcaagttctgggatgaattcggatacctgtccgctaactggaatcagcctccaagctccgaactccggtacaagaggcgacgggctatggagataccgaccaccatccaatgtgacctttgcctaaaatggcgtacgctgccatttcagctgtcttctgttgagaaggactaccctgatacctgggtttgcagcatgaatcctgacccggagcaggatagatgcgaggcttcagagcaaaagcagaaggtacccctcggtacttttaggaaggatatgaagacccaagaggagaagcagaagcagctgactgaaaaaatcaggcagcaacaggaaaaacttgaggcactgcagaagacgacgcccattcggtcccaagctgatctgaagaagctccctctggaggtaacgacgcggcctagtaccgaagagcctgtgaggcgacctcagaggcctagatcaccccctcttcccgcagtgatccggaacgctccttcaaggcctccatcattgccgacacctagacccgcttcacagcccagaaaagctcctgtgatcagtagtacacctaaactgcctgccctggctgctcgtgaagaggcctcgaccagccgactcctgcagccacccgaagcacctagaaagcccgctaacacgcttgtgaagactgcctcacggccagctcccctggtgcagcagctgtcccctagcctgctgcctaatagtaaaagtcctcgtgaggtgccatcccccaaggtcatcaagacaccggtagtgaagaagaccgagtcccctattaaattgtcccctgccacaccctccagaaaacggtctgtagccgtctctgatgaggaagaggttgaggaagaagcagaacggaggaaagagcgatgtaagcgcggtcgcttcgttgtcaaggaggagaaaaaagattctaatgagctcagtgattcggccggagaagaggatagcgcggatttgaaaagggctcagaaggataagggacttcacgtggaggtgagggtgaaccgagagtggtatacaggtagagtgacggcggtagaggtgggcaagcacgtagtgagatggaaagttaagtttgactatgttccaactgataccactcccagggacaggtgggtggaaaaagggagcgaggacgtgaggcttatgaaacctccgtcaccagaacaccagtccttggacacacagcaagagggaggggaggaagaagtcgggcctgttgcgcagcaggccatcgctgtcgccgagccctcgacatcagagtgtctgaggattgagcctgacaccacagcactgtcaactaatcatgaaactatagatctgctagtgcaaattctccggaattgcttacgctacttcctgccgccttcattcccaatcagcaagaaacaactgtccgcgatgaatagtgatgagctcataagtttcccactcaaggaatactttaaacagtacgaggtcgggttacagaacctgtgtaattcctaccagtcaagagcagattcacgggctaaggcttctgaggagagtttaaggacatccgagcgtaagcttcgcgagactgaagagaagttacagaagctccggaccaacattgttgccctactgcaaaaagttcaggaggatatagacataaacacggacgatgaactggacgcctatatcgaggacttgataacgaaaggggactag

SEQ ID NO: 29583 - DNA, 5942 bp, synthetic construct
  source 1..5942: mol_type = other DNA; note = Synthetic coding sequence
atgaatccaaccaatcccttcagcggtcagcagccttcagcattttccgcatccagttctaatgtcggcaccctgccatccaagcccccatttcggttcggacagccttccctgttcgggcagaactccacgctgtcaggtaaatcttcgggatttagccaggtctccagctttcctgccagtagtggagtgtcacactcgagtagcgtgcagacgttgggcttcacccagactagtagcgtgggccctttcagcggcctagaacatacgtctacgtttgtcgccaccagtggcccatcctcgagcagtgtcttggggaataccggtttttcttttaagtccccaacctctgtgggggcattccccagcacatctgccttcggacaggaagccggagagatcgttaattccggctttggaaagaccgaattttccttcaaacctctagagaacgctgtcttcaagcctatcctgggggcagagtccgaaccagaaaagactcaatcccagatcgcttccgggttctttacctttagccacccaatcagttccgctcccggaggcctcgccccatttagctttccacaagtgaccagctccagtgctactacctctaactttaccttttctaagcccgtgagcagcaacaacagtctgagtgcgttcacccccgcattatcaaaccagaatgtggaggaggagaaaaggggacccaaaagcatcttcgggtcaagcaataattctttctcttcttttcctgtgtcatccgccgtgctgggagagccctttcaagcttcgaaagccggagtgcggcaaggctgtgaggaagctgtgagccaggtggagccgctcccatcgttgatgaagggcttaaagagaaaggaagatcaggaccgttcacctagaaggcacgggcacgaacctgccgaagacagtgaccctcttagcaggggggaccatccgcctgataagagacccgtgcgtcttaaccggccacggggagggacgctgtttggacggacaattcaggatgtattcaagagcaataaggaggtggggagactcggcaacaaggaggcaaagaaggaaactgggttcgtagagagcgctgagtcagaccacatggcaataccaggaggaaatcagtccgtgctcgccccatcgaggattcctggcgtgaataaggaggaggaaacagaatctcgggaaaagaaagaagattctctgcggggaacccctgcaaggcagagcaacaggtctgagtctacagattcactgggcggtctgagtccttcggaagttacagccattcagtgcaaaaatatccctgactacctcaatgatagaaccatactggaaaatcacttcggcaagattgcaaaagtgcaaaggatttttacacgcagatctaaaaagctggccgttgtccactttttcgatcacgcaagtgcggcactggctaggaaaaagggcaaaagcctgcacaaggatatggctatcttctggcaccgtaagaaaatctctcccaataaaaaaccattttctctgaaggagaaaaagcccggagatggagaggtcagcccctccacagaggatgcgcctttccagcactctccactggggaaggctgccggtagaactggcgcaagctctctgctgaacaaatccagccccgtcaagaagccatccctattaaaggctcaccagttcgagggagacagttttgacagcgcctctgagggctccgagggactcgggccatgtgttctgagtctgtcaactttaatcggcacagtcgctgaaacaagcaaggagaagtatcgactgctggaccaacgagacaggatcatgcgacaggccagggtgaagcgcactgatctagacaaagccaggacgtttgtcggcacttgcctggacatgtgcccagaaaaggagcgttacatgcgggaaacacggtcccagttgagcgtcttcgaggtagtaccaggaaccgaccaagtcgaccacgcagctgcagtgaaggaatactctcggtcctcagccgaccaagaggaaccacttccccacgagttaagacccctacccgtgctgtcaagaactatggactatctggttactcagattatggatcagaaggagggttcactgcgtgactggtatgacttcgtctggaatcggacacggggaattaggaaagacatcacacagcaacatttgtgtgacccactcacagtgtctctgattgaaaaatgcacaaggtttcacatccattgtgctcacttcatgtgcgaggagcccatgtctagtttcgatgctaagatcaataatgaaaatatgaccaaatgtctgcaatccctaaaggagatgtatcaagacctgagaaataaaggggtgttctgcgccagtgaggccgagttccagggatataacgtgctcctgagcctgaacaagggagacatcctgcgcgaggttcagcagttccaccctgccgtgcggaattcttctgaggtcaaattcgctgttcaggcgtttgcagctctgaacagcaacaatttcgtgagatttttcaagctggtgcaaagcgctagttatctcaatgcttgtctgcttcactgctattttagtcagatacgcaaagatgcattgcgggctctcaacttcgcatacaccgtttctacacagaggagcacaatatttcccctggacggggtggttcggatgttgctgttcagggactgcgaagaagcaacagatttcctgacgtgccatggactgactgtaagtgatggctgtgtcgaacttaatagaagtgcatttctggaacctgagggcctgagtaagacccgtaaatcagtgttcatcacgcgaaaactgactgtcagcgttggtgagattgtaaatggcggacctctccctccagttcctcgccacaccccagtatgttcattcaacagccagaacaaatatattggagaatcgttggccgctgaacttcctgtttctacccagcggccaggttccgatacagtagggggaggccgtggagaagagtgcggcgtggagccggatgcgccattgtcaagtctcccccagtctcttccagctcctgctcccagcccagtgccactgcctccggtgcttgcactgaccccatcagtcgcccctagtctgtttcaactctctgtccagccagagcccccaccgccagaacccgtgcctatgtacagcgacgaagacctcgcccaagtggtcgatgagttgatccaagaagctctccaaagggactgtgaggaggtgggcagcgccggtgcggcttatgccgcagccgctctgggcgtctccaatgccgctatggaggacctactgactgcggcaaccactggaatcctgaggcatatagcggctgaagaagtttccaaggagcgggagcggcgtgaacaggagcgccagagagccgaggaggaacggctaaaacaggaaagagagctggtgctgtccgagctcagccagggcctcgcagtggaactcatggaaagagttatgatggagtttgtgcgagaaacttgctctcaggaactgaaaaacgccgtagagacagatcagcgggtgcgagttgcacgctgctgcgaggacgtgtgcgcccatctggtggacctttttctcgtggaagaaattttccagacagcgaaagaaaccctccaagagctgcaatgcttctgcaagtatttgcaacgctggcgcgaggccgtgactgcaaggaaaaagctaaggaggcagatgagagcatttcctgccgcaccatgttgtgtggatgttagtgaccggcttcgcgctctggcaccatctgccgagtgccccatagccgaggagaatctggccagagggctgctcgacttgggccatgccggaagacttggcatttcctgtacgcgactgagacgcttgaggaacaagactgcccaccaaatgaaagtgcagcacttctatcagcaactgctctccgacgtagcatgggcttccttagacttgccttccctagtggcagagcacctacccggacggcaggaacacgttttttggaaactggtgcttgtgctgcctgacgtcgaggagcaaagccccgaatcctgcggccgaatcttagcaaattggctgaaggtgaagtttatgggtgacgaaggatcagtagacgacacttcctcagatgccggaggtatccagacactctcactgttcaactcactgagctctaagggggaccagatgatctcagtcaatgtctgcataaaggtagcacatggtgctctaagcgacggagctatcgacgccgtggagacccagaaggatcttcttggagcgtctgggcttatgctcctcttacccccaaagatgaaaagtgaagacatggctgaagaagacgtgtactggctctcagccctgctgcaactgaaacagctgctccaggctaagcccttccagccagccctcccactggtggttttggtgccctctccaggaggcgatgcagtggagaaggaggtggaagatgggttgatgctacaggacctggtttcggccaagctcataagtgactataccgttactgaaatacctgacaccattaatgacttgcagggcagcacgaaagtactgcaggcagtgcaatggctagtaagccactgtcctcacagtttagatttgtgttgtcaaacactgattcaatatgtcgaggacgggatcgggcatgagttcagtggacgtttttttcacgacagaagggagcgacgcctgggcggtctggcctctcaggagccaggtgcgattatcgaactgtttaattcagtattgcagttcctggcatccgtcgtctccagcgagcagttatgcgacctgagttggccagtcaccgagttcgcagaagctggcggatcacgtctgctgccgcatctgcattggaacgcccctgagcacctggcctggctgaaacaagcagtcctgggtttccaactcccgcaaatggacctgcccccactcggagctccatggctgccggtgtgcagtatggtcgtccagtacgcaagccagatcccgtcttctcggcagacccagcctgtgctgcagagccaggttgagaaccttcttcaccgtacatattgtcgctggaagagtaagtcaccatctccggtgcacggcgcaggacccagcgtgatggagataccctgggatgatctgatagccctttgcatcaaccataaactgcgggattggactcctcctaggcttcctgtgacttctgaggccctgagtgaggacggccaaatctgcgtgtacttttttaagaatgacctgaagaagtacgatgtgcccctgagttgggagcaggcaaggcttcaaacccagaaagagctccagttgcgagaaggtcggctggcaattaagcccttccacccctcggcaaataatttcccgattcctttactgcacatgcaccggaactggaaaaggagcacagagtgtgcccaagaagggagaatccccagcactgaagacctgatgaggggggcaagcgcagaagaactcttggctcagtgccttagtagcagcctcctgctcgagaaagaagagaacaagagatttgaagatcaacttcaacagtggcttagcgaggattcaggagcctttacagatttgactagcttgcctctctatctgccacagactctggtcagtctatcacataccatagaaccggtgatgaagacttcggtcaccacgagcccccaaagcgatatgatgcgcgaacagttacagcttagcgaggccaccgggacatgcttaggggagagacttaagcaccttgagcgcttgatcagatcgagtcgcgaggaggaggtggccagtgagctacacctctccgccctcctggatatggtcgacattta

SEQ ID NO: 29584 - DNA, 513 bp, synthetic construct
  source 1..513: mol_type = other DNA; note = Synthetic coding sequence
atggggaaacgttacttctgcgactactgtgacagaagcttccaagacaaccttcacaaccgcaaaaagcatcttaatgggctccagcaccttaaagccaagaaagtctggtacgatatgttcagggatgccgcagcaatcctgctggacgaacagaataagagaccctgccgaaagttcctattgacaggtcaatgtgatttcgggagcaactgtagattttctcatatgtctgaacgagacttgcaggaattgagcatacaggtggaagaggaaaggagagccagggagtggctccttgatgctcccgagcttcccgaggggcacttggaggattggctggaaaagagggccaaacgtctgtcatccgcacctagctcccgagcagagcccattcggaccaccgtgtttcagtaccccgtgggctggcctcccgtgcaggagctcccccctagtctgagggcacctccaccgggaggctggccactgcagccgagggtgcaatggggctag

SEQ ID NO: 29585 - DNA, 291 bp, synthetic construct
  source 1..291: mol_type = other DNA; note = Synthetic coding sequence
atgtgccatacatcctgcagtcccgcatgccaacctacttgctgcatccacagcccctgtcaggccagctgctatgtgcccgtgtcatgtcagagttcagtttgtatgccagtatcttgcacgcgaatcgtgtgtgtcgcaccatcttgccagccaagcgtctgcgtgcccgtgagctgtagaccaataatatatgttactcctagctgtcagagctccgggtgttgccagccaccttgcaccactgcactatgtagaccgatcagctgctcaacgcccagctgttgctag

SEQ ID NO: 29586 - DNA, 879 bp, synthetic construct
  source 1..879: mol_type = other DNA; note = Synthetic coding sequence
atggcagcctcgacgatgtcaatacgctctagtgcctattccgatagttggcaggtggacgattgtccagagtcatgttgtgagccaccctgttgtgcaactagctgttgcgcaccggctccttgcctgacattagtgtgtactccagtctccagggtgagctccccttgctgccaggtaacatgcgagccttccccctgtcagagtgggtgtacatcatcatgcaccccctcttgttgccagcagagcagctgtcagccagcatattgtacatcgagtccgtgtcaacaggcatgctgtgtgcctgtgtgctgtaagcccgtgtgttgcgtaccagtgtgctgcggtgcttcctcttgctgccaacagagttcctaccaacctgcgtgctgcgcgtcctccagctgccaacccgcttgctgtgtccctgtctgctgtaaacctgtgtgttgcgcccctacttgcagcgaggacagctactcctgttgtcagcagtcttcttgtcagcccgcttgttgcaccagctcaccgtgtcagcaatcctactgcgtgccagtatgctgtaagcctgtgtgttgtaaaccaatctgctgtgtgcccgtgtgctccggagccagtagcctatgttgtcaacagtcagggtgccagccagcatgctgcactacatcctgctgccgcccatcctcttctgtatcgttactgtgtagacccgtgtgccggccagcttgttgcgtgccggtctctagctgctgcgcgcctacgtccagtcgccagccttcctattgccggcaagcgagttgcgtatcgcttctctgtcggcctgtttgtagccgtccagcatgctactcattctcatccggacaaaagagctcctgctag

SEQ ID NO: 29587 - DNA, 1608 bp, synthetic construct
  source 1..1608: mol_type = other DNA; note = Synthetic coding sequence
atgaagaagataagtctgaaaacgctgcgtaaaagttttaatctaaacaaatctaaagaggagaccgattttatggttgtgcagcagccttccctcgctagcgattttggcaaagacgattccctctttgggagctgctatggaaaggacatggcctcgtgtgacatcaacggcgaggatgagaaggggggtaaaaatagaagcaaatctgaatctctgatgggcaccctcaagcgaagactctccgcgaagcagaagagtaagggtaaggctgggacacccagcgggtcctccgccgatgaagataccttttcatcctcttcggctcctatcgtgtttaaggatgtccgggcacagaggccaattaggtccacatcattaaggtcccaccactatagccctgccccttggcccctgaggccaactaactccgaagagacttgcattaagatggaagttcgcgtcaaagccctagtgcattcctccagtccttcacccgctctgaatggcgtgcggaaagatttccacgatctgcagagcgagactacttgtcaggaacaggccaattctttgaaatcgtccgcctcccacaacggagacctccacctgcacctcgacgagcacgtgccggtggttatcggattgatgccacaggactacatccagtatactgtgcccctggatgaaggaatgtaccccttagagggctcaaggagctactgtctggactcctcatctcctatggaagtgtctgcagtaccccctcaggtgggtggccgagcttttcccgaggatgagagccaggtggaccaagacctagtggtggcacctgaaatattcgtggaccagtcagtgaatggtctcctgattggaaccacaggggtgatgttgcaatctccaagagctgggcacgatgatgtgcccccactctcccccttgctgcctccgatgcaaaataaccagatccaacgaaacttctctggtctgactggcacagaggcccatgtggccgaatccatgcgctgccacttgaattttgacccaaacagcgccccaggtgtggcacgggtttatgactcagtacagagttccgggcctatggtagtcacctccctgacagaggaactcaaaaagctcgctaagcagggctggtactggggtccaatcacccgctgggaagcggaaggcaagttggccaacgtgcccgatggctctttcctggtcagggacagtagcgacgatcggtatctgctctcgctgtccttccgaagtcacggtaagacactacatacgagaatcgagcacagcaacggtcgcttctcattttatgagcaacctgatgtcgagggccacacttctatcgtcgacctgattgagcattctatacgcgactccgagaacggagctttttgctacagtcgatcccgcttgccagggtccgcaacgtacccagttagactgacaaatcccgtatcgcgcttcatgcaggtgcggtctctccagtatctttgtaggtttgtgatccggcaatataccaggattgacttgatccagaaactgcctttacccaataaaatgaaggattatctccaggaaaaacattactag

SEQ ID NO: 29588 - DNA, 1260 bp, synthetic construct
  source 1..1260: mol_type = other DNA; note = Synthetic coding sequence
atggccgcaagttctcttgaacagaagctgtcccgccttgaggcaaaattaaaacaggagaacagagaagccagaagaaggatcgatcttaatctggacataagcccccaacgtcccagacctaccctgcagttaccgctggctaatgacggaggatcaagatcaccaagtagtgaatcatcaccccaacaccccaccccccctgcgaggccgagacacatgctagggcttcccagcacgttattcactccgcgttccatggaatctatcgaaatcgatcaaaaacttcaagagatcatgaagcagacgggatacctcacaattggaggccagagatatcaggccgaaatcaatgatctggagaacttgggtgaaatgggcagcggcacatgcgggcaagtgtggaaaatgaggttcagaaagacaggacacgtaatcgccgtaaaacaaatgcgtaggtctggcaataaagaggagaacaagcgaatcctgatggacctcgatgtggtgctaaagtcccacgactgtccttacattgtgcaatgttttggcacctttatcaccaataccgacgtgtttatagccatggaacttatgggaacttgtgccgaaaagttgaaaaaaagaatgcaagggccaatccctgagcgcatactggggaagatgactgtggcaatcgtcaaggccctttactacctgaaagaaaagcacggggtcatccatcgggatgttaagcccagtaacatactcctcgatgagcggggacaaattaaactgtgcgacttcgggatttctggtcgcctcgttgattccaaagctaagactaggtccgctgggtgtgccgcatatatggcaccagagcgcattgacccccctgatccaaccaagcctgactatgacattagggcagacgtctggtcactgggtatcagtctggtggagcttgctactgggcagttcccctataagaattgcaagaccgacttcgaagtgcttactaaagtcctacaggaggagccccctttgttgccaggtcatatggggttcagcggcgatttccagtcattcgtgaaggactgcttgacaaaggaccatcgcaagcgaccaaaatataacaagctgctggaacatagtttcattaaacggtacgagacgctggaggtcgatgtggcttcttggttcaaagatgtgatggccaagaccgaatctccacggacctccggcgtgttgtcacagccacatctgcctttctttagatag

SEQ ID NO: 29589 - DNA, 963 bp, synthetic construct
  source 1..963: mol_type = other DNA; note = Synthetic coding sequence
atgtcaaagtccgcatccccgaaagaacccgaacagctgaggaaactgttcatcggagggctctctttcgaaaccaccgatgagtctttgcgatctcattttgaacagtgggggactcttactgactgcgttgtgatgcgggatcctaacactaagagatcaagaggttttgggtttgtgacatacgctactgtggaagaagtggatgcagcgatgaataccacccctcataaggtcgacgggcgagtggtggaaccaaagcgggctgtctctcgcgaggactcacaaaggccgggtgcccacctgaccgtgaaaaagatctttgtggggggaataaaggaggataccgaggagcatcatctgcgcgattactttgaacaatatggaaagatcgaggtgatcgagatcatgactgacagagggtcgggcaaaaagcggggttttgcgtttgtgacatttgacgaccatgacagcgtggacaaaattgttatacagaagtaccacactgttaaaggtcataactgtgaagttcggaaagctctgcccaaacaggagatggcttcggcctcatccagtcagcgcggacggcgaggctctggcaattttgggggaggcaggggtgacggttttggcggaaacgataatttcggccgtggcggaaatttttctgggcgtgggggttttggcggaagttgtggtggagggggttacggcggttctggtgatggctacaacggattcggcaacgacggctctaactttgggggaggcggttcatataacgattttggtaactacaacaaccagagttccaactttggccctatgaaagggggtaactttggcggtagatcctctggaccatacggaggcggtggacaatatttcgccaagcctcagaaccaaggaggctacggggtgagcagctcaagctcgtcctacggctctggcaggaggttttag

SEQ ID NO: 29590 - DNA, 1737 bp, synthetic construct
  source 1..1737: mol_type = other DNA; note = Synthetic coding sequence
atggaactcgaaaatattgtcgccaatagcctgctgctgaaagcaagacagggcggatacgggaagaagtctggcaggagcaaaaaatggaaggaaattctgactttgccgccagtgtcccagtgctctgaactgcggcactctatcgagaaagattactcttcactgtgtgacaaacagcctatcggacggagactgttcagacagttttgcgacacaaaacccactctgaagcgccacatcgaatttcttgatgccgtggccgaatatgaggtggccgacgatgaggacaggtccgattgcggtctaagcattttggaccgcttcttcaacgacaaacttgctgctcctctcccagagatcccacctgatgtcgtgactgaatgtcgactgggcctcaaggaggagaacccctccaagaaagcctttgaggagtgcactcgggtcgcccataattatcttcggggtgaaccatttgaggaatatcaggaaagttcatacttttctcagtttctgcagtggaagtggctcgaacgccagccggtgaccaaaaatacgttccgtcactacagagtcctcgggaaagggggattcggggaggtttgcgcctgccaggttcgagctactggtaaaatgtatgcttgcaaaaagctgcaaaagaagaggattaagaagaggaaaggagaagccatggcattaaatgagaagaggatactggaaaaggtgcagagccggttcgtcgtgagcctcgcgtatgcatacgagaccaaagacgctctgtgcctggtcttgacgatcatgaatggtggagatttgaaattccatatatataacctggggaatcccggtttcgacgagcaacgagctgtcttctacgcagccgaactctgctgcggactggaagacttacagagggaaaggattgtttatcgcgatctgaagcctgagaacattctgctggatgacaggggccatattcgcatttccgatctgggcctggccaccgaaatccctgaaggacagcgcgtccggggtcgggttggcactgtcggctatatggcgcctgaagtcgtcaacaacgagaaatacacctttagccccgattggtggggtcttggatgtctcatttatgaaatgatccagggccacagtccattcaaaaaatataaggagaaggttaagtgggaggaagtggatcagagaattaagaatgacacagaggagtattccgaaaaattctctgaggacgcgaagtccatttgccgcatgttgcttacgaagaacccctcgaagcgcttgggatgccgaggggaaggcgcagccggtgttaaacagcacccagttttcaaagatatcaactttcgtaggctggaggccaacatgcttgaaccgccattttgccccgatcctcacgccgtgtattgtaaggatgtgttggatattgaacagttctctgtggtgaagggaatataccttgacaccgcggacgaagatttttatgcaaggtttgctaccgggtgcgtttccatcccttggcaaaatgaaatgatagaatcgggatgcttcaaggatatcaataagtccgagtctgaggaagctctgcccctggacctcgataagaacattcacacccccgtctcgagaccaaaccgaggcttcttctacaggttgttccgaagggggggatgtctgacaatggtaccttccgaaaaagaagtggagcccaagcagtgctag

SEQ ID NO: 29591 - DNA, 2625 bp, synthetic construct
  source 1..2625: mol_type = other DNA; note = Synthetic coding sequence
atgaaccaacgctctcatttaggtaccacttatctggacaccgcaaagggcgcagtggaaacctttatgaagctcagagctagagatccagcatcgagaggagatcgctatatgctggtaacatttgaggagccaccctatgcaatcaaagcaggatggaaggagaaccacgcaacatttatgaatgaactgaagaatctccaggccgagggcctcacaaccctcggccagtctctccgcacggctttcgacctcctcaacctcaaccggttggtgactggcattgacaattatggccaagggcgtaacccattcttccttgaaccagccattattattactataactgatggttcaaagcttacaaccacctcaggggtgcaagacgaactacatctgcctctcaactccccactccccggatctgagcttacaaaagagccattccggtgggatcagcgcctgttcgccctcgtgctacgactcccgggtaccatgagtgtcgaaagtgaacaattaaccggcgtcccactcgacgactccgcgattactccaatgtgtgaagtaaccgggggaagatcttactctgtgtgtagccctagaatgctgaaccagtgcctcgaaagtctagtgcagaaagttcagagcggagtggtcattaattttgagaaggccggtccggatccatcacctgtcgaagatggacagcccgatatctcacgcccttttggcagccagccctggcattcctgtcacaagcttatttatgtacggccaaaccccaagaccggagtgcccatcgggcactggccagttccagagtcattttggcctgaccagaattctccgaccttgcccccacgaacttctcacccagtggtcaaattcagctgtactgactgcgaaccaatggttatagacaagctgccttttgacaagtatgagctggagccctctccattaactcagtttattttggagcggaaatcccctcaaacctgttggcaggtgtacgtctctaattccgctaagtactcagaactgggtcacccatttggttatttgaaagcctctacagcccttaattgcgttaacctctttgtcatgccctacaattatccggtgttgttgcctctattggatgatctgtttaaagtgcacaaagccaagccaaccctgaagtggcgtcagtcatttgagagctatctgaagaccatgccaccatactatctgggaccgctgaaaaaggccgtccgaatgatgggggctccgaatctcatagcagattctatggaatacggactgtcctacagcgtgatttcctacttgaaaaagttgtcccaacaggccaagattgaatcagatagagtgatcggttcagtcggaaagaaagtggtgcaggaaacaggaattaaagtgcggtcccgtagccatggcttatccatggcttacagaaaagacttccaacaactgctccagggcatcagtgaagatgtgccccacagactgctagacttaaatatgaaggagtacacagggtttcaagtggcacttctaaataaggacttaaaaccacaaacgttccgcaatgcctatgacattccgagaaggaaccttctcgaccatttaacgaggatgaggagtaatctgctcaaatcgacacgacgcttcctcaagggtcaggatgaagatcaagtgcatagcgttccaatagcccagatggggaattatcaggagtatctaaaacaggttcctagtcccctcagagagctcgatcccgaccagcctagaagactccacactttcggtaatccattcaagctggacaaaaagggcatgatgatcgatgaggccgatgagtttgtggcagggccacagaacaaacacaaacgcccaggcgaacctaacatgcaggggatccctaagagacgtaggtgtatgagtcctctcctgcgaggacgccagcagaacccagtagtcaacaaccatattggcggtaaaggtcccccagcccctacgacgcaggcacagcccgacctcataaaacctttgcctctccataagataagtgagaccaccaatgacagtattattcacgatgtggttgagaatcacgtggccgatcaattgtctagcgacattacaccaaacgcaatggacacagaattttccgcctcttcgcctgcctctctgttggagcggcctaccaaccacatggaggccctgggccatgatcatcttggaacaaacgacttaaccgtggggggattcctcgagaatcatgaagagccaagggacaaggaacagtgtgcggaggaaaacattccagctagctcactgaataaggggaagaagctcatgcactgtcgctcgcacgaggaagtgaacacagagctgaaggctcaaattatgaaagaaatccgaaagcctggcaggaagtatgaacgaattttcaccctgttaaagcatgtgcaaggttcactgcagacacgactcatatttcttcaaaacgttattaaggaggccagcagattcaagaagaggatgctgatcgagcagctcgaaaacttcctcgacgagatccacaggagagcaaatcaaatcaatcatatcaactcaaactag

SEQ ID NO: 29592 - DNA, 2340 bp, synthetic construct
  source 1..2340: mol_type = other DNA; note = Synthetic coding sequence
atggccgattactccaacaaactgtattaccaacttgagcaggagaccggaattcagaccggctatacccgcactggttccattttcctcgctcagacccaagaccggctaatcagcctaaagcgcatcaatgcaggtctgaacgtgatcgggatcccttcagaaatcatctcgcccaagaaggttgccgagttacaccatcttctcaatgttcatgatctggtgggcgcaatgcacgtacctgaagacgctgtggtatcttctgcggatgttgccctggccctggcgagcgcggcaagtcagaacggggtacagatctatgatcgcacatcggtattacatgtgatggtgaagaaggggcaggtgaccggagtggaaaccgataagggccagatcgaatgccagtatttcgtcaactgtgcagggcagtgggcctatgagctgggactgtccaacgaagagcctgtttctattcccctccacgcctgcgagcacttttatctgctgaccaggccgctggagacacctctccagtccagcacccctacgatcgtcgatgccgatggtaggatctacattcgcaactggcaaggagggattctcagtggaggatttgaaaagaatccaaaacctatatttactgaggggaaaaatcagttagaaatacagaacctccaggaggattgggatcacttcgagccgctccttagctccctcctgcgaaggatgccggaactggagacactcgaaattatgaaactcgtcaactgtcctgagacttttaccccagacatgcggtgcatcatgggcgaatcacctgcagtccaggggtattttgtactggctggcatgaatagtgctggcctgtcttttgggggtggcgctggaaagtatcttgcagaatggatggttcatggctacccctctgagaatgtttgggaactcgaccttaagcgcttcggcgctctccagagttcccgcacctttctgcgtcatagagtgatggaagtcatgcctttgatgtatgacctcaaggtgcctagatgggatttccagacaggaagacagcttcgaacctctcctttatatgatcgattggacgcacagggcgctcggtggatggagaaacacggcttcgagcggccaaaatactttgtgcctcctgataaagatctgctagccctcgagcaaagtaagacattctataaaccagattggttcgacatagtcgaaagtgaagtgaaatgctgtaaggaagccgtgtgcgtgatagacatgagttcgtttacgaagttcgaaattacatccactggtgaccaggccctcgaggtgctgcagtatctttttagtaatgacctcgacgtgccagtgggacatatcgtgcacaccgggatgcttaatgaggggggagggtatgagaatgactgttctattgcaagactcaacaaacgatctttcttcatgatctcaccaacggatcagcaggtgcactgctgggcctggcttaagaaacacatgcctaaggactccaatctattactggaagatgtgacctggaagtacacagcgctgaacctcatcggcccacgggcagtggatgtactctccgagctttcctatgcacccatgactccagaccactttccttctctgttctgtaaggagatgtcggtgggatacgccaacggtatccgcgtgatgtcaatgacacacacaggagagcctggcttcatgttgtacattccgatcgagtatgcactccatgtctacaacgaagtgatgtccgttggacagaagtacggaatacggaacgctggttattacgccttgagaagcctccggattgagaagtttttcgcattttgggggcaggacatcaacaacctgactaccccacttgagtgtggtagagaatcccgtgtgaagctcgaaaaaggtatggatttcattgggcgagatgcccttttgcagcaaaagcagaatggagtttacaagcggctgaccatgtttatcctggatgatcatgacagtgatctcgacctctggccctggtggggtgaaccaatttataggaatggacaatatgtcggtaagacaacttcaagtgcttattcctattccctggagagacacgtgtgccttggctttgtgcataatttttctgaagatactggagaggagcaagtggttactgctgattttataaacagaggagagtacgagatagacatagctggctatagatttcaggctaaagcgaagctttaccctgtcgcgtctttgtttacacaaaaacgcagaaaagatgatatggagctaagcgacttacacggaaaatag

SEQ ID NO: 29593 - DNA, 1191 bp, synthetic construct
  source 1..1191: mol_type = other DNA; note = Synthetic coding sequence
atggccaccagagtggaagaagccgcacgaggcaggggagggggagccgaagaagccactgaagccggaaggggtggcaggcggagaagcccacgtcaaaaacttgaagagtcgcgcagcgttcagaagcaaatgaaaatactccagaaaaagcaagctcagatcgttaaagagaaagtccatttgcagagtgagcactccaaggccatcttggcccgaagcaaactagagtctttatgtcgagaactgcagcgccacaacaaaacactgaaggaggagaacatgcagcaggccagggaggaggaggaacggcgtaaggaggccaccgcccacttccagattaccctgaacgaaatccaggcacagctggagcagcacgatatacataatgccaaactgaggcaggagaatatcgagttgggtgaaaaactgaaaaagctcatagagcagtacgctctcagagaagaacatattgacaaagttttcaagcacaaggaacttcagcaacagttggtagacgctaaattacagcagactacccagctgatcaaggaggctgacgaaaaacatcaacgggagcgggaatttctgctgaaggaagccacggagtccaggcataagtatgagcagatgaagcagcaagaggtgcagctgaagcagcagctgtctctgtatatggataagtttgaagagttccagacaacaatggccaagtccaatgagctgtttactacgtttaggcaggagatggagaagatgacgaagaagataaagaaactggaaaaagaaacgattatttggcgtactaagtgggagaacaacaacaaagccctgctgcagatggcagaggaaaaaacggtacgagacaaggagtacaaagcacttcaaataaagctggagcgactagagaagctgtgccgtgctctgcagactgaaaggaatgaactgaatgagaaagtggaggtcctgaaggagcaagtgtccataaaggcagccatcaaagccgctaatagggacctggcaactcccgtgatgcagccttgcacggcccttgactcacacaaggagcttaacacctctagcaaacgcgctctgggcgctcacctggaggcagaaccaaaatcacagagaagtgcagtacagaagcccccatccacagggagtgcacccgcaattgagtcagtcgactag

SEQ ID NO: 29594 - DNA, 1443 bp, synthetic construct
  source 1..1443: mol_type = other DNA; note = Synthetic coding sequence
atggcagggtaccttagcgagagcgacttcgtaatggttgaagaaggatttagcactcgcgacttgttaaaggaactgaccctgggagcatctcaggccaccaccgacgaggttgccgctttctttgtggctgacctcggggcaattgtccgcaagcacttttgcttccttaaatgtctgcctagggtgaggccattttacgcagtgaagtgcaactcaagcccaggagtgttaaaagtattggcacagcttggcctcggcttttcatgcgcaaacaaagccgagatggaacttgtccagcatatcggcattcctgcctccaaaatcatctgcgccaacccttgcaagcagattgcacagataaagtacgctgccaagcatgggatccaacttttgtcattcgacaatgaaatggagcttgccaaggtcgtgaagtcccacccctctgctaaaatggtgctgtgcatcgccactgacgacagtcattctctctcttgtctttctcttaagttcggagtgagcctgaagagctgtcggcatctgttggagaatgccaagaaacaccacgtggaagtagtaggagtctccttccatatcggctccgggtgcccggatcctcaagcatatgcccagtccatagccgatgccagactcgttttcgagatgggcaccgagctgggccacaaaatgcatgtgctggatctggggggtgggttccccggaacagaaggagcaaaggtgcggttcgaggaaattgcctccgtgatcaactctgcgctggatctttattttccagagggatgtggcgtggatatatttgcagagctcggtagatattatgtgacctctgcattcacagtggcagtaagtattattgccaagaaagaggtgctcctggatcagcccggtcgcgaagctccgctgccccctccccacattgcaacctgcgctgcctctgagccatcaccaccagctgaggaaaacgggtctacatcaaagactattgtatatcacctagatgaaggggtgtatggcatcttcaactcagtactgttcgacaatatctgtcccactcctatcctccaaaaaaagccttctaccgaacagcccctgtactcctctagcctatggggacctgccgtcgacgggtgtgactgcgtcgccgagggactgtggctgccacagctgcacgtcggcgactggcttgtctttgataatatgggagcttataccgtcggtatggggtccccattctgggggactcaggcatgtcacatcacctatgccatgtcaagggttgcctgggaggctttgagaagacagcttatggctgccgaacaggaagacgatgtggaaggcgtgtgcaagccactctcttgcggctgggaaataacggataccctgtgcgtggggccagtgtttacacctgcgtctatcatgtag

SEQ ID NO: 29595 - DNA, 3774 bp, synthetic construct
  source 1..3774: mol_type = other DNA; note = Synthetic coding sequence
atggcccacttcagcagtgaggatcaagctatgttacaagccatgttgcgtcggttgtttcagtctgtgaaggaaaaaattacgggggctccaagtctggaatgtgcggaagaaatcctgctccacctggaagagactgacgagaacttccataactacgagttcgtcaagtatctcaggcagcacataggtaacaccctgggttccatgatagaggaagagatggaaaaatgcactagcgacagaaaccaaggcgaagagtgtggctacgataccgtagtccagcaggttactaaaaggacacaggaatctaaggaatacaaagaaatgatgcattacctcaagaatatcatgattgctgttgtcgagtctatgatcaataaattcgaggaagatgagacacggaatcaggagcgccagaagaagatccagaaagaaaaaagccatagctaccgaactgacaactgtagcgactccgattcttcacttaaccaatcttataagttctgccaggggaagctacagctgatactagaccagctggaccccggacagcccaaggaagttagatacgaagcgttgcaaaccctttgttcagctcccccttccgacgtgctcaattgcgagaattggacgacactgtgtgaaaagttaacagtatcattgagtgatccagatcccgtgttctccgacagaattctgaagttctgtgctcagacctttctgctttcccctttgcacatgactaaagaaatttatacaagtctggctaaatacctcgagtcatacttcctgagcagagagaaccacattcccacactcagcgcaggtgtggatatcaccaaccccaatatgactcgactcctcaaaaaagtcagattgcttaatgaataccaaaaggaggccccatcattctggatccgccaccccgaaaagtatatggaagagatagttgaatcaaccctttcccttttgaccgtaaagcataatcaaagtcacgtggtgtcacagaagatactagatccgatctactttttcgcgttagtggatacgaaagctgtgtggttcaaaaagtggatgcacgcccactattcaagaactacagttctaagactcctggagaccaaatataagtccttagtgactacagcaatccagcaatgcgtgcaatatttcgaaatgtgtaaaactagaaaggccgatgagaccctgggacactccaaacattgcagaaacaaacagaagactttctattacctgggccaagaactgcaatatatttatttcatccactctctctgcctgttgggtcggctgctgatttacaaacagggaagaaagcttttccccatcaagctcaagaataaaaaagggctagtatcactaattgaccttctggtcctgtttacacagttgatttattacagcccaagctgtcctaagatgacttctgccgctcacagtgaaaactacagtcctgcgtcaatggttaccgaggttttgtggatcctgtctgaccaaaaggagtgcgctgttgagtgcttgtataacaatatagtgatagagactctcttacagcctattcataatctcatgaaaggaaacgaggcctccccaaactgctcggagactgccctcatccacatcgccggaatccttgcccgaatcgcctctgtggaggagggtctcattttactgctgtacggagccaatatgaactcctcggaggaaagcccgacaggtgcccatataattgcacagttcagcaagaagctcctggatgaagatatctccatcttctccggtagtgaaatgttgcctgtggtgaagggagcatttattagcgtgtgccggcatatatacagcacctgcgaaggactgcaagtcctgattacatataacctgcacgaatcaatcgctaaggcctggaagaaaacctccctgctcagcgagcggattcccacccctgtggagggtagtgattccgtctctagcgtctcccaggaatctcaaaacatcatggcatgggaagacaaccttctcgatgacctcctccattttgcagctacacccaaggggctgctactattacagcgcaccggggcaattaacgaatgcgtaaccttcatattcaaccgctacgccaaaaaattacaggtgtcaaggcataaaaaatttggttatggagtgctggttactcgcgtggccagtactgctgccggagggatagctcttaagaagtcaggcttcatcaacgagttaattactgaactgtggagcaatcttgagtatgggcgtgacgatgtgagggtgacacatcccagaacaacaccagtcgatccaatcgaccggtcttgtcaaaaatcatttcttgccctggtcaacttactttcctatcccgcaatctatgaactggtgagaaaccaggatctacccaacaaaactgagtacagcctccgcgaggtgcccacatgcgtgattgacattatagaccgcctgattatattaaactcagaagctaaaataaggtcattattcaactatgagcagagtcacatctttggcctgcgggactttatcattgatgggttgtccgtggaaagaaatcacgtgcttgtcaggataaacttagtgggcggacccctggaaagaattctgcctcctagattgctggagaagagcgacaatccctacccttggcccatgttttccagttatccgctgccgaactgttacttgtcagacattacacggaatgctgggatcaaacaggataacgacctggataagttattactgtgtctgaagatctccgacaaacagacggagtggattgagaactgccaaagacagttttgtaagatgatgaaggctaagcctgacattatctcaggcgaggcgctaattgaactgctagagaagttcgttctgcacctgacggagtcaccatctgaatgctacttcccctcagtggagtatacggccaccgatgccaatgtgaagaacgagtcactctcatctgtacaacaattgggtatcaagatgacagtacgctatgggaagttcttaagtttactaaaggacggagccgagaacgacctgacctgggtacttaaacactgtgaacgatttctaaaacagcagcaaaccagcatcaaaagcagtctgctttgcctccaggggaattatgcaggccatgattggtttgtaagttctttgtttatgataatgttaggggataaggaaaagactttccagttcctgcaccaattctcacgattactcacatccgctttcctatggctccctcgactccatatatccagctacctccctaacgacacggtggaatccggtatccacccagtgtatttctgtagtacacactacatcgaaatgctgcttaaagcggaactgcccctggtgtttagtgctttccatatgtcgggttttgcaccctcccagatatgtctccagtggattactcagtgtttctggaattacctggattggattgagatttgccactacattgccacctgcgtgtttctgggccctgattaccaggtttacatatgtatcgccgtctttaaacatctgcaacaagacatactgcagcatacccagacacaggatctgcaggtttttctgaaggaggaagctctgcatggctttcgagtttcagactactttgaatatatggagatactggagcagaactaccgcaccgtcttgcttagagacatgagaaacataagactgcaaagcacctag

SEQ ID NO: 29596 - DNA, 612 bp, synthetic construct
  source 1..612: mol_type = other DNA; note = Synthetic coding sequence
atggcaaccccatacgtcacagatgaaacagggggaaaatatattgcttccacccagcgccctgacggaacatggaggaaacagcgtagggtgaaagaagggtacgtcccgcaagaggaagtgcccgtttacgagaataagtacgttaaatttttcaaaagcaagccggaactgcctccaggactctccccggaagcaactgctcccgttactccaagtaggcctgagggcggagaacccggtctctccaaaactgctaaaagaaacctgaaaaggaaagaaaagcgaaggcaacaacaagaaaagggagaggccgaggctctgtcccgcaccctcgacaaagtgagcctggaagagaccgctcagctgcccagcgctccccagggcagcagggccgctccaaccgcggcttccgaccagccagactctgcggctacgactgaaaaggccaaaaagatcaagaatctgaaaaaaaagctgcgacaagttgaagagctgcagcagaggattcaggccggtgaagtgtctcagccatcaaaagagcaattggagaagctggcacggagaagggctctggaagaggaactggaggatctcgagctaggactgtag

SEQ ID NO: 29597 - DNA, 729 bp, synthetic construct
  source 1..729: mol_type = other DNA; note = Synthetic coding sequence
atggctgcagtgaaggcctctactagtaaagcgaccagaccttggtattcacacccggtttatgcacggtactggcaacactatcaccaggcgatggcgtggatgcagtcacaccataacgcataccgcaaggcagtagaaagttgcttcaacctcccctggtatctgcccagtgcattactgcctcagtcatcctatgataacgaggcggcatatcctcagagcttttacgaccatcatgttgcttggcaagactatccgtgctcctccagccactttaggcggagtggacagcatccccgttattccagcagaattcaggctagcacaaaagaggatcaagcattatcaaaggaggaggaaatggaaactgaaagtgacgccgaggttgagtgcgacctgagcaacatggagatcacagaagaactgcgacaatactttgcggaaactgagcgacatcgcgaggaacggaggcgccagcagcagctcgacgctgaacgccttgacagttacgttaatgccgaccatgacttgtactgtaatacccgccgttccgtggaggcgccaactgagcggccaggggaaaggaggcaagccgaaatgaagcggctctatggagatagcgccgcaaagatacaggctatggaggccgctgtccagctttccttcgataagcactgtgatcgtaagcaacctaaatattggccagtgatcccattgaagttctag

SEQ ID NO: 29598 - DNA, 738 bp, synthetic construct
  source 1..738: mol_type = other DNA; note = Synthetic coding sequence
atgatcggcgtgtccttcgaggaagctaagagtataattactggcgcaaaactctccactcgcctcgaaagcgcctgggaaattgcttttattcggcaaaagtctgacaacattcagcccgaaaatctgtcttgcacctcgctaatcgaggcctctggcgagtatggtcctcaagccagtacactgtcccttttttcatctcctcctgagattttgattccaaagacctcttctactcctaaaacaaataacgacattctgtcttcatgcgaaatcaaaacggggtacaataagaccgtccagattccaataacctcagagaactcaacagtgggactgtccaacactgatgtggcatccgcatggactgagaattacggactccaagagaaaataagcttgaacccgtcagttcgctttaaagctgaaaagcttgaaatggcactcaactacttagggattcaacctactaaagaacaacaccaagctctcagacaacaggtgcaagcagacagcaaaggtactgtgtccttcggagatttcgtgcaggtcgctaggaacttgttttgcctccagttggatgaggtgaacgttggggctcatgagatttctaacattctcgactcgcagcttttgccatgcgacagtagcgaagcagatgagatggaacgtttgaaatgcgagagagatgacgctttgaaagaagtgaacactctcaagtggccaggacagaactag

SEQ ID NO: 29599 - DNA, 1020 bp, synthetic construct
  source 1..1020: mol_type = other DNA; note = Synthetic coding sequence
atgatggattcccagcttgtggccggtgtggcatttaaaaagacgttcagctatgcaggatttgagatgcagcctaaaaaataccataacccaaagatcgccctcctgaacgtcgagctggaactgaaggcagagaaggacaatgccgaaatccgagtgcacactgtggaggactaccaggcaattgtggatgccgaatggaacattctctacgacaagctggaaaaaatacatcactccggtgctaaagtggtcctgagtaaactaccgattggcgatgttgctacgcagtattttgccgaccgcgatatgttctgcgctggcagggtcccagaagaagacttaaaaaggacaatgatggcatgcggtggatccatccagactagcgtgaatgcactgagtgcagatgtgctgggccgttgccaggttttcgaggagactcaaatcggaggggagcggtacaacttctttaccggctgtccaaaagctaagacctgtacatttattctgcgcggtggtgccgagcaattcatggaagaaaccgaacgctccctacacgacgcaataatgattgttcgtcgcgcaatcaaaaatgactctgtggtggccggtggcggagccatcgaaatggaactgtccaaatacctgagggactatagtcgtaccattcccggtaagcaacagctgctaatcggtgcttatgcaaaggcccttgaaattatacctcgccagctgtgtgataacgctggctttgacgcaacaaacatcctgaacaagctacgcgcaaggcacgcccagggcggaacatggtacggcgtggatattaacaacgaagacatagccgataactttgaggccttcgtgtgggaacccgctatggtgaggatcaatgctctcactgccgcttcagaagcggcatgcttgatcgtgtccgtcgacgaaactatcaagaatccccgatctacagttgatgctcctactgctgctggaaggggccgaggcaggggcaggccccactag

SEQ ID NO: 29600 - DNA, 768 bp, synthetic construct
  source 1..768: mol_type = other DNA; note = Synthetic coding sequence
atggcctcctctgacctggagcagctatgctcacacgtgaatgaaaagatcgggaacatcaaaaagacgctaagcctcaggaattgtggccaggaaccgacattgaagacagttctgaacaaaataggcgacgagattatcgtcatcaacgagctcttaaataagctggagctggagatacagtatcaggagcagaccaataactctctgaaagagctctgcgaaagccttgaggaggactataaggacattgagcacctcaaagaaaacgtcccctcccacctgcctcaggtcactgtgacccagagctgtgtcaagggctcagatttagaccccgaggagcccatcaaagtagaggaaccagagccagttaagaagccccctaaggagcaacggagtatcaaagaaatgccttttattacctgtgacgaatttaatggggtcccctcatatatgaaatcacgtctaacgtataatcagattaacgacgtgattaaggaaattaacaaggctgtcatttccaagtacaagattctgcatcagcctaagaagtccatgaactccgttacacgtaatctgtaccatcggttcatagatgaggaaacgaaggatactaaagggagatacttcatcgttgaagctgacatcaaagagttcactacactgaaggccgataagaagttccacgttctgcttaacatcctcagacactgcaggcggctgtcagaggtccgcggagggggattaacaaggtatgttatcacatag

SEQ ID NO: 29601 - DNA, 441 bp, synthetic construct
  source 1..441: mol_type = other DNA; note = Synthetic coding sequence
atggttaattcttgctgtggatcggtgtgcagtgatcagggttgcgaccaggggctgtgtcaggagacatgttgtaggccctcttgctgccagactacctgttgctgtccttcgtgcgtggtaagtagctgctgccggccatcatgcagtcaaactacttgctgtcagacaacctgctgtcgtcccagttgttgccatcccgtttgttgccagacgacctgcagaccctcgtgtggggtctcttcctgctgtcggcctctttgctgccagacaacatgtcatccaagctgcggcatgtcctcctgttgcagaccactgtgttgccagacaacttgcagaccaagttgcggggtgtctagctgttgtaggcccctttgctgccagactacatgctgtcgggcaacctgttgccggccttcatgttgcggctcctcctgttag

SEQ ID NO: 29602 - DNA, 1296 bp, synthetic construct
  source 1..1296: mol_type = other DNA; note = Synthetic coding sequence
atgacctctgattgcagctcaacccactgttcccctgagtcttgtggcacagcgtctgggtgcgccccagctagctcctgctctgtcgagacagcctgcttacccggtacatgtgcaacctctcggtgccagacaccttcattcctgtctcggtctcgaggcctgacaggatgcctacttccctgttactttacaggtagctgcaatagcccatgtctggttggtaactgtgcttggtgcgaagacggggtcttcacctccaacgaaaaggaaacaatgcaatttctcaatgacagactggcctcttatcttgagaaggttcgatccctggaggaaaccaatgccgagctcgagagtcgaattcaggaacaatgcgaacaggatatcccgatggtgtgtccagactaccaaaggtattttaacaccatcgaagatctccagcagaaaattttatgtacaaaggccgagaatagtcgtctcgcggtgcagctagacaactgcaaactggctactgacgacttcaaaagcaaatatgaaagcgagctttcactccgccagctgttggaggcggatatatcctcgcttcacggcatcctggaagaacttacactctgcaaatcagaccttgaggcacatgtcgagtcccttaaggaggacttgttgtgcctcaaaaagaaccacgaggaagaggtcaatcttctgcgggaacagctgggggaccgcctctcagtggaactcgacactgcccctacactggacttgaacagggtgctcgacgaaatgcgctgccagtgcgagactgtactagctaacaaccgcagagaggccgaggagtggcttgcggtccagaccgaggaattaaaccagcagcagctgtcctccgctgaacagctccagggttgccagatggagattctcgagctgaagcggaccgccagcgccctagagatcgaattgcaggcccagcagtcattgaccgagtctctggaatgtaccgttgctgaaactgaagcacaatactcctctcagttggcccaaattcagtgcctgattgataacctggagaatcagctggctgagattaggtgtgacttggaacgccagaaccaggagtaccaagtcctgctagacgttaaggctcgcctggagggtgagatcaacacgtactggggactgctcgactcagaggactcgcgactctcctgttccccctgttccacgacttgtacgtcctcaaacacctgcgagccctgtagcgcctacgtgatctgtactgtggaaaactgctgcctgtag

SEQ ID NO: 29603 - DNA, 471 bp, synthetic construct
  source 1..471: mol_type = other DNA; note = Synthetic coding sequence
atgggctgttgcggttgtagcggcggatgtggtagcggttgcggcggatgtgggtccggatccggaggctgcggaagtgggtgtgggggatgcgggtcaagctgttgcgtcccaatctgttgttgcaagccggtttgctgttgtgtacctgcttgtagttgctcatcttgcgggtcatgtggaggttccaaggggggatgcggttcttgcgggagtagcaaaggcggttgcggctcttgcggatgctcacagagcaattgttgcaagccatgctgctcatcatctggatgcggaagtttctgttgccaatcttcttgttctaaaccgtgctgttgtcaatcctcatgttgccagtcgagttgctgcaagccatgttgctgccaatcctcttgttgtcagagtagctgctttaagccctgttgttgtcagagctcgtgctgcgtgcctgtatgctgccagtgtaaaatctag

SEQ ID NO: 29604 - DNA, 609 bp, synthetic construct
  source 1..609: mol_type = other DNA; note = Synthetic coding sequence
atgggctgttgtgggtgcagcggtggctgcgggtcaggttgcgggggttgcggatccggttgcggcggttgtgggagcgggtgcggcggttacggtagcggctgcggcggatgcggatcatcctgttgtgtacccgtttgttgttgcaaaccggtttgctgttgcgttcccgcttgttcctgcagtagctgtggctcttgcggcggatcgaaaggggattgtggcagctgtgggggatcgaagggagggtgtggaagctgtggcggatcaaagggcggatgcggctcatgtggaggttcaaagggcggatgcggttcatgcggaggttcgaagggcggatgcggaagctgcggtgggtcaaagggcggatgcggttcttgtggtgggtccaaggggggatgtggttcctgcggatgctcacagtgcaactgttgcaagccctgctgctgttcaagcgggtgtggcagttgttgtcagtctagctgctgtaacccttgctgttgccaatccagctgctgcgtcccagtgtgttgtcagtccagctgttgcaagccttgctgctgccagtcttcctgttgcgtaccagtatgttgtcaatgtaaaatttag

SEQ ID NO: 29605 - DNA, 498 bp, synthetic construct
  source 1..498: mol_type = other DNA; note = Synthetic coding sequence
atgggatgctgcggttgctccgaaggctgcgggagcggatgtggaggttgcgggtcagggtgtgggggatgtgggagtgggtgcggcggatgtggctccagttgctgtgtgccagtctgttgttgtaaacccgtctgctgctgtgtgccagcctgctcatgctcatcttgtgggagttgcggcggatccaaaggcggttgcggaagttgcggtggaagcaaaggagggtgtggctcctgtggcggaagtaaaggaggatgtggtagctgtggttgctcccaatgctcttgttacaaaccttgctgctgttcttcaggatgcgggagcagctgctgccagtccagctgttgcaagccttgctgctgccagtcttcttgctgcaaaccttgttgttgtagtagtggttgcggctcctcctgctgccagagctcttgctgtaatccatgctgtagtcagtctagctgttgcgtcccagtctgttgccagtgcaaaatatag

SEQ ID NO: 29606 - DNA, 3105 bp, synthetic construct
  source 1..3105: mol_type = other DNA; note = Synthetic coding sequence
atggcaagcgtttttatgtgcggggtggaggatctgctgttcagcgggagccgcttcgtgtggaacctgaccgtgagcacacttagacggtggtataccgagcggctcagagcatgtcaccaggtgctgagaacttggtgtggccttcaagatgtctatcaaatgactgaagggagacattgtcaggtgcacctgttggacgaccgtaggctcgaactgctcgtgcagcccaagctgttagctagggagctgctagatcttgtcgcgagtcactttaatctgaaggagaaggaatatttcggcatcactttcattgacgatacgggccagcagaattggttgcagctggaccaccgagtattggatcacgacctgccaaagaagcctggacccacgattttgcacttcgccgttcggttctatatcgaatccatcagtttcctgaaagacaaaactactgtggaactgttcttcctcaatgccaaggcatgcgtgcataagggccagatagaagtggaaagtgagactatcttcaagctcgccgctttcatactgcaagaggcgaaaggtgattacaccagcgatgaaaatgctcgtaaggacctgaagactctgcccgctttccctactaaaactcttcaggagcacccatctttagcttactgcgaagatcgagtgattgaacactatctcaagatcaaaggcctaacgcgcggtcaggccgttgtccagtatatgaagatcgtggaagcactgccaacttacggagtgcactactacgccgttaaagataaacagggtctaccctggtggctgggaatctcgtacaagggaatagggcagtacgacatccaagataaggtgaagcctaggaaactgtttcagtggaagcagttagagaatctctatttccgggagaaaaagtttgcagtggaggtgcacgatccacggaggatttccgtgtcacgaagaacttttgggcagagcggtctgtttgtccagacttggtatgctaatagcagcctgataaagagcatttgggtgatggccattagccagcatcaattctacctcgaccgaaagcagtctaaagctaagatccctagcgctcgatccctagacgaaatcgcaatggatctcacggaaacaggtactcagcgggcttcaaagctcgtgaccttagagacaaaatctcaatttatcatggcgtccaacggttcgctgatcagttccggctcccaggacagcgaagtgagcgaggagcagaagagggagaagattctcgaactgaagaagaaagaaaaattgctgcaggagaagctcctcaagaaagtggaagagcttaaaaagatctgtctgagggaggccgaactgactggtaagatgcctaaggaatatcctctgaatattggcgagaagcctcctcaggtgaggcgaagagtagggacagcctttaagctggacgacaatctgcttcccagcgaagaggatcccgctttgcaggaactcgaatccaactttctaatccagcagaagcttgtggaggctgcaaaaaagctggctaatgagccagatctctgtaaaactgtgaagaaaaagaggaaacaagattacaccgatgctatgaagaagctgcaggaaatagagaatgctataaacgaatatagaattcggtgcggaaaaaaaccctcacagaaggctacagtccttcctgaagacattatcccatctgagtctagttctttgagtgacacaacaacctatgacgatccttctgacgctttcacatttccagggcagagatcgtcttccgtgccccactccccgaggattctgcctcccaagagcctgggaatcgaacgcatccattttagaaaaagtagcataaatgagcagtttgttgatacacgacagtctcgtgaaatgctgagtactcatagctcaccctacaagacactggaaaggaggccacaaggcggtcgcagtatgccaacaaccccagtgctgacccgtaacgcctactctagcagtcatctggagccagaaagcagttctcagcattgtcgccagcgtagcggctctctcgagtcacagagccatttgctttctgaaatggacagcgataaaccgttcttcagcttgagcaaatcccagagaagctcttccaccgagatcctcgacgatgggtcctcttacacgtcccagtccagcaccgaatactattgtgtgactccagtcacaggcccttactacaccacacagactctggacacacgaacgcggggtagacgcagatccaagaagcagaacgtcagtacaagtaacagcggctctatgcccaatctggcacagaaagactccctgcgaaacggagtgtacagtaagtctcaagaacccccatcaagctcatattatatagccggttacactccgtacgcagaatgcgacttctattattccgggggatacgtgtacgaaaatgacactgaggggcagtacagcgtgaatccctcttacaggagcagcgcccactatggttatgaaagacagcgcgactattcccgctcttttcatgaagacgaagtggacagggtgccccacaacccctatgccacactccgcttgcccagaaaagccgcagccaagtctgagcacatcaccaaaaatatccataaagcactggtggcagaacatttgcggggatggtaccagcgtgcctcagggcagaaggatcagggccatagtccacagacctctttcgactctgaccgtggctcccagaggtgtctgggtttcgccggactgcaggtgccgtgctcccccagctcacgggcttcaagctactctagcgtttcatcgaccaacgcaagtgggaactggcggactcagctgacgattggactgtccgattatgagaccccagctcatagctcctatacatcctgctacggaaacgtgtacaacccactccctagtccaagcaggcaatacactgaaataagccagctcgacggcaccgacgggaaccagctggaagacaacctcgaaagttctgagcagagactgttctggcacgaggattccaaaccgggtactttggtctag

SEQ ID NO: 29607 - DNA, 501 bp, synthetic construct
  source 1..501: mol_type = other DNA; note = Synthetic coding sequence
atgttgagccagtcatgtaatctcgaccctttgaccgaaacttacggaatccccttctacctgcagtacttggcccactggcctgagtatttcatcgtggcagaggccccaggcggagagttgatgggctatataatgggcaaagctgaaggatctgtagcgcgagaggagtggcacggacacgttacggctctcagtgtggcccctgaattccggcgattggggctggccgctaagctgatggagctgctggaagaaatatccgaaaggaagggcggattcttcgtagacttattcgtgagagtgtctaatcaggtggccgtgaacatgtacaaacagttagggtactctgtctatcggacggtgatagaatactactcagcatctaacggagaaccggacgaagacgcatatgatatgagaaaggcgttatccagggacacggagaagaaaagcattattccgctgccccaccccgtgcgacctgaggatattgagtag

SEQ ID NO: 29608 - DNA, 399 bp, synthetic construct
  source 1..399: mol_type = other DNA; note = Synthetic coding sequence
atgcgtgcctccccctgcatttctcagccagcagcctcatggcatccacgcccaagcgctttgcggccaaccgctggctccggaccagatacccggacacccggaactgtcgaggacggttcggcaccttgtcccgcttttcgatctcccgctgtttctccttgcggagaagagccctgttgctttcagatttccccagctgaagagacacttgagctgggaagactggtgtccccgggtaattgtgacacgctttctcccagagcggcaggattttacgcctgtcacgtcaggagcttgattccctgccggtcaacaaaaggcagatggcccctaacagccagcgctgccggattatcccggcacgcacaatgcgggccatctttaggcctggggtag

SEQ ID NO: 29609 - DNA, 375 bp, synthetic construct
  source 1..375: mol_type = other DNA; note = Synthetic coding sequence
atgagggcgagtccgtgtatcagtcagcctgcggcatcatggcaccctcgaccctcagccctcaggcctaccgctggcagtgggcctgacacgcgaaccccaggcactgtcgaggatggttctgccccttgcccggcatttcgttcccctgccgtctccccctgtggcgaagagccttgttgctttcaaataagccccgctgaggaaactctcgagcttgggagactcgtatcaccgggaaattgtgatactctgtcgccgcgagctgccggattttacgcgtgccacgtgcgctccctcatcccttgtcgttcaacaaaggggagatggccccttactgccagtgcagcagggctcagctcgttcagtggctag

SEQ ID NO: 29610 - DNA, 336 bp, synthetic construct
  source 1..336: mol_type = other DNA; note = Synthetic coding sequence
ctgatggacctggattctggagatgtcaagaggagagtccacctgttcgagacgcagcgacgcaccaaagaggaggaccccattatccccttcagcgatggccctatcatatccaaatggggcgcaatctctagaagtagccggaccgggtatcacacaacagacccggtgcaggctacggcaagtcagggttccgccaccaaaccaatctcagtgagcggcggtgttcacatggccacaaggccacatcatcagcacacaatgttgaagggaaccgactctctgctgctcatataccttgtgatcgagtcaatccctgtgttgggaacattctag

SEQ ID NO: 29611 - DNA, 399 bp, synthetic construct
  source 1..399: mol_type = other DNA; note = Synthetic coding sequence
atgcgcgctagcccgtgcatcagtcagcctgccgcttcttggcatccacggccatctgctctccgccctaccgccggatccgggcctgacactcgaaccccaggcacagtggaggatggatcggcaccctgtccagctttccgtagccctgctgtgagtccgtgtggagaggagccctgctgctttcagatctcacccgctgaagagacccttgagctgggccgtctggtgtctccagggaattgcgacaccctgtcgcccagggccgctgggttttatgcatgccacgttaggtccctgatcccgtgtcggtcaactaaagggagatggccactcacagctagtgccgcagggctcagccgacatgcacagtgcggacccagcttgggtctcggttag

SEQ ID NO: 29612 - DNA, 375 bp, synthetic construct
  source 1..375: mol_type = other DNA; note = Synthetic coding sequence
atgcgggcttcaccctgtatttctcagcccgcagcatcctggcaccccagaccgtccgccctccgccctacagcaggctccggacccgatacaagaacccccggtacggtggaagacgggtccgctccctgtcctgctttcaggtcaccagcggtttccccatgtggtgaggaaccatgctgttttcagatatctcctgccgaagaaacacttgagcttggccgtttggtttcaccgggtaactgcgatacgctgagccctagggctgctggcttctacgcgtgccatgtgcggagcctcattccctgccgcagcactaagggcaggtggcccctgacggcgtcagctgctggcctgtcttcattttcaggatag

SEQ ID NO: 29613 - DNA, 1038 bp, synthetic construct
  source 1..1038: mol_type = other DNA; note = Synthetic coding sequence
atgctgcccaatacgggacgactcgccggttgcactgtgttcatcactggtgcttcgcgtggcatcgggaaggccattgcactgaaggcagcgaaggacggggctaatatcgttatcgcagccaagacagcccagccacaccctaagctgcttggcactatctataccgctgctgaggaaattgaggccgtgggcggaaaagctctcccatgtattgtcgacgtgagggatgaacagcagatcagcgctgccgtcgagaaggctatcaaaaagtttggagcgtacaccattgctaaatacgggatgagtatgtacgtgctgggcatggcagaggagttcaaaggcgaaatagctgtgaatgcactgtggccaaagacggcaatccacactgctgccatggatatgctgggtggccctgggattgaatcacagtgtcgaaaggtcgatattattgctgacgcagcgtacagcatctttcagaaacccaagtcatttacaggtaactttgttattgacgagaacatacttaaagaagagggcatcgagaactttgacgtctatgcaataaaacctggccatcctctccagcccgacttcttcctggacgaatatccagaagctgtttcaaagaaggtggagagcacaggcgctgtcccagaatttaaagaggagaagctgcagctgcagcctaaaccccgttctggtgcagtggaggagacgtttagaatcgtgaaggactctctgagtgacgacgtggtaaaagccacacaagctatctatttgtttgaactcagcggcgaggacggcggaacctggtttctagacctaaagagtaagggcggaaacgtcggatatggggaaccgagcgatcaagcggatgtggttatgtcaatgacaaccgatgacttcgttaaaatgttctctggaaaactgaaaccaaccatggcctttatgtcaggcaaactcaagatcaagggtaacatggcactggcaattaagttggagaagctcatgaaccagatgaatgcacgtctttag

SEQ ID NO: 29614 - DNA, 1257 bp, synthetic construct
  source 1..1257: mol_type = other DNA; note = Synthetic coding sequence
atgctgcctaatacaggtagactggccggatgcactgtctttatcacgggtgcttcccgaggcatcggaaaagctattgctctgaaggcagccaaagatggtgcgaacatcgtgatcgctgccaagactgctcagccacaccccaagctgctgggcactatctatacagccgcagaggaaattgaggctgtcgggggaaaggcactgccatgtatcgtcgatgtaagagacgaacagcaaatctccgcggctgttgagaaagccattaagaaatttggcggaattgacatcctcgtgaataatgcttccgcgatcagcctcaccaatacactggatactccgaccaaacgtctggacctaatgatgaatgtcaatacccggggtacttacctggcctccaaggcctgcatcccatacctgaagaagtcaaaggtcgcgcacattttgaatatcagtccaccactgaatctcaatcccgtgtggtttaagcagcactgtgcttatacaatcgctaagtacggaatgagcatgtatgtcctcgggatggccgaagaattcaagggcgagattgctgtgaacgctctgtggccgaagacagctattcataccgccgctatggacatgctgggcggaccgggtatagaatcacaatgtcgcaaggtcgatatcatagcagacgctgcctactctatctttcagaaaccaaaatccttcaccgggaactttgtaattgatgaaaatatcctcaaggaagaagggatcgaaaactttgatgtctatgccataaaacctggacatcccttgcagcccgacttttttttagacgaatacccagaagccgtgagcaagaaggtggaaagtacaggagcggtaccagaattcaaggaagaaaaactccagctgcagcccaaaccccgtagcggggctgtcgaggaaactttcagaattgtgaaagacagcctgtcagatgacgtggttaaggcaacccaggcaatctatcttttcgagctgagcggcgaagacggagggacctggttcctggacctcaaaagtaaggggggtaacgttggatacggagagccttccgaccaagccgacgtggtgatgagtatgaccaccgatgattttgtgaagatgttcagtggaaagctgaaacctacaatggctttcatgtctggcaaactgaagattaagggaaatatggccctggcaattaaattggagaaattaatgaatcagatgaatgccaggttgtag

SEQ ID NO: 29615 - DNA, 1077 bp, synthetic construct
  source 1..1077: mol_type = other DNA; note = Synthetic coding sequence
atgccaggatgcgaattaccagttggaacttgtcccgacatgtgcccggctgctgaaagagctcagcgcgaaagggagcacaggttgcataggttagaagtggttcccggttgtaggcaggatccccctagggccgacccacagagggccgtcaaggagtattcccgcccagccgctgggaaacccagacctcctccctcccaattgcggcctccatctgtcctactggctacggtgcgctatctggcaggagaagtcgctgagtcagcggacattgctcgagcagaagttgcaagctttgttgcagataggctcagggccgtgttgttagacctggctttgcagggggcaggagacgccgaagccgcagtagtgcttgaggcagctttggccactctgttgaccgtcgtcgccagacttggccctgatgcagcccgtgggcctgcggatccagtgctgcttcaggcacaggtccaggagggcttcggtagcctgaggagatgctacgctcggggagccggtccacatcctagacaacctgctttccaggggctgtttctattgtacaacttgggctctgtcgaggctctgcacgaggttcttcagttaccggctgccttgcgggcttgtcctccactccggaaggctctggccgtcgatgctgccttcagagaagggaacgcagcaagactgtttcgcctgctgcaaaccctgccttaccttcccagctgcgcagtgcagtgtcacgtaggccacgccagacgtgaggcactcgccaggtttgccagagccttttcaaccccgaagggtcagacgctgcctctagggtttatggtaaacctgcttgccttagacgggctccgcgaggccagggatttgtgtcaggcccatgggctgccgctcgacggagaggaaagggtggtgttcctgcggggtcggtatgttgaggagggcctccctcccgcttctacatgcaaagtgctggttgagagcaaactgcgcggacgtacactggaagaagtcgtcatggccgaagaagaagacgaaggcacagatcgccctgggtctcccgcttag

SEQ ID NO: 29616 - DNA, 150 bp, synthetic construct
  source 1..150: mol_type = other DNA; note = Synthetic coding sequence
atgtcctcctgcgtgagttcccaacccagtagtaatcgcgctgctcctcaggacgagctgggcggaagaggttcctctagttctgaatcacagaaaccttgcgaggccctccgcggactttcaagtctgagcattcacctgggcatgtag

SEQ ID NO: 29617 - DNA, 2598 bp, synthetic construct
  source 1..2598: mol_type = other DNA; note = Synthetic coding sequence
atgcccgcagtatcattgcctccaaaggagaacgccctgttcaaacgtattctacgttgctacgaacataagcagtatagaaatggtctgaagttttgcaagcagatcctcagcaaccctaaatttgcagaacacggggaaacactcgcgatgaaggggctgaccctcaattgtctagggaagaaggaggaagcctacgagctggtgcggagaggcctacggaacgatctaaagtctcatgtgtgttggcatgtctacggtcttctgcaaaggagcgataagaagtacgacgaggccattaagtgctatcgcaacgccctcaagtgggataaggataatcttcaaattctgcgagatctgtcgctccttcaaatccagatgcgggatttggagggataccgggaaacccgatatcaacttctgcagttgaggcccgcacagcgggcatcttggattgggtatgcaattgcctaccatctgctcgaggattacgaaatggcggctaagattttggaggaatttcggaaaacgcagcagaccagccccgataaggtcgactacgagtatagtgagctgctgctctatcagaaccaggtcttgcgcgaggccggtctctaccgggaagctctggagcatctctgtacatacgaaaagcagatctgcgacaagctcgcggtcgaagaaacaaagggcgagttactgctgcagctctgtcgtctcgaagatgcggcagacgtataccggggactccaggaacgcaacccggagaattgggcatactataaaggccttgaaaaagccttgaaacctgccaatatgctagaaagactcaagatctacgaagaggcatggactaagtacccgaggggcctcgttccacgacggctgccactcaacttccttagtggcgaaaagttcaaggaatgcttggacaaatttttaagaatgaatttctccaaggggtgtccgccagtgtttaatactctgcgatctctgtacaaagacaaagagaaggtggcaatcattgaggagttagtggtaggctacgaaacctctctgaaatcttgcagactgtttaatccaaacgacgatgggaaagaggagccaccgaccactttgctctgggtgcaatattacctggctcagcattacgataagattggacagccttcaattgctttggaatacataaatacagctatcgagtcaacacccacactcattgagctgttcctggtaaaggctaagatctacaagcatgcaggtaacatcaaagaggccgctcgctggatggatgaagcccaagcactcgacactgcggaccggttcatcaactccaagtgcgcaaagtacatgttgaaggccaatctgatcaaagaagcggaggaaatgtgctccaagttcactcgcgagggcacatccgctgtcgaaaatctgaatgagatgcagtgcatgtggttccaaactgaatgtgcccaggcctataaagccatgaataagttcggcgaggcactgaaaaaatgtcacgagatcgaaagacactttattgagatcactgatgatcagttcgatttccatacctactgtatgcgaaagataacgctccgatcatacgttgatctgcttaagcttgaagatgtgttgcgtcaacaccctttttacttcaaggccgcacgaatagctattgagatctatctcaagcttcacgacaatccgcttactgacgaaaacaaagagcacgaggctgataccgctaacatgagcgataaggaactgaaaaagctgcgcaacaaacagcggcgagctcagaaaaaggcccagatagaagaggaaaagaagaatgcagaaaaagaaaaacagcagcggaaccagaaaaaaaagaaagacgatgatgatgaagagattggcggacccaaggaggaactgattccggaaaagctggccaaggttgaaacaccgctggaggaggctatcaagttcctcactcccctgaaaaacttggtgaaaaataaaatcgaaacacacctgtttgctttcgaaatatatttcagaaaagagaagttcttgcttatgttgcagtccgttaaacgcgcttttgcaatagactcctctcatccatggctgcatgaatgcatgatcagactattcaacacagtctgtgagagtaaggatctttcagacactgtgaggactgtactcaaacaggaaatgaaccggttgtttggtgccaccaaccccaaaaactttaatgagaccttcctgaagcgaaattctgacagtctcccccacaggctctccgccgctaaaatggtgtactatctggacccaagcagccagaaaagggctatcgagctggcaacgactcttgacgaatctttgacaaaccggaatctccaaacttgcatggaagtgttggaagcgctgtatgacggaagtctgggagactgcaaagaggcggcagagatttaccgagcaaattgccacaagctgttcccctacgcattggcttttatgccgcctggttacgaagaggatatgaaaatcacagtgaacggtgacagctccgctgaagcggaggagctggctaacgaaatctag

SEQ ID NO: 29618 - DNA, 1797 bp, synthetic construct
  source 1..1797: mol_type = other DNA; note = Synthetic coding sequence
atgggcggatgcttttcaaaacccaagcctgtggagctcaagattgaagtggtgcttcccgaaaaggaaaggggtaaagaggagctgagcgcatctggcaaggggtcacctcgggcttaccaagggaatggtaccgcccgacactttcacaccgaggagcgtttatccaccccacacccgtatcccagcccccaggactgcgtcgaggccgctgtgtgccacgtaaaagacctggaaaatggccagatgcgagaagtggaacttgggtggggcaaggtgctcttggtgaaggataacggggaattccacgctttaggacacaaatgtccgcattatggtgctccacttgtgaagggcgtcctgagtcggggtcgcgttcggtgtccctggcacggagcatgctttaatatatctaccggagacctcgaagatttcccaggtctggatagccttcataagtttcaggtgaaaattgaaaaagaaaaggtgtatgtacgtgcgtcgaagcaggccctgcaactccagcgcagaacaaaagtcatggccaaatgtattagcccctcagcagggtactcatcttccaccaacgtgttgatcgtcggagcaggcgcagcgggtcttgtatgcgcagaaacattgcgccaagaggggttttcagaccgaattgtcctgtgtacccttgatagacacctcccctatgaccgccctaaattaagtaaaagcttggatacacaacctgaacagttggctctgaggcccaaggagttttttagagcatatggtatagaagtcctaacagaggcccaggtcgtgaccgtggacgtgcgaaccaaaaaggtcgtgtttaaagatggcttcaaactcgagtacagtaaactgctgctcgcgccaggttctagtccaaaaaccctgagttgcaagggcaaagaggtggaaaacgtcttcactattcgaaccccagaggacgcgaatagagtggtccgccttgctaggggaagaaacgtggtcgtcgttggggcaggattcctgggcatggaggtagctgcctacctgactgaaaaggcccatagcgtctccgttgttgagttagaggagacccccttccgcagatttctgggagagagagtaggcagggcactaatgaagatgttcgagaataatcgcgtaaaattctacatgcagacggaggttagcgagctcagaggccaggagggcaaactgaaagaagtcgtgctgaaaagctctaaggttgtgagagctgacgtgtgcgtggttgggataggtgccgtgcctgccaccggtttcctgaggcagtccgggataggattagattccagaggattcatccccgtgaacaagatgatgcagaccaacgttcccggagtgtttgccgcaggcgacgcggttactttccctttggcctggcgtaacaataggaaggttaatattccccactggcagatggcacacgctcaggggagggtggcagctcagaatatgctggcccaggaagccgaaatgagtactgttccttatctgtggaccgccatgtttggaaagagtctaaggtacgccggttacggcgagggcttcgacgatgtcattatccagggtgacttggaggaactgaaatttgtggccttttacacgaagggggacgaggtgatagctgtagcttccatgaactatgacccaattgtgtcgaaggttgccgaagtgctcgcgtcgggtcgagccattcgcaaacgagaggtagaaacaggcgacatgtcttggctgacagggaaaggttcatag

SEQ ID NO: 29619 - DNA, 1818 bp, synthetic construct
  source 1..1818: mol_type = other DNA; note = Synthetic coding sequence
atgggcggatgcttctcaaagcctaagccagtagagctgaaaatcgaagttgtgctgccagagaaagaaaggggtaaagaagagttgtcggcctctggcaaggggtcaccgagggcgtaccagggtaacggcacagccagacatttccacacagaggagaggttgagcactccccacccctatccgtcccctcaggattgcgttgaggcagccgtgtgtcacgtaaaagatttggagaacggacagatgcgcgaggtcgaactaggctgggggaaggtgctcctggtgaaagacaatggagaatttcacgcgctggggcacaagtgtccgcactacggggctcccctggtgaaaggagtgctgagtcggggacgagtgcggtgcccttggcacggagcctgttttaatatctctaccggtgatctggaggattttccaggcctggattcactgcataagtttcaggtcaaaatcgagaaagagaaggtgtacgtgcgagctagtaagcaagcattgcagctccaacgcaggactaaggtcatggcgaagtgtatatccccctcagctggatattcctctagcacaaacgttctgatcgtgggcgcaggagccgctggactagtgtgcgccgagacactgcgtcaggagggtttttctgataggatcgtgctatgtacattagatcggcatctgccctacgatagaccgaaattaagcaagagtctcgacacccagccagaacagctcgctcttaggcccaaggaattcttccgcgcatacggcatcgaagtcctgacagaagctcaggtggtgaccgtggacgttaggaccaagaaagtagtgtttaaggatggatttaaattagaatacagtaaacttctgctggcgccaggaagctcccctaagaccctgtcatgcaaaggcaaggaggtggagaacgtgtttactattaggacaccggaagacgctaatcgcgtagtcaggcttgcccgaggacgaaatgttgtggttgtgggcgctggcttccttggaatggaagttgcagcttacttgaccgaaaaagcacacagtgtatccgtggtagagcttgaagaaacaccgttcagacgctttctcggagagcgagttggacgcgctctgatgaagatgtttgaaaataaccgcgtgaagttctatatgcagactgaggtctccgagctgaggggccaggaaggcaagctgaaagaagttgtgctgaagtcatctaaagtggtccgggctgacgtgtgcgttgtcggcatcggggctgtgcccgcaacaggattcctgaggcagagcggaattggactagactccaggggatttattccggttaacaagatgatgcagaccaacgtgcccggagtgtttgccgctggtgacgcggttactttcccactggcgtggcggaacaaccggaaagtgaacattcctcactggcagatggcccacgcccagggcagggtggcagcccagaacatgctcgcccaggaggcagaaatgagtacagtgccgtacctgtggactgccatgtttggcaagagtctgaggtacgctgggtacggagagggttttgatgacgtcatcatacagggtgacctggaagaattgaagtttgtggcgttctacacgaagggagacgaagtgatcgccgtagcatcaatgaattatgatcccatagtgtccaaggttgccgaagtgctggcgtcaggacgggcaatacgcaaaagagaagtagagctgttcgtgctgcatagcaaaactggggatatgagctggctgaccgggaaagggagctag

SEQ ID NO: 29620 - DNA, 1374 bp, synthetic construct
  source 1..1374: mol_type = other DNA; note = Synthetic coding sequence
atgaatcaaccttgtaactcaatggaaccgagagtcatggacgacgatatgctgaaactggcagtcggggaccagggacctcaggaagaagctggacagttggcaaaacaggagggcatcctctttaaagacgtgctctcccttcagcttgattttcggaacatcctccggatcgataatctgtggcagttcgaaaacctgcgaaaactacaactcgacaacaatatcattgagaaaatcgaagggctcgagaatttagcgcatttggtgtggctagatcttagttttaacaacattgaaacaatcgaaggcctggacaccctcgtcaatctggaggatctgtcattattcaacaatcgtatttctaaaatcgactccctggacgcgctggttaagctgcaggtgctctccctgggaaacaatcggatcgataatatgatgaacataatttaccttaggaggttcaagtgtctccgaacgctgtcgctgagccgtaacccaatctctgaagcagaagattacaagatgttcatatgcgcttatctgcccgacctgatgtacctagactatcgcagaatcgacgatcataccaagaagttagctgaagccaagcaccagtattcaatagacgagctcaagcatcaggagaacctcatgcaggctcagcttgaagatgaacaagcccagagggaagaactcgagaagcacaagactgcctttgtcgagcatctgaacgggagtttcctgtttgactctatgtacgcagaagactcagagggtaacaaccttagctacttgcctggggtcggggagttgctcgaaacttacaaggacaagttcgtgattatctgcgtgaacatattcgaatatggcttaaagcaacaggaaaaaagaaagactgagttggatacgttcagtgagtgcgtcagagaggccattcaagagaatcaagagcaaggtaagcgaaaaattgccaaatttgaggagaagcatttatcatcactgagcgcaatcagagaggagctggaattgcccaacatcgaaaagatgatccttgagtgtagtgctgatatttccgagctctttgatgcactgatgactcttgaaatgcaactggtcgagcagttggaagaaactatcaacatgtttgagagaaatatagtcgatatggtggggttgtttatagagaacgtgcagtcattgatggcgcagtgcagggacttagagaatcaccatcacgaaaaactgttagagatcagtatctccacactggaaaagattgtagagggcgacttggatgaggatcttccgaacgatctgcgcgcagggaggtttcaaaagtttaactacgttgaggcttcgggcactttctag

SEQ ID NO: 29621 - DNA, 1374 bp, synthetic construct
  source 1..1374: mol_type = other DNA; note = Synthetic coding sequence
atgaatcagccctgcaactctatggagcctagggttatggacgacgatatgctgaagcttgcggttggagaccagggcccacaggaagaggctgggcaactggctaaacaggagggcattctgttcaaggatgtgttgagcctgcagttggactttcggaacatactgaggatagacaatctatggcagtttgagaatcttcgaaaactccagttagacaataatattatcgagaaaatagaaggactggagaatttggcccacctggtctggctcgacttaagttttaataacattgaaacaatcgaggggctggacaccctcgtgaacctagaggatctatcattgttcaataatagaatcagcaagattgacagcctcgatgcgctggtgaaactccaggtgctgagcctggggaacaatagaattgacaacatgatgaacataatctacctgcgacgttttaaatgtctgagaacattaagcctctcaaggaaccctatctccgaggccgaagactataagatgttcatctgtgcataccttcctgacctgatgtatctggactaccggagaatcgatgatcatacaaaaaagttagccgaggccaagcaccagtacagcatcgacgagctgaaacaccaggagaacttgatgcaggcacagctcgaggatgagcaggcccagagggaggagctggaaaaacacaagaccgcttttgtcgaacatctgaatggaagttttctcttcgatagtatgtacgcggaggactccgaggggaacaatttgagttacctgccaggagtcggcgagctcctcgagacttacaaagacaagtttgttatcatatgtgtcaatatttttgagtacgggctaaagcagcaggagaaacgaaagacagaattggatactttctctgaatgtgtacgcgaagccatacaggagaatcaggagcaggggaaaagaaagatcgcgaaattcgaagaaaaacacctgtcatcgctctctgcgataagagaggagctggaactccccaacattgagaagatgatcctggagtgttctgctgacatctccgaactgtttgacgcactaatgacgttagaaatgcagcttgtcgagcaactcgaagagaccatcaatatgttcgaacgaaatatcgtggacatggtgggcttattcatcgagaatgtgcagtccctcatggcccagtgccgagacctggaaaatcaccaccacgagaaactattggagatcagcatcagtaccttggagaagatcgtcgagggcgacttggatgaggatttgccaaatgatctgagagcaggcagattccagaagtttaattatgtagaggctagtgggacattttag

SEQ ID NO: 29622 - DNA, 1572 bp, synthetic construct
  source 1..1572: mol_type = other DNA; note = Synthetic coding sequence
atgaatcagccctgtaattcgatggaacccagagtgatggacgatgatatgctcaaattagcagtgggcgaccagggccctcaagaggaagctggtcaactggctaagcaggaggggatcttgttcaaagacgtgctgtctcttcaattagatttcaggaatattctcagaatcgacaatctgtggcagtttgagaacctgcggaaactgcagctagacaataacataatcgagaagattgaagggttggaaaatcttgcacaccttgtttggctggatctcagctttaacaacattgagacaattgaaggacttgacaccctagtcaacttggaggacttgtcgttattcaataatcgaatcagcaaaattgatagtctggacgcactggtgaaacttcaagtcttgtctctgggaaacaatagaatcgataacatgatgaacataatctacctgcggaggttcaaatgtctccgcacattgagcctgagccgtaatcctatctctgaagccgaagattataagatgttcatttgtgcctacctacctgatctcatgtacctggactatagaagaattgacgatcacaccaagaagctggccgaagccaagcaccaatactcaatagatgagctgaagcatcaggagaacctcatgcaagcccaactggaagacgagcaggctcagagggaagaactggagaaacacaaaacagcctttgtggagcatttgaacggctcgtttctatttgattcaatgtacgcagaagacagtgaaggtaacaacctgtcctacctccccggagtgggcgagctcctggagacttacaaagacaaatttgtgataatttgtgtgaacatctttgagtatggcctgaaacagcaggagaaacgcaaaaccgagcttgataccttctctgagtgtgtgagagaggcaatccaggaaaatcaggaacaaggcaaaagaaagattgctaagttcgaggagaaacatttatccagcctgtcagcaatcagagaagaactcgagctgccaaacatagagaaaatgatcctggagtgctccgcagacatttctgagctgttcgatgctttgatgaccctcgaaatgcaacttgtggagcagttagaggagactattaatatgttcgagcgcaatattgtggacatggtgggcctgttcattgagaatgtgcagtctctgatggctcagtgccgcgacctcgaaaatcaccaccatgagaaactgcttgaaatttctatttcaacactcgaaaaaattgtggaaggcgatctggatgaggacttacccaacgacctccgagctctgtttgtggacaaggatacaattgttaacgcagtgggtgcttctcatgatatccacctcttgaagatcgataacagagaggatgagctagtcacaaggattaactcttggtgcacacgactcattgacaggatccacaaggacgagatcatgagaaacaggaaacgcgttaaggagatcaaccagtacatagaccacatgcagtcggaattagacaatctggaatgcggtgacatattggattag

SEQ ID NO: 29623 - DNA, 1572 bp, synthetic construct
  source 1..1572: mol_type = other DNA; note = Synthetic coding sequence
atgaatcagccatgtaactctatggaacctcgggttatggatgatgacatgctgaaacttgcagtaggagatcagggccctcaggaggaggccggacagttggctaaacaagagggaatactctttaaggacgtgttatcccttcagttagattttcggaacattctgcgtatcgataacttatggcagttcgagaatttacgtaaactgcaattagacaacaacatcatagaaaaaattgaaggactcgagaatctagctcatctagtgtggctcgacctgtcatttaacaacatcgagactatcgaggggctcgacaccttagttaatctggaagacctgagcctgttcaacaaccggatctcaaaaatcgatagcctggacgccttggtgaagcttcaggtgttgagtctgggaaacaataggattgacaacatgatgaatattatctacctgagacgatttaagtgcctccgcactttatctttgtctagaaaccctatctctgaagccgaagattacaaaatgttcatatgtgcctacctgcctgatctgatgtatctcgattaccgcaggattgacgaccatacaaagaagctagccgaggcgaaacaccagtactcaattgacgaacttaaacaccaggaaaacctgatgcaggcgcagctggaggacgagcaggctcaacgggaggagttagagaagcataaaacggccttcgtcgagcacctaaatggttcctttctcttcgattctatgtatgctgaagattccgagggaaataatctgtcctatttgccaggagtgggtgaactgctcgagacttataaggacaagttcgtgattatttgtgtgaacatatttgagtacggacttaaacaacaggaaaagaggaagaccgaacttgacactttctccgagtgcgttagagaggctattcaagaaaaccaggagcaggggaagaggaaaatagccaaatttgaagaaaagcacctttcaagtctttctgccattcgtgaagagctcgaacttcctaacattgagaagatgatcctggagtgtagtgcggacattagcgagttgtttgacgccctaatgacactagaaatgcagctggtcgagcagcttgaggaaacaattaatatgtttgagaggaatatcgtagatatggtaggccttttcatagaaaatgtgcagtccctgatggcgcagtgcagagacctggagaatcaccatcacgaaaagctgctggaaattagcataagtacgctggagaagatcgtcgaaggagacttagacgaagacctgcctaacgacctccgggcattgttcgtggacaaggacaccattgtgaatgcagtgggcgcaagccatgacatccacctgctgaagattgacaatagggaagatgagctagtgactcgcataaattcctggtgtaccaggcttatcgaccggattcataaggatgaaatcatgagaaataggaaaagagtgaaggagattaaccagtacatcgatcacatgcagtctgaactggacaacctggagtgtggggatatcctcgattag

SEQ ID NO: 29624 - DNA, 1842 bp, synthetic construct
  source 1..1842: mol_type = other DNA; note = Synthetic coding sequence
atggcaactattcctgattggaaattacagctgctagcgcgacggagacaggaagaagcttctgtcagggggcgagaaaaggcagagagggaacgcctttcccagatgcctgcctggaagcgaggactgctagaacgaaggagagccaaactagggctgagccccggagagccatcccctgtgctgggcactgtcgaagccggaccaccagatcctgacgagagcgccgtcttgctggaagccattggcccagtgcaccaaaaccgctttatccgacaggaacggcagcagcaacagcagcagcagcagcgtagcgaagagcttctagccgagcggaagccaggcccactggaggccagggagaggagaccctctcctggagagatgcgagaccagtcccctaagggcagagaaagccgggaggaacggttatccccacgcgagactcgtgaaagaaggctgggaatagggggagcccaggagctttctctccggcctttagaagctagagactggagacaatcacccggagaggttggggatcgtagttcccgcctctcagaagcatggaaatggcggctctccccaggcgagacccccgagcgatcactacgacttgctgagtctcgcgaacagtcacctcggcgtaaagaagtggagtcccgcctcagcccaggtgagtccgcgtaccaaaagctggggttgaccgaggctcacaagtggcggccagactcaagggagagccaggaacagagtcttgtgcaactggaggcgacggagtggcggcttcggagtggcgaggagagacaggactatagcgaggaatgtggcagaaaggaggagtggccagtcccaggggtggcccctaaggagaccgccgagctgtctgagacgctgactcgggaggcgcaagggaactcttcagcaggcgtggaagccgctgagcagaggcctgtggaggacggggagagagggatgaaaccaactgaagggtggaaatggactttgaacagcggaaaagccagagagtggactccgagagacattgaggctcagacacagaaaccagagccgccagagtccgccgagaagttactggaaagccccggtgtcgaggccggtgagggggaagctgagaaggaggaggctggggcacaaggccgtcctctccgtgctctccagaactgctgcagtgttccctcccctctgcctccagaggatgccggaacaggaggtttgcgacagcaggaggaggaagctgtggaattacagcctcccccaccagccccactgagccccccacccccagctcccaccgctccgcagcccccaggggacccccttatgtcacggctgttctatggcgtcaaagcaggccctggggtgggagcaccccgacgcagtggccacacctttaccgttaatcccaggcgctccgtgcctcctgccaccccagccactcctactagccctgctactgtcgacgcagccgtcccaggcgcagggaagaaaaggtatcccaccgccgaggaaattctagtcctcggcggatacctgaggctctccagatcttgtctggccaaggggagtcctgagagacaccacaagcagctaaagatctccttctctgagacggctctggaaacaacataccagtatccttccgaaagttctgtactggaggaattggggcctgaacctgaggtgccctctgctccgaatcctcctgccgcacagccagacgacgaggaggacgaagaggagttactgctgttgcagccagagcttcaggggggtctccgaacaaaggctctgattgtggatgagtcttgtcgaaggtag

SEQ ID NO: 29625 - DNA, 390 bp, synthetic construct
  source 1..390: mol_type = other DNA; note = Synthetic coding sequence
atggccgagttgatccagaaaaagctacagggtgaggtggaaaagtaccaacagctgcagaaggatctctctaaatcaatgagtgggcgacagaaactggaggcccaactgacagaaaacaacatcgtgaaggaggaactggctctgcttgacggaagcaacgtggtgtttaagctgctcggacccgtccttgtgaagcaggagctgggtgaagcgcgtgccacagtgggcaaaaggctcgactacatcacggccgaaatcaagcggtacgagagccagctgcgtgatctggaaaggcaatccgaacagcagcgggagaccctggcccagttgcaacaagagttccagagagcacaagccgcaaaagcgggtgcgcctgggaaggcatag

SEQ ID NO: 29626 - DNA, 390 bp, synthetic construct
  source 1..390: mol_type = other DNA; note = Synthetic coding sequence
atggctgagctgattcagaaaaagctccagggggaggtggagaaatatcagcaacttcaaaaggacctgtcaaaatccatgagtggccgacagaagctcgaggcccagcttacagagaacaacattgtcaaagaggaactggctttattagatggctctaacgtcgtgttcaagttgctcggcccagtgcttgttaaacaggagctgggagaagcccgtgccactgttggaaaaagactggattatataaccgccgaaatcaaacggtacgagagtcagttacgtgatcttgagcgacagtccgagcaacaacgtgagactctcgcccagctacagcaagagttccagagggcacaggcagccaaagccggagccccaggaaaggcctag

SEQ ID NO: 29627 - DNA, 4128 bp, synthetic construct
  source 1..4128: mol_type = other DNA; note = Synthetic coding sequence
atggttcccggtgaagagaaccaactggtaccgaaagaagacgtgttctggcgctgccgccagaacatcttcgacgaaatgaagaaaaagttcttgcagattgaaaatgctgcagaagagcctcgcgtgctgtgcatcattcaggatacgactaactcaaagaccgtgaatgagaggattacgttaaatttgcccgcttctacacctgtccgtaagctgttcgaagatgtagccaacaaagtggggtacattaatggtaccttcgatctcgtgtggggcaacggcattaatacagctgacatggcgcctcttgatcatacatcagataaaagcctcctggatgctaatttcgaacctgggaagaaaaacttcctccacttaacagacaaggacggggagcagccacagattctgttggaagattcctctgccggtgaagacagcgttcacgaccggttcattggaccgctaccacgtgaaggtagcggtggttcaacgtccgattacgtgtctcagagctattcctatagtagcatacttaacaagtctgagactggctacgttgggctcgtgaatcaggctatgacctgttatctcaacagtcttctccagaccctgttcatgaccccggagttccgcaacgctctgtacaagtgggagttcgaggaaagcgaggaggatcccgtgaccagtattccctatcagcttcaacgcctttttgtgttgctccaaacttccaagaagagggctattgagactacggacgtgacacgctcctttggatgggattcgagcgaggcttggcagcagcacgacgttcaggaactatgcagagtcatgttcgacgcgctggagcagaagtggaaacagaccgaacaggccgatctaatcaacgagctgtatcagggcaagttgaaggactatgttaggtgcctggagtgcggctatgaaggctggcgcattgacacatacctcgacattccactagtgatccgtccctatggctcaagccaggctttcgcctccgtggaggaggcgctgcatgcgtttattcagcctgagatcctggacgggccaaaccagtatttttgcgagagatgcaagaaaaagtgcgacgctcgcaaaggccttcgcttcctccatttcccatatctactgaccctccagctgaagcgcttcgatttcgactataccaccatgcatagaatcaagctgaatgatcgaatgacttttccagaagaactggacatgagcacctttatcgacgttgaggacgaaaagtctcctcagaccgagtcttgcacagacagtggagcagaaaatgagggatcatgccacagtgaccagatgagcaacgatttctcaaacgatgacggagtggacgagggaatctgtctagaaaccaattcgggaaccgaaaaaatcagcaagtctggcctggagaagaattctctcatctacgagctgttctcagtgatggtgcacagtggaagtgccgctggcggtcactactacgcatgcatcaaatctttcagcgacgaacaatggtactcctttaacgatcaacacgttagtcggataacccaggaagatattaaaaagacacacgggggatcaagcgggtcccggggttactactcaagcgctttcgcatcttccaccaacgcatacatgctaatctaccggcttaaggatccagcaagaaacgctaagtttctggaggtcgacgagtatccagagcacatcaaaaacctcgtgcagaaggaaagggaattagaggagcaagagaaacggcaaagagaaattgagaggaatacttgtaaaattaagttattctgcttacaccccacaaagcaggtcatgatggaaaataagctggaagtgcataaagataaaactctcaaggaggctgtggagatggcttacaagatgatggatttggaggaggtgattcctttggactgttgcagactggtgaagtatgatgaattccatgattatctcgagaggagctacgagggggaagaagacactccgatgggtctgctgttgggaggtgtaaagagtacatatatgtttgacctacttctggaaacccgtaagcccgaccaggtgtttcagagctacaaaccgggtgaggtcatggtgaaagtgcacgtggtagatctgaaggcggaatctgtggctgcccctataactgtgagagcctatctgaatcagactgtcacggaatttaaacagttgatttctaaggctatacacttgccggctgagaccatgcgcattgtgttggagcggtgttacaatgacctaaggctgctctcagtgagttcaaaaacactgaaggccgagggcttttttcggtcaaacaaagtgttcgtagaatcttccgaaacactggattatcagatggcctttgctgatagccatctatggaagctcctggatcggcacgccaatactatccgattgttcgtgctcctgcccgagcagtccccagtgtcatacagcaagaggacggcgtatcaaaaggcagggggagatagtggtaatgtggatgacgactgtgagagggtgaagggcccagtagggtcactcaagtcagtggaagcaattttggaggagagcacagaaaagctcaagagcttgtctctgcagcagcagcaggatggcgacaacggcgatagcagtaagtctacagaaacttcagacttcgagaacattgaatccccacttaacgagcgggatagctctgcctctgtcgacaaccgggaactggagcagcacatccagacctccgaccccgagaactttcagtcagaggagcggagcgattctgatgtgaataacgaccggtccacctcttctgtggatagcgacatcctttcctcttcccatagttcagacacgctgtgtaatgccgacaacgcccaaattcccctagctaatggtctggactcacactctattacctcttcaaggagaacgaaggctaatgaagggaagaaggaaacttgggatacggcagaggaagactctggcactgattccgaatatgacgagtctgggaagtctagaggcgagatgcagtacatgtattttaaggcagaaccatacgccgctgacgagggttcgggggaggggcataagtggctcatggtgcatgtggacaaaaggattaccctggctgccttcaagcagcatttggagcctttcgtaggtgtgctcagcagccattttaaggtgttcagagtgtacgcttccaaccaagagttcgaatccgtgcgacttaatgaaaccctgtcaagcttttccgatgacaataaaattactatacggctcggccgtgccctgaagaaaggagagtatcgggttaaagtttatcagctcctcgtgaacgagcaggagccatgcaagtttctgctagatgcggtgtttgctaagggcatgacagtacgtcagtctaaagaggaactcatcccccagctgagagaacaatgcggtctggagctgagtatcgaccggtttcgtctgagaaagaaaacttggaagaacccaggaactgtttttctggactatcacatatacgaagaggatattaatatctcctccaattgggaagtttttctggaggtacttgatggcgtggagaaaatgaagtccatgagtcaactggccgtgctgagtagaagatggaagccctccgaaatgaaactcgatccctttcaggaagtggtcctcgaatctagctcagtagatgagctaagggagaagctgtctgagatttccgggattcctctggatgatatcgaatttgccaaggggagaggtaccttcccctgtgatatttccgtgctggacatccatcaggacttagactggaatcctaaagtcagtacactgaatgtatggcccctgtacatttgcgatgacggagccgtcattttttacagggataaaactgaagagctgatggaattgactgatgagcagcgaaacgagctcatgaaaaaagagagctcgcgcttgcagaaaaccggccatagagtaacctactcgcccagaaaggaaaaggctctcaagatctatctggacggcgctcccaacaaggatctgacacaggactag

SEQ ID NO: 29628 - DNA, 600 bp, synthetic construct
  source 1..600: mol_type = other DNA; note = Synthetic coding sequence
atgaggaccgcggatagggaagcgaggcctggactcccgtctctgttactcctcctcctcgccggagccggtctgtccgccgctagccccccagccgcacctaggtttaatgtgagtctggacagcgtgcctgagctgagatggctgcccgtcctccgccactacgatctcgatctggtcagagccgctatggctcaggtgattggcgacagggttcctaaatgggtacacgttcttatcggcaaggtggttttagagctggagaggtttctgccccagcctttcaccggagagattcgaggcatgtgtgatttcatgaacctgtctttagctgactgcctgctggtgaatctggcctacgaatcctccgtgttttgcacttccatcgtggcccaggactcccggggacatatctaccacgggaggaacctggactatcccttcggcaatgttctcagaaagctgactgtagacgtgcaattcttaaagaatgggcagatcgcctttactggaaccacattcatcgggtatgtcggcctgtggacggggcagtctccccacaaatttacggtgtccggcgacgaacgcgacccccattag

SEQ ID NO: 29629 - DNA, 972 bp, synthetic construct
  source 1..972: mol_type = other DNA; note = Synthetic coding sequence
atgcgaacagcggacagagaagccaggcccggattgccatctctcttgctcctcctgctcgcgggagctgggctgagtgccgcatcaccaccggctgcccctaggtttaatgtctctttggactccgtccctgaacttcgctggctgcctgttcttagacactacgatctggatctggtgcgcgcagccatggcacaagttataggcgatagggttcccaaatgggtccatgtgctcatcggcaaggtcgtgttagagctggagcgattcttgcctcagcccttcacgggcgagatccgcggtatgtgcgactttatgaacctgtctctcgcagattgtctgcttgtgaacctcgcctacgagagttcagtcttttgcaccagcatagttgcccaggattctagaggtcacatttatcatgggagaaacctcgattacccttttggcaatgtgcttcgcaagttaaccgttgacgtgcagtttttgaagaatggacaaatcgcttttacaggtacaacttttatcggatacgtgggcctatggacgggtcagtcccctcacaaattcacggtaagcggagacgagcgcgataagggctggtggtgggaaaacgctattgctgccctgttccggaggcacatcccagtgagctggctcatccgagcgactttaagcgaatctgagaactttgaagccgctgtcgggaagcttgctaagactcctctgattgcagatgtctactacattgtcggcggaacgtctcctcgcgaaggcgtagtcattactcggaacagagatggccctgcggacatttggcccctcgatccgttgaatggcgcatggttcagagtggagacaaactatgaccattggaagcctgccccaaaggaagatgatcggcgtacatctgccattaaagccctcaacgcaactggccaggccaatctgtcgctggaggccctattccagtag

SEQ ID NO: 29630 - DNA, 4539 bp, synthetic construct
  source 1..4539: mol_type = other DNA; note = Synthetic coding sequence
atggccgctgcagcgggaaaccgcgcttcaagtagcggcttccccggagctcgggcaacatctcctgaggccggaggaggcggtggagcccttaaggcaagctccgccccagccgctgccgcaggcctgttgagggaagccggtagcggtggtagggagcgggctgactggcgcagaagacagctgcgaaaagtgcgttctgtggagcttgaccagctaccagagcaaccccttttcctcgccgcatcccctcccgcttcatcgacatccccatctcccgagcctgccgacgcggcaggctcagggacaggattccaaccagttgcggtgccaccgcctcatggtgcagccagccgagggggagcgcacctcaccgagtcagtggctgcccctgacagcggagcgtctagcccagcggcagccgagcctggggagaagagggctcctgccgctgagccctcaccagctgccgcacctgccggacgcgagatggaaaataaagaaactctgaaaggcttacataagatggacgaccgccctgaagagaggatgatcagggagaagttaaaagccacctgtatgccagcttggaagcacgaatggcttgaacggagaaatcggaggggaccagtagtcgttaaaccaataccggtgaagggggacggctccgaaatgaatcacctggccgcagaatcacctggagaggtacaagcttctgccgcatcacctgcatccaagggcaggaggtcacccagtcctgggaattctcccagcggtcggacagttaaaagcgagagccctggtgtcagacgcaagagagtctcacctgtgccgttccagtctggccgaatcacccccccacgtcgcgctccatcccctgacggtttctccccttatagccccgaagaaaccaaccggagggtaaataaggttatgcgcgctaggctgtacttgctgcaacagatcggcccaaactcattcctcattggaggggattcccccgacaacaaatatcgggtgtttattggccctcagaactgttcctgcgctaggggcaccttctgcattcatctgttgttcgtcatgctccgagtttttcagctcgagcctagtgatcccatgctgtggagaaagactttaaaaaactttgaggttgagtcgcttttccagaaataccattcacgtcggagctcacgcataaaggcccctagcagaaacaccatccaaaagttcgtgagccgcatgtccaattcacataccctttcctcctccagcactagcacttcctcgagcgagaactctatcaaggacgaagaagagcagatgtgtcctatatgcctgctagggatgctggatgaggagagtctcacggtatgcgaagacggttgcaggaacaaactgcaccaccattgcatgagcatatgggccgaggaatgccggcgtaaccgcgaaccacttatctgccccctatgtcggagcaagtggaggtcgcacgatttttattctcacgagttgtctagtcctgttgactcccccagcagtcttcgggctgcacagcagcaaaccgtgcagcagcagcctttggccggatccagacgcaaccaggaaagtaatttcaatctgacacattatgggacacaacagatcccacccgcatacaaggatttggctgaaccttggattcaggtcttcgggatggagctcgtgggatgtctattcagcaggaactggaatgtgcgcgaaatggctctgcgccgtctgtctcacgatgtgtcaggcgctctgttgttagctaatggtgagtccactgggaactccggcggttcctccggatcgtctccctctggcggagccacctccggaagttcgcagacctctatcagtggggatgtcgtggaggcctgctgctccgttctatcaatggtttgtgccgatccagtttataaggtctacgtagctgccctgaagaccctccgcgcaatgctggtgtataccccatgtcactctctcgccgagcgaatcaagttgcagagactgctgcagcctgtcgtagacacaatcctcgttaagtgcgcagacgccaacagccgcacatcacagttgagcatcagcacactgctcgagctgtgcaaaggccaagcaggggagttggccgttgggagggagatcctgaaagccggtagtatcggaataggcggagttgactatgtcctcaactgcatattaggaaatcagactgaatccaacaactggcaggaactcctcgggagattgtgcctcattgacagactgctcctggaatttcctgctgagttctatcctcatattgtttctactgacgtcagtcaggccgaaccggtggagattaggtacaagaaattgctttcactcctgaccttcgccctgcagtccatcgataatagtcattccatggtaggaaagcttagcagacgcatttatctcagcagtgcgagaatggtgaccactgtgccccatgtgttttccaaactgttggaaatgttgtctgttagctccagcactcacttcacccgcatgcgccgtaggcttatggctatagccgacgaggtcgaaatcgccgaggcaattcagctcggagtcgaagataccctggacggccagcaagactcgttcttgcaagcatctgtcccgaataactatttggaaactaccgaaaattcttccccagaatgcactgtgcacctggaaaaaactgggaaaggcctgtgcgcaactaagttaagcgcgtcgagcgaagatatttcagagagacttgcctctattagcgtgggtccatcctcatccactactaccaccacaacaacaaccgagcagccgaaaccaatggtgcagacaaaaggacggcctcactcacagtgtctcaatagcagccctctgtcccaccactcacagcttatgtttcccgcactaagcacaccttcctcctccaccccttctgtgccagcgggaacagcaaccgacgtgtcgaaacaccgcctccaggggttcatcccctgtagaattccctcagcaagcccccaaacccaaagaaagttctcactgcagtttcaccgcaattgccccgagaacaaggacagcgacaaactgtccccggtgttcacacagagccggcctctgccaagttcgaatatccacagaccaaagccttctaggcccaccccgggtaatacaagcaagcagggcgacccctctaagaattcgatgacattagacctgaactcttccagcaagtgcgacgattccttcggctgttcctccaattcatctaatgcagtgatacctagtgacgaaacagtattcaccccagtagaggagaagtgcaggttagacgttaacaccgaactgaacagttctattgaagatcttcttgaggctagtatgcctagcagcgacacaaccgtcaccttcaagtctgaagttgctgtactgtcgccagagaaagccgaaaacgacgatacctataaggacgacgtaaatcataaccagaagtgtaaagaaaagatggaggccgaggaggaggaggcactggctatcgcaatggccatgtcggcttcacaagatgcactgccaattgtacctcaattgcaggtggaaaacggtgaggacattattattatacagcaggatacgcctgagactctgccgggacacaccaaagcgaagcagccttacagggaggatacagagtggttgaagggccaacagattggtctcggcgctttctcaagttgttaccaggcccaggatgtcgggaccggaactttgatggcagtgaaacaggtcacatacgtacgcaatacctcttccgagcaggaggaagtagtggaagccctccgtgaggaaatacgtatgatgtcccatctgaaccatcctaatattatcaggatgctgggggctacatgtgagaaatctaactacaacctgtttattgagtggatggcaggcggttcagttgcccatttgttgtctaagtatggtgccttcaaggagagtgttgtgatcaactacacagaacaattgctgcgagggctgtcatacctgcatgagaaccagatcatccatagggacgtaaaaggagcaaacctgctaatcgacagcactggacagcgccttaggatagcagattttggcgctgccgcacgcctggcgagtaaaggaaccggtgcaggggagtttcagggccaactccttggaactattgcatttatggcacctgaggtcctgcgcggacagcagtatggacgcagctgcgatgtctggagtgtcggatgtgctattattgaaatggcttgtgcaaagccaccatggaacgctgagaagcactccaaccatctagcccttatcttcaagattgcgtccgccacaaccgctccttccataccgtcccatctgtcccccggactgcgcgacgtggccctccgctgtctcgaattacagcctcaggaccggcctccatctagagagctcctgaagcatcctgtcttcagaaccacctggtag

SEQ ID NO: 29631 - DNA, 2274 bp, synthetic construct
  source 1..2274: mol_type = other DNA; note = Synthetic coding sequence
gcagacgggggagacagccaagcatttaggtgtacctcctgtgggcatgccggaactaccccggctccgagggaagctctatcacctgctgatgctcatgtgggcagaggatttgcagagcgcgagcctataccggctcagggcctactggttctggcggtcctctccgatggagcaggcgatcacatccgtcaacgcctgctccctccactgctgcaaattgtttgtaaaggactcgaggacccttctcaggtcgttaggaatgctgcgctgttcgctctgggccagttttcagaaaatttacagccccatattagcagctatagtagggaggtcatgcctttattgctcgcctatctaaaatcagttcctcttgggcacacccatcacttggccaaggcctgttacgcactggagaacttcgtcgaaaatctcggaccaaaggtgcagccctaccttccagagttgatggaatgtatgctacagcttcttagaaatccatctagccccagggccaaggaactcgccgtctccgctctgggagctattgccaccgcagcccaagcttcgttgttgccctatttccctgctattatggaacacttgagggagttcctgcttaccggccgagaggatttgcagcccgtccaaatccagtccttggaaacactcggggtactcgctcgggctgtgggcgagcccatgcggccattagccgaggaatgctgccaactcgggctcggcctttgcgaccaggtcgatgaccccgacctaaggaggtgtacctattcgttgtttgcagctctgtcgggtctgatgggagagggattagccccacaccttgaacaaattacgaccctgatgcttcttagcttgcggtccaccgagggaatcgtgccccagtatgacggtagctcaagcttcttgctatttgacgacgagtcagacggcgaggaggaggaggaactaatggatgaagacgtggaagaggaggacgactccgagattagtggctattccgtggagaatgcatttttcgacgagaaggaagatacctgcgccgctgtaggagagatcagcgtgaataccagtgtcgcatttctgccatatatggagagtgtgtttgaggaggtgttcaaacttttggaatgcccccacctgaatgtcagaaaagctgctcacgaggcattgggccagttttgctgcgctctacacaaggcgtgtcagtcatgcccctcagaaccgaacacagcagctcttcaggccgcactggccagagtggtgcctagttatatgcaagctgttaacagagaaagggagaggcaggtcgtgatggccgttttggaggcactgactggggtgcttcggtcctgtggtaccttgactttgaagccccctggtcgcctggccgagctgtgcggggtgctgaaggcagtgctgcagagaaaaacggcctgccaggacacggatgaggaggaggaggaggaagatgacgaccaggcagagtatgacgccatgttgctcgaacacgccggagaggctattcccgcactggccgctgcagctgggggtgattcctttgcgcctttcttcgcagggtttctgcctctacttgtgtgcaaaactaaacagggctgtacggtggctgagaagtcgttcgccgtgggcactctggccgagactattcaagggctcggggctgccagcgctcagttcgtaagccggctccttcctgtgttgctgtctacagcacaggaggccgaccccgaggtgcgatctaatgccatatttgggatgggcgtgctggccgaacatgggggtcatcctgcacaagaacacttccccaaactccttggactcctgttccctttgttagccagagaaagacatgatcgcgtgcgcgataacatttgtggcgctctggcccgattgctcatggcctcacctactcgcaagcctgagccccaggttctggccgctttattgcacgcactacccctgaaggaagacttggaagagtgggtaaccattggaagactcttctccttcctctaccaatcctcgccagaccaagtcatcgatgtcgcccctgaactcctgaggatttgttcactgatcttagcagacaataagatcccaccagacactaaagctgcactgctactgcttctcacgtttctcgcgaaacagcatacagatagcttccaggctgccctgggaagtttgcccgtggacaaagcacaagagctgcaggcagttctgggattatcctag

SEQ ID NO: 29632 - DNA, 1812 bp, synthetic construct
  source 1..1812: mol_type = other DNA; note = Synthetic coding sequence
atgggcgtgattcctgagggcccactttgggtcagcgggtccgatgacaatctctcaggtacgagcggcatggaggtggacgatagagtctctgccctcgaacaaagactgcagctccaggaggatgaactggcagtgctgaaggctgccctcgctgatgcgcttcgcagattaagggcttgtgaggaacagggggctgccctgcgagcaagggggaccccgaaagggcgtgcaccgccacgccttggcacgaccgctagcgtgtgccagcttctgaaaggcctgcctacacgaacccccctgaacgggagcggaccacctcgcagagtcggaggctatgccacaagtccttcatcccccaagaaagaggcgacgtctggtcgatcatctgtgagaagatatctctcgcctgaacgtctggctagtgtgcggcgagaagacccgagatcacgcaccacatcatcgagcagtaattgctcagcaaaaaaagagggcaagacgaaggaagtcatattctcagtggaggacgggtccgttaaaatgttcctcaggggtcgcccagttcctatgatgattccggacgagctggcaccaacttacagcctggacactaggtctgaactgccaagctgccgcctgaagctggaatgggtttatgggtacaggggaagagattgcagagcaaacttgtatctgctccccaccggtgagattgtctacttcgtcgcatcagtagcagtgctgtactcagtcgaggagcagcgccagaggcactacctcgggcacaatgatgatatcaaatgtctcgctatccacccggatatggtgacaatcgcgacaggtcaggtagctggcactaccaaagagggaaaaccactaccaccccacgtgaggatctgggactccgtttccctgagcaccttacacgtacttggactgggcgtgtttgacagagctgtttgttgcgtggggttcagtaaatcaaacggcggaaacttgctgtgtgccgtggatgagtccaatgaccatatgctcagcgtgtgggactgggcgaaggaaactaaggtggtggatgttaaatgtagtaatgaggccgtccttgtagccacttttcatcctactgacccgaccgtgctgattacctgtggaaagtctcacatctacttctggactctggaggggggttcccttagcaaaagacagggtctattcgagaagcatgagaaaccaaaatacgtgctttgcgtcacatttttagaaggcggagatgttgtcaccggcgacagcggcggaaatctgtacgtgtggggaaaaggaggaaaccggatcactcaagcagttctcggagcacacgatggtggggtgttcggactgtgcgcacttagggacggtaccctagtgtctggcggtgggagggatcgacgagtcgttttatggggaagtgactatagcaagcttcaagaggtggaggtgccggaagatttcgggccagttcggacggttgctgagggtcatggagacacactgtacgtcggaactacgaggaacagcatcctgcaggggagtgtgcacacgggcttcagtttattggtacaaggccatgtagaagaactgtggggattggcaactcatccttcccgggctcagttcgtgacctgtggacaggacaaactggtgcacctgtggtcctctgactcccaccagccgctatggtccaggataattgaggtggagagtcggtcagtgacccaggcgggaggccaatggcatgatctgggctcactgcagccaccccctcctggtttcaagtag

SEQ ID NO: 29633 - DNA, 996 bp, synthetic construct
  source 1..996: mol_type = other DNA; note = Synthetic coding sequence
atggcagagggaggtggtcccgagccaggtgagcaggagagacggtcgtctggacccaggcccccatcagccagggatctacagctcgcattggcagaattgtacgaggatgaggtcaagtgcaaatccagcaaatcgaataggccaaaagcaactgtgtttaagtcacccagaacacccccacagagattttacagttctgagcacgaatatagcggccttaatattgttcgaccttctaccggcaagattgttaacgagctgttcaaagaagccagagagcatggagccgtgcccctcaatgaggccacccgggcatccggagacgacaagagcaaaagtttcaccgggggaggctataggctgggatcatcattttgcaaaaggtccgaatatatctacggggaaaaccagctgcaggatgtgcagatcctcctgaagctctggagcaatggctttagcctggatgatggagaacttcgtccatataatgaacccaccaatgcccaattcctggagagtgtgaagcgcggagaaatccctctggagcttcaacgactggttcatggaggccaggtcaatctcgatatggaagaccaccaagaccaggaatatattaaaccgaggctgcggttcaaggctttttcaggggagggacaaaaactgggcagtctgacacctgagattgttagtactcccagctctcctgaggaagaagacaagtcgattctcaacgccgtcgtgttgatcgatgacagtgtgcctacaacgaaaatccagatccggctagcagatggctccaggctgatccagaggtttaattctactcaccgcatcctggatgtcaggaatttcatagtccagagtaggcccgagtttgcagctctggactttattctggtgacctcatttcccaataaggaactgaccgatgagagcctgactttgttggaggcagatattctgaacacagtgttgctgcagcagctgaaatag

SEQ ID NO: 29634 - DNA, 2064 bp, synthetic construct
  source 1..2064: mol_type = other DNA; note = Synthetic coding sequence
atggacggtggcgctctaacagacacctccctgactgattcctatttcagcacctccttcattggggtgaatggtttcggaagtcctgtcgagactaaatatcccttaatgcagagaatgacaaactccagtagtagccccagcctattgaatgacagtgctaagccttactctgcccacgatcccctgacgagtccggcatcctccctgttcaatgatttcggagccctcaacattagtcagaggcgaaagactcctaatccaaccgcatcagaattcatccccaaaggcggatcaacaagccgcctcagcaacgtctctcagtccaacatgtctgccttcagccaagtgttcagccacccctcaatgggatctccggcaaccgctggtctggcgccaggcatgtctctgtcagcgggaagttccccactccattctccaaagatcacacctcacacatcccccgctccgagaagacgatcccataccccaaaccccgcatcatacatggtgccaagctctgcttctacctctgtgaataatcccgtcagtcaaaccccttcctctggtcaggtcatacagaaggagacggtgggaggaaccacctacttctataccgataccacaccagcgcctttgaccggcatggtgttccctaattaccatatttatccacccacagctcctcatgtggcctatatgcaaccaaaagcgaacgccccttccttcttcatggcagacgagttgcgccaagagctcattaaccgtcatctgataaccatggcacagatagaccaggccgatatgcccgcagtcccgaccgaagtcgatagctaccattccctgtttcccttggaacctctgccgccacctaacaggatccagaagtcctcaaattttggctatatcacctcctgctataaagccgtgaactccaaggatgatttaccatactgtttgcgcaggattcatgggtttaggctggtgaacaccaagtgtatggtgctggtggacatgtggaaaaaaatacagcacagtaacattgtgacattaagagaggttttcaccacgaaggccttcgcggagccctccctggtctttgcctacgacttccacgccggaggggaaacaatgatgagtaggcattttaatgaccctaatgcggatgcttactttaccaagcgcaaatggggccagcacgaaggccctctcccaaggcagcatgcgggactgctgcccgagagcctcatctgggcttatatcgtgcagttgagcagtgcactcaggaccatccataccgccggactggcttgccgagtgatggaccctaccaagatcctgattaccggtaagacccgccttcgagtgaactgtgtgggcgtcttcgatgtcctaaccttcgataattcacaaaataataatccgctggcacttatggcccagtaccagcaggctgacctaataagccttggtaaggtggtcttagcactcgcatgcaatagcctagctggaatacaacgagagaacctacaaaaggccatggagctggtaacaattaattatagttcggatctgaaaaacctaatcttgtatttgttgacagatcagaataggatgcggagcgttaacgatattatgcccatgatcggtgcccgtttttacacgcaacttgatgctgctcagatgaggaacgacgttattgaggaagatcttgcaaaggaagtgcagaatggacgtctgtttcgcctactcgcaaagctcggtacaatcaatgagcgacctgagttccagaaagatcctacctggtccgagactggagacagataccttcttaagctgtttagagaccatctgttccaccaagtcaccgaggcaggcgcaccatggatagatctgtcccatatcatctcatgcttgaataagctagatgctggagtgccggaaaaaataagcctcatttccagagatgagaagtccgtgctggtggtaacttatagcgacctgaagcgctgctttgaaaacacatttcaggagttaatagcagccgctaatgggcagctgtag

SEQ ID NO: 29635 - DNA, 6950 bp, synthetic construct
  source 1..6950: mol_type = other DNA; note = Synthetic coding sequence
atggacggagtctcctcagaggccaatgaggagaacgataacattgagcggcctgtccgtcgcaggcacagcagtattctgaaacctccacgcagccccttgcaggatctgcgtggagggaatgagagagtccaagaaagcaatgcgctgcggaataagaagaactcgagaagggtttcttttgctgacaccattaaggtgttccaaactgagtcccatatgaaaatcgtgcgtaagtctgagatggaagagacagaaaccggcgaaaaccttctcttgatccaaaacaaaaaattagaagataactactgtgaaattacagggatgaatacactgctcagcgccccaatccacacacagatgcaacaaaaagaattcagcatcattgagcataccagagagaggaagcatgcaaacgatcagacagtgatctttagtgacgagaaccagatggacttgaccagcagccatacagtgatgatcaccaagggactccttgacaaccctatcagcgagaagtccaccaaaatcgatactacctccttccttgctaatctcaagctgcataccgaggattctaggatgaaaaaagaagtgaactttagcgtagaccaaaacacttccagtgagaacaagattgactttaacgacttcattaagcgtttgaagacaggcaagtgctcagctttccctgacgttcccgataaggagaattttgagatcccaatctattccaaagagccgaatagcgcttccagcacacatcaaatgcacgttagcctcaaggaagacgagaacaactccaatatcacccggctgttccgcgaaaaggatgacggaatgaatttcacgcagtgtcatactgcaaatattcagacattaatccctacatccagcgaaacgaacagcagagagagtaaggggaatgacatcaccatatatggaaatgatttcatggatcttaccttcaatcatactttgcagattctgcccgctaccggcaatttctctgagatagagaaccagactcaaaatgccatggacgtaactacgggatacggcaccaaggcatcaggcaacaaaaccgtcttcaaatccaaacaaaacaccgcattccaggatctgtctataaactcagctgacaagattcacattactcggtctcacatcatgggggctgagacgcacatcgttagtcaaacatgtaaccaggatgcccgtattttggcgatgactccggagagcatctacagtaatccatctatacagggctgtaagacggtattttatagctcttgcaacgatgctatggaaatgacaaaatgcctttccaacatgcgggaggagaagaatctgctgaaacacgactccaattatgcaaaaatgtactgcaaccccgatgcgatgagctctttgactgagaaaaccatttatagcggggaagagaatatggacattacaaaaagtcacaccgtagcgattgataatcagatcttcaaacaggatcaatccaacgtgcagattgccgcagcgcctacgccagagaaggagatgatgctgcagaatcttatgaccacgagcgaagatggaaagatgaatgttaattgtaattctgtcccacatgtctcaaaggagcggatacagcagagcttatcgaatcctctgtccatttcactcacggaccggaaaacagagttactgagcggagagaacatggaccttacagagtcccacactagcaatctgggctcccaggtgccccttgcggcatataatctcgccccagagtcaacctccgagtcccatagccagtcaaagtcatcctccgacgagtgtgaggagattactaaatcacgcaacgagcccttccagagaagtgacattattgcaaagaacagcctcactgacacatggaataaggacaaggactgggtcctgaagatattaccctatctagataaggatagccctcagtctgcagactgcaaccaagagattgcaacttctcataacattgtctattgtggcggagtgctcgacaagcaaattacaaaccggaatactgtgtcctgggaacagtccctctttagcacaaccaaaccactcttttctagtggccagttctctatgaagaaccatgataccgcgatttcatcccacactgtgaaatccgtactgggtcagaactctaagctggccgaaccactgaggaagtctctgtcgaatcccactccagactattgccacgataagatgatcatctgctcagaggaagagcagaacatggacctgacgaaaagccacaccgtggtcataggatttgggcctagcgaactgcaggaactcggtaagacgaaccttgaacatacaaccggccagctcactacaatgaacagacaaatcgccgtcaaggttgagaagtgtgggaagtcgccaatcgaaaagagcggtgtgctgaagtctaactgtatcatggacgtcctggaggatgaaagcgttcagaagcccaagttccctaaggagaagcagaatgtcaaaatctggggtagaaagagtgtgggtggtccgaaaattgataagactatagtgttttccgaggatgacaagaatgatatggacataactaagtcctataccattgaaataaatcatagaccactgttggagaagcgggactgccacctggtgccattggctggcacatcagaaacgatcctctatacatgccgccaggatgacatggaaatcactcgatcccatactaccgcattagaatgcaagacagtgagccctgatgagatcacaaccaggcctatggacaaaaccgttgtattcgtcgacaaccatgtggagcttgagatgactgagtctcacacagtgttcatcgactaccaggaaaaagagagaaccgacaggcccaatttcgagttgtcccagcgaaagtcgctcgggacaccgacggtcatttgtacacctacagaagaatctgtattctttccagggaacggagaatctgatcgccttgtggcgaatgattcccagcttacccccctcgaggaatggagcaataaccgaggcccagtcgaagtcgctgataacatggaactgagcaagtctgcaacctgcaagaacattaaggacgtgcagtcaccgggattcttaaatgagcccctatcttctaagtcccagagacgaaagtctcttaaactgaagaatgacaagacaatcgtgttcagtgaaaaccataagaacgatatggacataacacagtcctgcatggtggagattgataacgagagcgccctggaggacaaggaggatttccacttggcaggcgcaagcaaaactatcctttatagctgcggtcaggatgacatggagatcacgcgctcacacaccacagcacttgaatgcaagacactgctgcccaacgaaatcgcaattaggcccatggataagaccgtgcttttcacagataattacagtgatctagaggtcacagactcacacacagtcttcatcgattgtcaggccaccgaaaagattttggaggaaaatcctaagtttgggatagggaaggggaagaatctaggcgtgtcatttcctaaggacaactcttgtgtgcaggagatcgcggaaaagcaggcattagcagtcgggaataagattgtgttacataccgagcagaaacagcagctgtttgccgcaacgaaccggacaactaacgaaatcatcaagtttcattccgccgctatggacgaaaaagttattggaaaggttgtagaccaagcatgtaccctagaaaaggcccaagtagaatcctgccagcttaacaacagggatcggaggaacgtagactttacaagctcacacgccactgccgtttgtggaagctctgataattactcatgcctccccaatgtgatttcttgcacggataatctagagggaagcgctatgctactgtgcgacaaagatgaggagaaagccaattactgcccagtccagaatgatttggcatacgctaacgattttgcatcagaatactacctggaatcagagggccaaccccttagcgctccatgtcctttattagagaaggaggaggtgatacagacaagcactaagggccagctggattgtgtaatcaccttgcacaaagatcaagacctaatcaaggaccctcgcaatctgctcgctaatcaaaccctcgtttacagccaggacctcggcgagatgacgaaactgaatagcaaaagagtctccttcaaattgcctaaagaccaaatgaaggtctatgtagacgacatttacgtgatcccccagccgcatttctctacggaccagccacctctgccgaaaaagggacagtcctctattaataaagaagaagtgatcctgtctaaggctggaaacaaaagcctaaacattatcgagaacagctccgcccctatttgcgaaaacaaaccaaagattttgaacagcgaggaatggttcgcagcagcatgcaagaaggagctgaaggaaaatatccagactaccaactataacacagccctcgactttcacagtaacagcgatgtcactaagcaggtcatccagactcacgtgaatgccggtgaggcgccagacccagtgatcacgtcaaatgtgccctgcttccattccattaaaccaaacttgaataatcttaacggaaaaacaggggagttcttggcttttcaaaccgtccacttgccgcctcttcccgagcagctcttggagctgggaaacaaggcacataacgatatgcatatcgtgcaggccacagaaatccataatatcaatatcatcagctccaacgctaaagactcccgggatgaggaaaataagaaatcacacaacggtgctgagacaaccagtcttcccccaaaaaccgtcttcaaggacaaggtcaggcgctgcagtttaggaatctttctgccaaggctgcccaataagcggaattgtagcgtcactggcattgacgaccttgagcagatccctgcagataccaccgacataaaccatctggagactcagcctgtgagttccaaagactccggaataggaagcgtggctggcaagctgaatcttagcccctcgcaatatattaatgaggagaacctcccggtctacccagacgagattaattcttccgattcgattaatatagagaccgaggaaaaggccctaatcgagacctaccagaaggagattagcccctacgagaacaaaatgggaaaaacatgcaattctcagaagagaacatgggtccaagaggaggaggatattcacaaagagaaaaaaatacgcaagaatgagattaaattctccgataccacacaggaccgtgaaatctttgaccaccatactgaggaagatatcgataaaagtgccaacagcgtcctaataaagaatttgagtcggacgccatcaagctgttccagctccctggactcaatcaaggctgatggcacgagcttggactttagcacatatcggtcgtcccaaatggagtcccagttcttgagagataccatctgtgaggaaagtctgcgtgagaaactccaggacggaaggatcacaatccgcgagttcttcattctcttgcaggtgcatatcttgatccaaaagcctaggcagtcgaacctgcccggtaattttaccgtgaatacgccccctacacctgaggacctcatgctcagccaatatgtttacagacctaagatacagatttatagagaagactgtgaagccagacgtcagaaaatcgaggagctgaagctctctgccagcaaccaggataagctgctggtcgatatcaataagaacctttgggagaagatgaggcactgctctgacaaggaactcaaggcctttggaatctacctcaataaaattaagagctgctttacgaagatgactaaagtatttacccatcagggaaaggtggcactgtatggaaagctagtgcagtctgctcagaacgagcgcgagaaacttcaaattaagattgatgagatggataaaattttgaagaagatcgacaattgtctcacggagatggagaccgagactaagaacctagaagacgaagaaaaaaacaaccccgttgaagaatgggactccgagatgcgggctgcggaaaaggaattggaacaactgaagacggaggaagaagagttacaaaggaacctactggagctcgaggtgcaaaaagaacaaactctggcccagattgactttatgcaaaagcagaggaatcgcaccgaagaactcttggatcaactgagcctgagcgagtgggatgtggttgaatggagcgatgaccaggccgtttttaccttcgtgtatgataccatccagctgacaatcacatttgaggaaagtgtggtcgggtttccttttctggacaaaagatatagaaagatcgttgacgtgaattttcagtcgctgttggatgaagatcaagccccacccagttcgctcctcgtacataagctgatttttcagtacgtggaggaaaaggagagctggaaaaagacttgcaccacccagcaccaattacctaagatgctagaagagttttctctggtggtccatcactgcaggttgctgggcgaagagatagagtacctcaaacgctggggcccaaactataatcttatgaatattgacatcaacaataatgaattaagactcctgttctcttcttcggccgcatttgctaagttcgagattacgctgttcctttcagcatactacccttctgttccgctaccttccacaattcagaaccatgtgggcaacacctcacaagatgacatcgcaaccatcttgtctaaggtgccccttgagaacaactatctgaagaatgtcgtgaagcagatttaccaggaccttttccaagattgccatttctaccacta

SEQ ID NO: 29636 - DNA, 714 bp, synthetic construct
  source 1..714: mol_type = other DNA; note = Synthetic coding sequence
atgggatgctgtgggtgttccgggggttgcggctctgggtgtggcggaagaggctctggttgcgggggatgcgggagtgggtgtggaggctgcggtagtgggtgcgggggttgtggtagcggctgcgggggttgtgggggatgtgggtctggctgcgccggttgtggcggttgcgggagcggctgctgcgtccccgtatgctgttgtaaacctatgtgttgttgtgtgcccgcttgttcatgttcatcgtgtggtaaagggggatgtggttcatgcgggggaagcaagaggggctgcgtgtcatgtggggtgagcaagggcgcttgcggctcctgtggcggatctaagggtgggtgtggctcgtgcgggggatcaaaaggcggatgtggctcctgtggaggctctaagggaggatgcgggagctgcggaggtagcaaaggtgggtgcggaagttacggatgctcgcaatcctcctgctgtaagccttgctgctgcagctccggatgcgggagtagctgttgccagtctagttgctgcaagccgtattgttgccagtcatcttgttgtaagccttactgttgtcaatcaagctgttgcaaaccatgttcctgcttttctggctgtggaagttcgtgttgccaatcttcgtgctataaaccctgttgttgtcagtcctcctgttgcgtacccgtgtgttgccagtgtaagatttag

SEQ ID NO: 29637 - DNA, 717 bp, synthetic construct
  source 1..717: mol_type = other DNA; note = Synthetic coding sequence
atgggctgttcagggtgttcaggcggttgtggcagctcgtgcgggggatgtgggtcaagctgtggtgggtgcgggtcaggatacgggggttgcggtagcgggtgctgcgtgcccgtttgttgctgtaagccagtctgctgttgtgtccccgcttgttcttgctcctcatgtggcagttgcggcggaagcaagggagtgtgcgggtcatgtgggggatgtaagggcggttgtgggtcatgcgggggatcaaagggaggatgcggatcttcttgttgcgtgcccgtttgctgttcctcaagttgcggatcctgcggaggctcgaagggagtttgtgggttcaggggaggctccaagggcggatgtgggagctgcggatgctcccaatgttcttgttataagccctgctgctgttcatccgggtgtggatcgtcttgctgtcaatcctcctgttgtaaacctagctgttcacagtcatcgtgttgcaagccatgctgttcccagagttcttgttgtaagccatgctgctgctcctcaggctgtggcagtagctgctgccagtccagttgttgtaagccgtgttgttctcagtcctcatgctgtaaaccgtgctgttgtagttccggctgcggatcctcgtgttgccagtctagttgttgcaaaccttgcagtagccaatcctcttgctgtgtccctatctgctgtcagtgcaagatatag

SEQ ID NO: 29638 - DNA, 1473 bp, synthetic construct
  source 1..1473: mol_type = other DNA; note = Synthetic coding sequence
atgaacggcgcactggaccattctgatcaaccggatccagatgccattaaaatgtttgtaggacaaattcctcggtcatggagcgagaaagagctcaaagagttgtttgaaccctacggcgcagtctatcagataaatgtgctgcgagatcggagtcaaaacccaccacaatctaagggatgttgcttcgtgaccttctataccagaaaggccgctcttgaggcccagaatgcactacacaatattaagacactgcccggaatgcatcaccccatccaaatgaaacccgctgactcagaaaagagcaacgccgttgaagacaggaagttatttatcggcatggtgtccaagaaatgtaatgaaaatgatattcgtgtgatgttttctcctttcggccagatagaagaatgccgcatcctgcggggacccgatggcctcagtcgcggatgcgcattcgtgacattctccacgcgcgcaatggcacagaatgctatcaaggccatgcaccagagccagacaatggaaggttgttcgtcccccatagtggtgaaattcgccgatacacagaaagacaaggaacagcgccgtttacagcaacaactcgctcaacagatgcagcagcttaacactgctacctggggtaatctgacagggctggggggattgaccccccagtatcttgccctcttgcagcaagcaacctcctcctcaaatctgggtgctttctcaggcattcaacagatggccggaatgaacgccttgcaactacagaacttagccactctggccgcagcagctgctgccgctcaaactagcgctacgtcaacaaacgcaaaccctttgtcaacaacttccagtgcattgggcgcattaacgagtcctgtcgctgctagtacccccaacagcaccgcgggtgcagcgatgaactccctgaccagtctgggcacgcttcagggtctagcaggcgctaccgtgggactgaataatatcaatgccttagctgtagcccaaatgctttccggaatggccgcacttaatgggggactcggagctacgggactaactaacggcacggccggaacaatggacgccttgacacaggcgtactccggcatccagcagtatgccgctgccgctcttcccaccctgtatagtcagagcctgttgcagcagcagagcgccgcaggctcccaaaaggagggcccagaaggcgcaaatctgttcatttaccacctgccgcaggagtttggcgaccaggacatccttcagatgttcatgccttttggtaatgtgatctctgctaaagtcttcattgataagcaaacgaacctcagtaaatgcttcgggttcgtcagctacgacaatccggtgtcggctcaggcggctatccaggcaatgaatggctttcagatcggaatgaaacgtctcaaggtgcaactgaaaagatcaaaaaatgattccaagccttattag

SEQ ID NO: 29639 - DNA, 5825 bp, synthetic construct
  source 1..5825: mol_type = other DNA; note = Synthetic coding sequence
ctgttgacatctgtgctcatgcctagtttcggttactttattcggtcccccgagaagcgggaacccatagcccttattcggaaaagtgatgtgtctaggggaaatcttgagaaggagatggcgcatcttaatcacgatctgtattcaggagacctcaatgagcagagccaggcccagctttcggagggaagcatcaccctgcaggtcgaggcagttgaaagcacatcacaggtggacgagaacgacgtcaccttgacagccgataaaggtaaaacagaggatacgttcttcatgtccaacaagccccagaggtataaggacaaactgccagattctggtgacagtatgttgcggatatccacaatagcaagcgcgatagctgaggccagcgtaaacacggatcccagccagctggcagccatgattaaagcgctttcaaacaagactagggataagacattccaggaagacgaaaagcagaaggactacagccatgtgagacattttcttcccaatgatctggaaaagagcaacggctctaatgctctcgacatggaaaaatatttgaaaaagacagaggtgagccgctatgaatccgcactggagaatttctcccgagcctctatgagtgacacctgggatctcagtttgcccaaagagcagactactcaggatattcacccagtggacctctccgctaccagtgtgagcgtgcgcgcaccggaagagaatactgccgctattgtttatgtggagaacggtgaatctgagaaccaggagagcttccggaccattaatagttctaattctgtgaccaaccgcgagaacaactctgccgtggttgatgtgaagacatgctcaatcgacaataagcttcaggatgtgggaaacgatgagaaggccacctccatttccactcccagtgatagctactcatccgtccgtaatccaagaatcacttccctctgtttgctgaaagattgtgaggaaattagagataaccgcgaaaaccagcggcagaatgaatgtgtgagcgaaatctccaacagcgaaaaacacgtgacattcgagaaccataggattgtctctcccaagaattctgatttgaagaatacaagtcccgagcacggtgggagaggcagcgaggacgagcaagagagcttcaggccaagtactagccccctaagccactcctctccctccgaaatttctgggacctccagctccggatgcgccctggagtcttttgggtcagcagcccagcagcagcagccaccttgcgagcaggagctttctccactggtatgttccccagccggtgtatctaggctgacatacgtttcagaacccgagtcttcctatccaacaactgcgaccgatgacgccttggaagatcgcaagagtgacattacgagcgaactctctaccacgattatacagggatcgccagctgccctagaagagagggccatggagaaattgcgggaaaaagtcccattccagaatcgtggtaaaggtaccctgtcatctattatccagaataacagcgacactcggaaagcaaccgagacaacatccctgagctccaagccagaatatgtcaagccagactttaggtggtctaaagatccctcgagtaaatctggaaacctattggaaacctccgaagtgggctggacctctaatcctgaagagcttgacccaatccgactcgctctgcttggcaaaagtgggctgagctgtcaggtgggctctgcgacatctcaccccgtttcttgccaggaacctattgatgaggatcagcggatctcccctaaagacaaatccaccgctggaagagaatttagtggtcaggtaagtcaccagacaacctccgagaaccagtgcacgcctatccctagcagcactgtccactcctcagtagcagacatgcaaaatatgccagctgcggtgcatgcccttcttacacaacctagcctgtcagccgcaccgttcgctcagcggtacctcggcacactcccctccactggcagcacaaccctaccccagtgccacgctggaaacgccactgtttgcggttttagcgggggactgccgtacccggctgtcgccggtgagcccgtacagaatagtgtcgcggtgggcatctgtcttgggagcaatataggaagcggttggatgggaacgagctccctctgtaacccttacagcaacactctgaatcagaaccttttatcaaccaccaaacctttccctgttccatccgtgggcacgaattgtgggatcgaaccatgggactcgggggtgacttcaggcctcggttcagtccgtgtgcccgaagagctgaagctaccccacgcttgctgcgtcggaatcgcaagtcagactctcctgagtgtactgaaccccactgaccgctggctacaggtttccataggcgttctatccatctcagtgaacggcgagaaggtagacttgtcgacatatcgatgccttgtgttcaaaaataaggcaataatccggccacacgcgacagaagagatcaaggtgctgttcattccctccagtccaggtgtctttcggtgcactttctctgttgcgagctggccctgctcgaccgatgccgaaacgattgtacaggcggaagctttggcctcaactgttactctcaccgctatcgccgagtccccagttatcgaggtggagacggaaaaaaaagacgtgctagatttcggcgatctcacctacgggggatggaaggctctgcctctgaagctcattaaccgaacgcatgccacagtgccgatccgacttatcattaacgcgaatgccgtggcctggagatgtttcaccttcagcaaggagtcagtgagagcccctgtcgaggtagccccatgcgcagatgtcgtcacgcgcctggcaggaccctcagtggtaaaccacatgatgccagcatcatatgacggtcaggatcccgaattcctcatgatttgggttctcttccacagtcccaaaaaacagatttcgagctcggacatcctggactctgccgaggaattttccgcgaaagtggatattgaggttgattcccccaaccccacgccagtgctcagaagcgtgtcccttcgagctagggctggcatcgcccgtatccatgctccaagagacttacagaccatgcattttctggctaaagtcgcttcatcgcgaaaacagcaccttcccctaaagaacgccggaaacattgaagtgtatcttgacatcaaggtgcctgagcagggttcacacttttctgtagaccctaagaaccttctccttaagccaggcgaggagcatgaggtgattgtctctttcacacccaaggatcccgaggcctgcgaggagaggatcctgaagatcttcgtgcagccatttggcccacagtatgaggtggtgcttaaaggggaggtcattagcagtgggtcaaaaccattaagccccggtccttgtctggacatcccgtccatcctttccaataagcaattcttagcctggggaggggtgccactcggcaggactcagctgcagaagctagctctgcgcaataactctgcctctaccacacagcacctccgactgctaataagagggcaggaccaagactgcttccaactgcaaaacacattcggatccgagcagaggttaaccagcaattgcgaaattcgaatccacccgaaggaggatattttcatctcagtgttattcgccccaacccgactgagctgcatgctggctcggctagagattaagcaactggggaatcgctctcaacctgggataaaattcactatacccttgtccggatatggtggcacctccaacctgatcctagaaggagtcaagaagctttctgattcttatatggtgacagttaatgggctggttcccggaaaagaatcgaagatagtgttctcagtcaggaatacaggcagtagggctgcgttcgtgaaagctgtggggttcaaggacagccagaaaaaagtgctgcttgatccgaaagtcctaagaatttttccagacaaatttgtgctcaaggagcgcacgcaagagaacgttactttaatatacaatccatctgatagaggtataaacaataagactgccactgagctgtctaccgtttatctttttggtggagacgaaatctcgcggcagcagtacagaagagcgctccttcataagcccgagatgataaagcagatcctgcccgaacacagtgtgctccagaatattaactttgtggaagcttttcaggacgagctacttgttactgaagtgtatgacctgccccagagaccgaatgacgtgcagctgttttatgggtccatgtgcaaaattatactgagcgtaattggtgagttccgcgactgcatctcttcccgcgaattcctccagccatctagcaaagcaagcttggagagtacaagcgacctgggagcatccgggaagcacggcggtaacgtttccttggatgtcctgcccgtcaagggcccacaggggagtcccctgctgtctagagcggcaagaccaccactcgaccagcttgcttccgaagaaccctggaccgtgctgcccgaacaccttattctggtcgcccctagcccctgtgacatggcgaaaaccggtaggttccagatcgtaaacaactctgtgcgacttttgcgctttgagctgtgctggcctgcccactgtctgaccgtaactccgcagcatgggtgcgtcgcacccgaatcaaaactgcagatcttggtttctccaaactcctcattaagtactaaacaaagcatgttcccctggagtgggttgatctacatccattgcgatgacggccagaagaagatcgtgaaggtacaaattcgcgaggatctcacacaagtggaactccttactaggctcacctccaagcccttcgggatacttagtcctgtgtcagaaccgagtgtgagccatctggtcaagcccatgacaaagccaccttctactaaagtggagatcagaaacaaaagtatcacatttcctactacggagcccggagaaacctccgagtcatgccttgagctagagaatcatggcactaccgacgtgaaatggcacctgtcgtcattggcaccaccatatgtaaaaggcgtggatgagtcgggagatgtattcagagcgacatacgctgcttttcgctgttccccaatctctggactgcttgagtcacacggcatccagaaggtgagtattacatttctgccgagggggagaggtgactatgcacaattttgggatgtggaatgtcacccccttaaagaaccacatatgaaacataccctgcgatttcaactttctggacagagtatagaggccgaaaacgaacccgaaaacgcatgtctatctaccgatagcctgattaaaatcgaccacttggtgaaacccagaagacaggccgtcagcgaggcctctgcacggattcctgagcaattggatgtgactgccagaggagtgtacgctcccgaagacgtatatcggttccggccaacctccgtcggggagtcaagaaccctcaaagtgaacctccgcaacaacagcttcatcacccatagtttaaagttcctgtcaccaagagagcctttctatgtgaagcactctaaatactctctcagagctcagcattatatcaatatgccagtacagttcaagccaaaatctgccggaaaattcgaggcgctgctagtgattcaaaccgatgaagggaagagtattgcaattcggttgattggcgaggctctcggcaagaacta

SEQ ID NO: 29640 - DNA, 111 bp, synthetic construct
  source 1..111: mol_type = other DNA; note = Synthetic coding sequence
atgtgttattacggcaattattacggcggatatgggtatggagggttaggttgtggctatgggagctgctgtggttgcggtttccggagactgggttgtgggtacggatag

SEQ ID NO: 29641 - DNA, 528 bp, synthetic construct
  source 1..528: mol_type = other DNA; note = Synthetic coding sequence
atgagctataattgttgcagcggtaacttttcatctcgatcttgtggagactatctacggtaccctgcctcatccaggggtttttcatacccttcaaatcttgtctactcaaccgatctgtgcagcccaagtacgtgtcagctgggctcctctctgtatagaggttgtcaggagatttgttgggagccgacatcgtgtcagacgtcttacgtggaatccagtccttgccagacgagttgctatcggccacgaacatctctgctctgctccccatgcaaaacgacgtactcaggtagcctggggtttgggagcagctcctgcagaagcctggggtatggatctcgttcatgctattccgttggctgtgggtcgagcggggtgcggagccttggatacggatcctgtggcttccccagcttggggtacgggtctggcttctgccgacccacctaccttgcctcgcggagctgccaatccccctgctatcggccagcctacggtagtactttttgcaggtctacttgctag

SEQ ID NO: 29642 - DNA, 324 bp, synthetic construct
  source 1..324: mol_type = other DNA; note = Synthetic coding sequence
atggggaaaaaacgtactaaaggcaagactgtccccattgacgacagttccgagactcttgaaccagtttgtcgccacataagaaaaggcctggagcaaggcaatctgaaaaaggcgttggtcaatgttgagtggaatatctgccaggattgcaaaacagacaataaggttaaagacaaagccgaagaagaaacggaagagaagcccagtgtatggctgtgcctgaaatgcggtcatcagggatgcggacgcaattcgcaagaacagcacgcgctgaagcactacctgaccccaagatctgagccccactgcctggtgctctag

SEQ ID NO: 29643 - DNA, 2469 bp, synthetic construct
  source 1..2469: mol_type = other DNA; note = Synthetic coding sequence
atgggtaagaaaaggacaaaaggcaagacagttcccattgatgacagcagtgaaactctagagcctgtgtgcaggcacatcagaaagggtcttgaacagggcaatctcaagaaggccttagtcaacgtggagtggaatatctgccaagattgtaagactgacaataaggtcaaggacaaagccgaagaagaaaccgaggaaaaaccttcagtttggctctgcttgaaatgtggccaccaaggttgtggccgtaacagccaggagcagcatgccctgaaacattatttaacacctagaagtgaaccacattgtttagtactcagcttggataattggtccgtctggtgctatgtgtgtgacaatgaggtacagtattgcagttctaatcaactcggccaggtcgttgattacgtccgaaaacaggccagcataactactcctaaacccgaaaaggataacggtaacatcgaattggaaaataaaaaactcgagaaggaaagtaagaacgaacaagagagggagaagaaggaaaacatggcaaaggaaaacccccctatgaactcaccttgccagatcactgtaaaggggctgtccaacctgggaaacacctgcttttttaatgccgtcatgcagaacttatctcagacccccgttctgcgggagctactaaaggaagtgaagatgtcaggcactattgtaaagatcgaaccacctgatctcgcactgacagagcccctcgaaattaacctggaacctccgggtcctctgaccctggcgatgtctcaattcttgaatgaaatgcaagagaccaagaagggagtagtgactcctaaagagttgttttctcaggtttgtaaaaaagctgtccgctttaaaggctaccagcagcaggacagccaggaactgcttcgttacctcctagacggaatgagggcagaagaacaccagcgcgtgtccaaagggatccttaaggccttcggcaacagcacggagaagctcgacgaggagctgaaaaataaagttaaggactacgagaagaagaagagtatgcctagttttgttgatcgaattttcgggggtgaattaacatccatgatcatgtgcgaccaatgccggaccgttagcctagttcatgaaagctttctggacctgtcgctccccgttttagacgatcaaagcgggaagaagagtgttaatgataaaaacctgaagaaaacagtagaggacgaagaccaggattccgaagaagagaaggataacgactcatacattaaggagcgaagcgatataccctctggaacatcgaaacacctacagaaaaaggcaaagaagcaagcgaaaaaacaagcaaaaaatcagcggcgtcagcaaaagatccagggaaaagttctccatcttaacgatatctgtactattgaccatcccgaagacagcgaatatgaggcagagatgtccctccagggcgaggttaatattaagtcaaaccatatctcccaggagggcgtgatgcacaaagaatattgtgtgaaccaaaaggacctaaatggtcaagccaagatgattgagagcgtaactgacaaccagaaaagtactgaggaggtagacatgaagaacatcaacatggataacgacttagaagtactcacctcaagtccgacaaggaatcttaacggtgcttacctaacagagggcagtaacggcgaggtagatatctctaacggttttaagaatctgaatctcaacgcagcccttcacccggatgagatcaacatcgaaattctgaacgacagccacactccaggtaccaaggtgtatgaagtcgttaacgaggaccccgaaacagccttctgtaccctggccaacagggaagtgttcaatacagacgagtgttcaatccagcactgtctttaccagtttactcggaatgagaagctacgggatgccaataagctcctctgcgaggtatgcactcgcagacagtgtaatgggccaaaggctaatattaaaggagagaggaaacacgtgtacactaatgcaaaaaaacagatgctgatttccctggcacctccagtgctgaccctccatctgaagcgctttcagcaggctggcttcaatctccgcaaggtgaacaagcacatcaaatttcctgaaatactcgatctagctccgttctgcacattgaaatgtaagaacgtcgctgaggaaaatacgagggtactttatagtctgtatggagtggtggagcacagcgggacgatgcgctccgggcattataccgcatatgccaaggccaggactgcaaattctcacctgagtaacctggtgcttcacggtgatatacctcaagatttcgagatggaatctaagggtcagtggttccacatttcagatacgcatgtccaagcagtacctactaccaaggtgttaaattctcaagcctacctgctcttctacgagcggatcctgtag

SEQ ID NO: 29644 - DNA, 2472 bp, synthetic construct
  source 1..2472: mol_type = other DNA; note = Synthetic coding sequence
atgggcaaaaaacgcacaaagggcaagacggtccctatagacgactccagcgaaacattggaacccgtgtgcaggcacatccgaaagggtctggaacagggcaatctcaagaaggcactggtcaatgtcgagtggaatatctgtcaagactgtaaaacagacaataaggtgaaagacaaagccgaagaagagacagaagaaaaaccatcggtgtggctgtgccttaaatgtggccatcaaggctgcggaagaaacagtcaagagcagcatgctctgaaacattaccttacccccagaagtgagccacactgcctggtactctctctcgataattggtcagtttggtgctatgtttgtgataacgaggtccaatactgcagtagtaaccagttggggcaagtggtcgattatgtccgtaagcaagctagcatcaccacacctaaacctgctgagaaagacaacggcaatatcgagctcgagaacaagaaacttgagaaggagagcaaaaacgagcaggaaagagagaaaaaggagaacatggcaaaagagaatcctcccatgaacagtccttgtcaaatcacggttaagggcctctcaaatcttggtaacacttgtttcttcaacgcagtcatgcagaacctctcccagactcccgtgctccgtgagctcttgaaggaagtgaaaatgtccggtactattgtaaaaattgagcccccagacttagctctcacagagcccttggagattaatctggagcctccaggccctcttacgctggcaatgtcacaattcttgaatgagatgcaggagaccaagaagggggtcgttacgcctaaagaactcttttcacaggtctgcaaaaaggccgtccgatttaagggttaccaacagcaagacagccaggaacttctcagatatctgttggatggcatgcgtgccgaggagcatcagcgcgtctctaaaggaatcctcaaggctttcggaaattccacggagaagctggacgaagagctgaaaaataaagtgaaggactatgaaaagaagaagagcatgccttcatttgtcgatagaattttcgggggtgaactcacctctatgatcatgtgtgaccagtgtaggactgttagcctcgttcatgaaagctttctggatctgagcctgccagtcctcgacgatcagtctggtaagaagagtgtcaacgacaaaaacctgaagaagaccgtcgaggatgaagaccaggattccgaagaagagaaggacaatgactcttacataaaagagagaagcgatattccatccggtacctcaaaacacctgcagaaaaaggccaagaaacaggcaaagaagcaggccaagaatcagcgtcgccagcaaaaaatacagggaaaagtgcttcacctgaatgacatctgcactattgaccatccagaagactctgaatatgaagccgaaatgagtctgcagggagaggtcaacatcaagtccaatcacatctcacaggaaggcgtgatgcataaagaatactgcgtgaaccaaaaggacttgaacggccaggctaagatgatagagagtgtgaccgataatcagaagagtaccgaagaagttgacatgaagaacatcaatatggataatgacttggaagttctgacctccagcccaaccagaaacctgaacggcgcatatctgacagaaggatccaacggtgaagtggacatctctaatggtttcaaaaatttgaacctcaatgctgccctacaccctgacgagatcaatattgaaatactcaacgattctcacacccctggcaccaaggtgtatgaagtggtcaatgaggatccagagaccgctttttgtactctagcaaaccgggaggtattcaataccgacgaatgctcaatacaacactgcctgtatcaattcacgagaaatgagaagctgagggatgcaaacaagctgctgtgcgaggtctgcactaggaggcagtgcaatggccctaaagctaatatcaagggcgagaggaaacatgtttacaccaacgctaagaagcagatgctgatttccttagcgccacccgtcctaacattgcatctgaaaaggtttcagcaagcagggtttaacctcagaaaagtgaataagcacattaaatttccagagatccttgacctggcccctttctgcaccctgaaatgcaagaacgtggcggaagaaaatacacgggtactatatagtctttacggtgtcgtcgagcactcaggtaccatgcgtagtgggcactacacggcttatgcaaaggcccgaaccgccaatagtcatctgtccaatctggtgcttcatggcgatatacctcaggatttcgaaatggagtccaagggacagtggtttcatatttctgacactcacgtccaggccgtaccgacgacaaaggtcctgaattctcaggcgtacctgctgttttatgagaggatcctgtag

SEQ ID NO: 29645 - DNA, 1167 bp, synthetic construct
  source 1..1167: mol_type = other DNA; note = Synthetic coding sequence
atggaccctatacggtccttctgtggcaagctcagatcactggcctccacactggattgcgaaacagccaggctccagcgcgctctggacggggaggagtcagactttgaggactatcctatgaggatcctgtacgacttacactccgaggtccagacacttaaggacgacgtgaacattctgctcgacaaagctaggctggaaaatcaggaaggcatcgactttatcaaggccaccaaggtgcttatggagaaaaacagcatggacataatgaagattcgcgaatacttccagaagtacggttacagcccacgcgtgaaaaagaatagtgtgcatgagcaagaagccattaattccgatcccgagctcagcaattgcgaaaattttcagaaaactgacgtgaaagacgatttgtcggacccgcctgtggctagctcctgtattagtgagaagagccctcgatctccgcagttgagcgatttcggccttgaacgttatatcgttagccaggtgctgcctaatccgcctcaggccgtcaataattacaaagaggaaccagtgatcgtgactccacctaccaagcagtccctagtcaaagtattgaagacccctaaatgtgctttgaaaatggatgatttcgagtgcgtcactccaaagctagaacatttcgggattagtgagtacacaatgtgtcttaacgaagattacaccatgggtctcaagaacgcgagaaataataagagcgaagaagccatcgataccgagtctcgcctgaatgacaatgttttcgccactccatcccccataattcagcagcttgagaagtcggatgcggagtacacaaactctcccctggtgccaactttctgtacaccgggacttaaaattccgagtacaaagaattctattgcgctagtgagcactaattaccccctaagcaaaactaattccagttcaaacgacttggaagttgaggaccggactagccttgtactaaacagtgacacttgttttgagaacttgaccgatccatccagtccaacaattagttcctacgaaaacctgctgcgaacccctactcctcccgaggttacgaaaattcctgaggatatccttcagaaattccagtggatctacccgacacagaagctcaataaaatgagatag

SEQ ID NO: 29646 - DNA, 1353 bp, synthetic construct
  source 1..1353: mol_type = other DNA; note = Synthetic coding sequence
atgcgagagtgtatctcaatacatgtggggcaggcaggagtgcaaattggaaatgcgtgctgggaattatattgcctggagcatggcattcagccagatgggcagatgccctccgacaagaccatcggcggtggcgacgattcgttcaacaccttcttttctgaaacgggcgctggcaagcatgtaccccgtgcagtgttcgtggatctggaaccgacagtggtcgatgaggtaaggacaggcacctatcggcagctgttccacccagaacaactgatcactgggaaggaggacgcggctaacaactatgcaaggggtcactacacaattggcaaggagatcgtggatctggtgctggataggatcaggaagctggcagacttgtgtactggcctgcagggattcctgatattccattcatttgggggaggcacaggctctggcttcgcatccttattgatggaacgccttagcgtcgactatggtaaaaaatccaaactggaattcgctatctaccccgctccccaggtttcaactgccgtagtggagccgtacaacagcatccttaccacacacacaaccctcgaacattcagactgcgccttcatggtggacaatgaggctatctatgacatctgccgtcgaaacttggacatagaaagacccacctatactaatttaaatcgattgatcggccagattgtctcttccatcaccgcttcgctgaggtttgacggcgctctcaacgtggatctcacggagtttcagactaacctcgtgccgtacccaaggatccattttcctctggctacctatgctccagtcatttccgctgaaaaggcttaccatgaacagctctccgtggcggaaatcacaaacgcatgttttgagccagccaatcaaatggtcaaatgtgatcctcggcatggtaaatatatggcatgctgtatgctgtataggggtgatgtagttcctaaagatgttaacgcagccattgccacaatcaagacaaagcgaacaattcagtttgtagactggtgccccactggtttcaaagtgggaattaattatcaaccaccgacagttgtgcccggaggggatctagccaaagttcagcgagcagtatgtatgttgagcaacactactgctatagctgaggcttgggccaggctggaccacaagttcgatcttatgtacgccaaaagagcctttgtgcactggtacgtgggggaggggatggaagagggcgagttctcagaggcacgtgaggatctcgccgcacttgagaaggattacgaagaggtgggcgtcgacagcgttgaagcggaggccgaggagggcgaggagtattag

SEQ ID NO: 29647 - DNA, 3378 bp, synthetic construct
  source 1..3378: mol_type = other DNA; note = Synthetic coding sequence
atgacagtggagcagaacgtcttacagcagagcgccgctcagaaacaccagcaaactttcttgaatcagctgagagagataaccggaattaacgacactcagatactgcagcaggcgctgaaagattcaaacggaaacctggagttggccgtggccttcctgacagccaagaacgcaaaaacaccacaacaggaggagacaacctattaccagactgctctgcctggcaacgatcgctatatctccgtagggagtcaggccgacacaaatgtgatagatctgaccggggacgacaaggatgacctgcagagggccatagctcttagtcttgccgaatctaaccgcgctttcagagaaacgggtatcactgatgaagagcaggctatcagccgagtcctggaggcctctatcgcagagaacaaagcatgcctgaaacgcacgccgaccgaggtgtggcgcgactctcgaaatccatacgatagaaaacgccaggataaagctcctgtggggctcaagaatgttggcaatacgtgctggttctctgccgtgatacagagcttgttcaatttactagaattccgccgactagtacttaactataagcccccttcaaacgcccaggatttacccagaaaccaaaaggagcaccggaatttaccctttatgagggaattgagataccttttcgctctcctcgtcggcaccaagcgcaagtacgtggacccaagcagagctgtcgagatcttgaaggacgcctttaagtccaatgattctcagcagcaggatgttagcgagtttacacacaagctgctcgattggttggaagacgctttccaaatgaaggctgaagaagagaccgatgaagagaagcccaaaaatccgatggttgaacttttctatgggaggttcctggctgtcggtgtcctcgaaggcaaaaaattcgaaaacacagagatgtttggccagtatcctctgcaggtcaatggtttcaaagatctgcacgaatgcctggaagctgctatgatcgaaggtgagatcgaatctctgcatagcgagaactccggaaagtcaggccaggagcactggttcacagaactgcctccagtattgacctttgaactctctcggtttgaatttaatcaagccctgggtagacccgaaaagattcataataaactggagttcccccaggttctgtatctcgatagatacatgcacaggaacagagaaattaccaggattaaacgagaggaaattaagcgcctcaaagactatttaaccgttctgcagcaaagactcgagcggtatctcagctacggtagcggcccaaagaggttccccttggtcgacgtactgcagtacgcccttgagttcgccagtagcaagcctgtctgcacctctcccgtggacgacattgacgcctcttctcctcctagcggatcgatcccgagccagacccttccctccactacagagcagcagggcgcactcagtagtgagctcccctctaccagcccttcctcagtggccgctattagttcccgaagtgtcattcacaagcctttcacacagtcgagaatcccaccagacttgccgatgcatccggctccccgacacatcacggaggaggaactgtccgtattagaaagctgccttcacaggtggagaacggagattgaaaatgacacgagagatctccaggagagtatttcaagaatacaccgaacaatcgagctgatgtacagcgataaaagcatgattcaagtcccgtaccgcctgcacgccgtactcgtgcacgaaggacaagctaacgccggtcactactgggcctatatcttcgaccatagggaatctcgctggatgaagtacaacgacatagctgtcaccaagtcttcttgggaagaactcgtacgggactcgttcggtggctaccgcaacgccagtgcatattgcctgatgtacatcaacgacaaagcacagttcctgattcaggaggagttcaacaaagagactggtcagcccctggtggggatagaaactctgccccctgatctaagagatttcgtggaagaggataatcaaagatttgaaaaggaacttgaggaatgggacgcgcaactcgcccaaaaggctctgcaagagaagctgttggccagtcagaaactccgcgagagcgagaccagcgtcaccaccgcccaagcagccggtgatcccgaatacctagagcaaccctctagatccgacttttcgaagcacttaaaagaagagacaatacagataattactaaggcgtcacacgagcacgaggataagtcccccgagacggttctccaatctaaaccagagaacactacatctcaaccactctctaaccaaagagtagtcgaagtggctataccacatgtgggcaagtttatgattgagtccaaggagggcggttatgacgacgaaattatgatgacccccaatatgcagggcattatcatggctatcggcaaatcccgttccgtgtacgataggtgcggaccagaagctggattcttcaaggctataaagcttgaatacgccagactggtaaagcttgcacaggaagacacccccccagagacggattacagattgcatcacgtggtggtgtactttatccagaatcaggccccaaagaagatcatagagaagaccctgctggagcagtttggcgaccggaatctttcctttgatgagcggtgtcacaatatcatgaaagtcgctcaggcaaagcttgaaatgatcaaacctgaggaagtaaacctggaggagtatgaagagtggcaccaggactacaggaaattccgggagacgaccatgtacctgattatcgggttggagaactttcagagggaaagttacattgacagcttactgttcctgatctgtgcgtaccaaaataataaagagctgctcagtaaaggcttgtatcgcggacatgatgaggaactgatctctcactacaggcgggagtgtctcctcaagctgaacgagcaagctgcggagctttttgaaagcggagaagacagggaagtgaataacggtctgattatcatgaacgaattcatcgtcccattcctgccacttcttctcgtagatgagatggaggagaaggacatcttagctgtggaggatatgcggaacagatggtgctcataccttggtcaggaaatggagccccacctgcaggaaaagctgacagactttctgccaaaacttcttgattgcagtatggaaattaaatcctttcacgaacccccaaagttaccctcctatagcacccatgaactttgcgaaagattcgccagaataatgctgtcactgagccgtacgcctgcggatggcaggtag

SEQ ID NO: 29648 - DNA, 1608 bp, synthetic construct
  source 1..1608: mol_type = other DNA; note = Synthetic coding sequence
atggatctgagacaggcatgcaggacgccttctagagacgaagctggcgttgaactcctgatgacttactttatccagctcggctttgtggagtctaggttcttccccccaaccagacagatgggcttgcttttcacatggtacgacagtctcactggcgttcccgtctctcagcaaaacctattactcgagaaggcatccgtcctgttcaacaccggcgctctgtacacacagataggcacaaggtgtgacaggcaaacgcaggcagggctcgagagcgcaatcgacgccttccagcgggcagccggtgtgctgaattatctgaaggatacctttacccataccccgtcctacgacatgtcccccgctatgctgtctgtgcttgtgaaaatgatgctcgctcaggctcaagaatcagtcttcgaaaaaatctccctccccggaatccgcaacgagttctttatgttggttaaggttgcccaggaggccgctaaagtcggggaagtctaccagcagctgcacgctgctatgagccaggcacctgtgaaagagaacataccttacagttgggcgagcctggcttgcgtaaaagcccaccactatgccgctctcgctcactatttcaccgctattctcctaatagatcaccaggtcaaacctggcaccgatctggaccaccaggaaaagtgcctctctcaactttatgaccacatgccagaagggctcacgcctctcgcgaccctgaagaatgatcagcagcggagacagctagggaagtctcacctgagacgcgcaatggcgcaccacgaggaatcggtgagggaggcctctctgtgcaagaagctgagatcaattgaagttcttcagaaagtgttgtgtgccgcacaggaacgttctcgtctcacttatgcccagcatcaggaggaagacgacctactgaatcttattgacgctccgtcagtagtggctaagactgaacaggaggtagatatcatcctaccacagttcagtaagctgaccgtcacagacttcttccagaagctggggcctttatccgtctttagcgctaataaacggtggacaccaccacgatcgattcgctttaccgccgaagaaggggacttggggtttacactgcgtggaaacgcccctgtacaggttcacttcctcgatccatattgctccgctagcgttgcaggggcacgggaaggggattatatcgtgtccattcaactggtggactgtaaatggctaaccctctcagaggtcatgaagctcctgaaatcgttcggcgaggacgagattgaaatgaaagtcgtcagtctgctggactcgactagttccatgcacaataaatccgcgacttatagcgtgggaatgcagaagacgtacagtatgatctgtcttgccatcgacgacgatgacaagaccgataagacgaaaaaaattagtaaaaaattatcattcctgtcgtggggcacaaacaagaatcggcagaagtctgcttctacattatgcctcccgtcggttggagctgcgcgacctcaagttaagaagaaactccccagccccttcagcctcctgaatagcgattccagttggtactag

SEQ ID NO: 29649 - DNA, 2952 bp, synthetic construct
  source 1..2952: mol_type = other DNA; note = Synthetic coding sequence
atggcaccacgactacagctggagaaggccgcttggcggtgggccgaaaccgtacggccagaagaagtgtcacaagaacacatcgagactgcctaccgtatttggcttgaaccctgtattaggggcgtgtgtaggcgcaattgcaaaggaaatcccaattgtctggtggggattggagagcatatttggctgggagagatcgacgaaaattcctttcataatatcgacgatccgaactgcgaaaggcgaaaaaagaactcattcgtgggactgacgaacctcggcgctacctgttatgtgaacactttcctgcaggtgtggtttctgaacctggagctgcgtcaggcactttacctgtgcccctcaacatgcagcgactatatgctgggggacggaattcaggaagaaaaggactacgaacctcagacaatctgtgaacaccttcagtacctgttcgctctccttcagaacagtaaccgtcgttacatagatccatctggctttgtaaaagccttgggtctggatactggacagcagcaggatgcccaggagttcagtaagctcttcatgtccttgcttgaggacacactgtccaaacagaaaaatccggacgtgcgcaatattgttcagcaacaattttgcggtgaatacgcctatgtgaccgtttgcaaccagtgcggtagagaatcaaaactcctctccaagttttacgagctggagctcaacattcagggccacaagcagcttaccgattgtatatcggagttcttgaaggaggagaagctggagggcgataaccggtatttctgcgaaaattgccagtcaaagcagaacgcgacccgaaagatccggctgttgagcctgccatgtacactgaacctccagctcatgaggtttgttttcgatagacagactgggcacaagaagaagctgaatacatatatcgggttttctgagattttggatatggagccatatgtagaacacaaagggggtagctacgtctatgagctcagtgctgttttgattcacaggggggtatccgcttattccggccattacatcgcacacgtcaaagatcctcagtctggagagtggtataagtttaatgatgaagatatcgagaagatggagggcaaaaagctgcagcttggcattgaagaggatctcgctgaaccctcgaaatcccagacaaggaaacccaaatgcgggaagggaacccattgcagtcgcaacgcttacatgctcgtgtatcgcctccagacacaggaaaaacccaatacaactgtccaagtgcccgcattcctccaggagctcgtcgatcgggacaattcaaaatttgaggagtggtgtatcgagatggctgaaatgagaaagcaatccgtcgataagggtaaagccaaacatgaggaagtaaaagagctctaccagagactgcccgcaggagctgaaccgtatgaatttgtgagcttggaatggctccaaaagtggctcgatgagagcactcctaccaaaccaatcgataaccacgcttgcttgtgttcacatgacaaactccaccctgacaagatcagtattatgaagagaatcagcgaatacgccgcagacatcttctacagccggtacgggggtggccctcgtctgaccgtcaaagctctgtgcaaggagtgcgtcgtggaaaggtgccgtatactgaggcttaaaaaccagctgaacgaggactacaagaccgtgaataacctgcttaaggccgctgtcaaaggctctgacgggttttgggttgggaaaagctccttgcgatcctggcgacagctggcgctcgagcaactggacgagcaggatggagatgcagaacagtcaaatggaaaaatgaacggcagcacactcaacaaagatgagtccaaggaggagcgcaaagaagaagaggagctgaactttaacgaagatattctctgcccacacggcgaactttgtatctccgaaaacgaaagaaggctggtttcaaaggaggcttggagcaagttgcaacaatactttccaaaggcacccgagtttcccagctacaaagagtgctgctctcagtgtaagattctggagcgcgaaggagaagagaacgaagccctgcataagatgattgccaacgagcagaagacatccctgccgaatctttttcaggacaaaaaccgtccatgtctatccaactggcccgaggacacggacgtcctgtacatcgtgtcacagttttttgttgaagagtggcgcaagtttgtgcgcaagccaacaagatgctctccggtgtccagcgtaggtaattcagctctactatgtccacatggcggtttgatgttcacatttgcctctatgaccaaagaagatagtaagctgatcgccttgatctggccttccgaatggcaaatgattcagaagcttttcgttgtcgaccacgtcatcaaaatcacacggatcgaggtgggggacgtgaatccctccgaaacgcaatacatttccgagcccaagctctgtcctgaatgccgagagggcttgctttgccagcagcaacgagatctgagggagtatacgcaagccaccatttatgttcacaaagtcgtcgataacaagaaggtcatgaaagacagtgcccctgaactgaatgtttcaagtagcgaaacagaagaggacaaggaggaggcaaagcccgatggcgagaaggatcctgactttaatcagatcatgcatgccttcagtgtggccccttttgaccagaatctcagtattgatggaaagatcctgagcgatgactgcgccacccttgggacacttggagtgatcccagaatccgtgatcctcttaaaagcagatgagcccatcgccgactatgccgctatggatgacgtcatgcaagtctgcatgcccgaggaaggcttcaagggcaccggactactgggccactag

SEQ ID NO: 29650 - DNA, 738 bp, synthetic construct
  source 1..738: mol_type = other DNA; note = Synthetic coding sequence
atgtcggtctgttccagtgacctttcatatgggagccgtgtgtgccttcccggatcgtgcgactcctgtagtgattcctggcaggtggatgattgtcccgaatcatgctgtgaaccaccatgctgcgctcctgccccttgtctgagcctggtgtgtacccccgttagccgagtgtctagtccctgctgtcgagttacttgtgagcctagcccttgtcagtcaggctgcacaagtagttgcacacccagttgctgtcaacaaagcagctgtcagccggcatgctgcacgagctcaccatgtcaacaggcatgttgtgtgcctgtgtgctgtaagaccgtctgctgcaagcccgtgtgctgtatgcctgtttgctgcggcccatccagcagttgttgtcagcagagcagttgccagcccgcttgctgcatcagttcgccttgccagcaatcatgttgtgtccccgtgtgctgtaaaccaatctgttgtgtgcccgtgtgttctggcgctagtagcctatgttgccagcagagtagctgtcagcctgcctgctgtacaactagttgttgcagacccagcagctcggtatccctgctttgtaggcctgtctgcagaccagcaagacgtgtcccagtgccttcttgttgtgttccaacatcatcatgccagccaagttgtgggagattggcctcttgcggctcgctcctctgtcggcctacatgttccagactggcatgctag

SEQ ID NO: 29651 - DNA, 1098 bp, synthetic construct
  source 1..1098: mol_type = other DNA; note = Synthetic coding sequence
atggccgctagcaccatgagcgtatgctcaagcgacttatcttatggcagccgcgtttgtctgcctgggtcctgcgattcgtgcagcgactcgtggcaggtggacgattgcccagagtcctgctgtgagccaccgtgctgcgcgccagcaccctgcctgtcactcgtttgcaccccagtgtctagagtcagttcaccttgttgcccagtgacttgcgagccaagcccctgtcaatcaggctgtactagctcgtgcacacctagttgttgccagcaatcatcctgtcagctggcctgttgcgcctctagcccttgtcagcaggcatgttgtgtgccagtttgctgtaagactgtgtgctgtaagccagtctgctgtgtaagcgtgtgctgcggtgacagttcatgctgtcagcagtctagctgccaaagtgcctgctgtacctctagcccgtgccagcaggcatgctgcgtgcccgtctgctgtaagcctgtgtgttctggaatatcttcaagttgttgccagcagtccagttgtgtttcctgtgtttcatctccctgctgccaagcagtttgcgaaccgtcgccctgccagagtgggtgcacttccagttgcaccccatcctgctgccagcagtcctcatgccagccaacgtgctgtacaagttcaccatgccagcaagcatgttgcgtgccagtatgctgtgtgcctgtgtgttgcgtgcccacctgcagcgaagattccagctcctgttgccagcaatcctcatgtcagcctgcttgctgcacttcaagcccatgtcagcatgcatgttgcgtgccggtgtgcagtggagctagcacttcatgctgtcagcagtctagttgccagccagcttgctgcacagcatcttgttgcagaccaagcagctctgttagtctcctgtgccaccctgtctgcaaatcaacatgctgcgtcccggtgcctagctgtggcgcttcggccagctcctgccagccttcatgctgtcgtaccgcttcatgcgtgagtttgttgtgccgccctatgtgttctagacccgcatgctacagcctgtgctctggccagaagagcagctgctag

SEQ ID NO: 29652 - DNA, 816 bp, synthetic construct
  source 1..816: mol_type = other DNA; note = Synthetic coding sequence
atggcagcgtgtactatgtccgtttgctcatcagcgtgcagtgacagttggagagtcgacgactgcccagaaagctgttgtgagccaccatgtggcactgccccatgtctgactctagtgtgcacccccgttagctgcgtaagtagtccttgctgccaagccgcatgcgagcctagtccatgtcagagtggctgcacatcttcttgcactcccagctgctgccaaccagcatgttgcgcttccagcccctgtcagcaagcttgctgcgtgcctgtgtgttgtaagcccgtttgttgcctccccacgtgctcaaaggatagtagctcctgctgtcagcagtcaagttgtcaacccacctgctgtgcatcatctagttgccagcagtcttgctgcgttccggtatgctgtaaaccagtctgttgcgtgccaacctgctctgaagatagttcctcttgctgtcagcactctagctgccaaccgacttgttgcacaagcagcccttgtcagcagagttgctatgtcccggtgtgctgcaagcctgtctgttttaaaccaatctgctgcgtgcccgtgtgttctggagcaagtacatcctgctgtcagcagagtagttgccagcctgcttgctgtacaacatcctgttgcaggccctcgtcctcggtgagtttgctttgtaggcccatctgccgtccagcctgctgcgtgccaatctctagctgctgcgcacctgcttctagctaccaggccagttgctgccgccctgcttcatgcgtatcactgctgtgtcgacctgcttgctcaaggctggcttgttag

SEQ ID NO: 29653 - DNA, 1206 bp, synthetic construct
  source 1..1206: mol_type = other DNA; note = Synthetic coding sequence
atgagtgtctgttcttccgacttgtcttactctagccgcgtgtgcctacccggttcttgcgacagctgctcggacagttggcaggtggatgattgcccggaatcttgttgtgaacccccttgttgtgctccctcctgctgtgcccctgcaccttgtctgagcctggtctgcacccccgtcagccgtgtttccagcccatgctgtcccgtaacatgtgagccatctccatgccagagtggctgcacttcatcatgcactccatcctgttgccagcaatcttcctgtcagttagcgtgttgcgcgagctcaccgtgtcagcaggcctgttgtgttcctgtgtgctgtaagactgtgtgctgcaagccggtttgctgtgtgcctgtatgttgtggggatagtagctgttgccagcagtcatcctgccaatccgcatgttgtacatcaagcccttgccagcaggcttgctgcgttcccatctgctgcaaaccagtctgttcaggcatcagcagctcctgttgccagcagagctcctgcgtgagctgtgttagtagtccctgctgtcaagctgtctgcgagcctagtccctgtcagtccggatgtatttcctcctgcaccccatcctgttgccagcagtcctcctgtcagcctgcatgctgcaccagcagtagttgccagcaagcttgttgcgttcccgtgtgctgcaaaaccgtctgctgcaagcctgtgtgttccgaggactccagttcctgttgccagcagtcatcctgtcaacccgcatgctgcacatctagcccatgccagcaggcatgctgcgtgcctgtgtgttgtaaacctgtttgctgtaaacctgtgggatccgtgcctatctgttctggcgctagctccctgtgctgccagcaaagcagttgtcagcctgcctgttgcacatccagccaaagccagcaaggctgctgtgtgcctgtgtgctgcaagcctgtatcctgcgttcctgtgtgctcaggtgccagttcatcctgctgtcagcaatcatcatgccaacccgcttgttgcacaacttcatgctgcagacctagctcatcggtgtcactcctttgccggccagtgtgccgacccgcttgttgcgtgcctgtcccctcttgctgcgcacccacttccagctgccagccttcctgctgtcggccagcgagctgcgtgtccctgctatag

SEQ ID NO: 29654 - DNA, 849 bp, synthetic construct
  source 1..849: mol_type = other DNA; note = Synthetic coding sequence
atggctgcctcaacaatgagcgtatgctcaagcgcgtgctccgatagctggcaggttgacgcctgtcctgagtcatgctgcgagccacactgctgcgctctgtcttgctgcgcacccgctccgtgcctgacattggtgtgcactccagtgtcccgcgtctcctctccctgttgccaagcagcttgcgaaccctcgccctgtcagagcggctgcaccagctcatgtacccctagctgctgtcagcagagctcctgtcaaccagcctgctgcacttcatcgccctgccaacaggcttgttgcgttccagtgtgttgcaaacccgtgtgctgtttgccaacttgctccaaggacagctcctcctgttgccagcagagtagctgtcaaccaacatgctgcgcttcctcatcgagtcagcagtcttgctgcgtgcccgtctgttgcaagcctgtttgctacgtgccgacttgttccgaagactcttcatcttgctgccagcagtccagttgccatcccgcatgctgcaccagctcgccgtgtcagcaggcctgctgcgtccctgtgaggtgtaagccagtgtgctgtaaacctatctgctgtgtacctgtatgctccggtgcctccacatcttgttgccagcaatctagctgccaacccgcatgctgcacgacatcttgctgtagaccatcaagctccgtgtccttgctgtgccgccctgtctgtaggccagcttgttgcatgcctgtgagttcgtgctgtgcccctgccagtagctgtcaggcctcctgttgtcgcccagccagttgcgtgtctctcctgtgtagacctgcctgcagccgacccgcttgttag

SEQ ID NO: 29655 - DNA, 891 bp, synthetic construct
  source 1..891: mol_type = other DNA; note = Synthetic coding sequence
atggcttcttccccgctccccggacccaatgacatcttgctagcatccccgagctccgcttttcaaccagatactctatctcagccccgtcccggacacgcaaatctgaaacccaaccaagtcgggcaggtgatattgtatggaatcccgattgtgtccctggttattgacgggcaggagagactgtgcctggcccagatttccaacaccctgttgaagaacttttcatataatgagatccataaccgacgtgtagctctcggcattacttgtgttcagtgtacccccgtccagctggaaatattaaggcgagccggtgctatgcccatcagctctcggaggtgcggcatgatcacaaagcgtgaagccgaacggttgtgcaagtccttcctgggggagaaccgcccacctaagctgcccgataatttcgcgttcgacgtctcgcatgagtgtgcctgggggtgtagagggagctttattccagcacgttacaacagctctcgcgcaaagtgtattaagtgctcttattgcaacatgtacttctcgccaaataagtttatctttcactcgcatagaacccccgatgcgaagtatactcaacccgacgcagccaactttaattcatggaggcgtcatcttaagcttaccgacaagagtcctcaggacgagttggtgttcgcttgggaggacgtgaaagccatgtttaacggcggatcgcgtaaaagagccctgccccagccaggggcacaccctgcgtgtcacccactgtcatctatccggacccgaagcatcgcgttttcgtctcagactctcatgctgctggaggaaattttcggagagaaagatcaagaagattatatgcgcataaacgaggataacatctggctctag

SEQ ID NO: 29656 - DNA, 5345 bp, synthetic construct
  source 1..5345: mol_type = other DNA; note = Synthetic coding sequence
gtcaaaaagatccaccgccacagactgtcccccgctactgagaagggagcagcctctagcggggagggagacaaagatcctcctcctcccgctcacgaagatatcgccgtgaagggcactgcaaccgccgcaggaacagggccagggaccggagccgctgccgcagctgccgcagcagtgccacctcctcatccagctgcggctgctgccgctgctgccgctgctgctgccgcagccgcagctgcggtaccccctccacatccgaacatcagagcactgcagacccaggcaccacagcaaattccaagaggccctgttcagcagccactagaggatagaatcttcacacctgccgtgtcagcggtctattccactgtgacacaggtagctaggcagcctggcactccaaccccctccccatacagcgctcatgaaatcaacaaagggcaccccaacttagcagctaccccacccggtcatgcctcaagcccgggactcagccaaaccccgtaccccagcggtcagaacgccggtcctaccacccttgtatatccacagactccgcagacaatgaactctcagcctcagacaagatcccctgtgatcttttcgccaagccagtttttccagagaccgcagatacagccacctagagctactatccctaacagcagtccctccattcgaccaggtgctcagacccccaccgcagtgtatcaggcaaaccagcacatcatgatggtcaatcatctgccaatgccctatcccgtgccacaggggccacagtattgtattccgcaataccgccactccggccctccctatgtgggtcccccacagcagtaccctgtccagccacctggccctggtccattctacccgggtcctgggccaggggatttccctaacgcatatggcacacccttctatccttcccagccagtttaccagagcgcgccaatcatcgtcccgacacagcaacagcccccacccgctaaacgggagaaaaagaccatccgaattcgggaccctaaccaaggcggtaaggatattactgaggagattatgagtggagggggatcaagaaatccgacacccccaatcggcaggcccacctcaactccaaccccacctcaacttccatcccaagtgccagaacactctccagtggtgtatggcactgttgaatccgcccacctagccgcttccactccagtcaccgcagcctccgaccagaaacaagaagagaaacctaaacctgatcccgtgctcaagtccccctctcccgtgcttcggctcgtgttaagtggggagaaaaaagaacaggaggggcagacctcagagactacagccatagtgtcaatcgccgaactgcctctgccaccttcacctactacagttagttctgtcgccaggtctaccattgccgctcctacatcgagtgcacttagctcccagcccatcttcaccactgcaattgacgatcgttgtgagttaagctctcctcgagaagacactatacctatcccttcgcttacctcttgcacggagacttccgatccactgcccacaaatgaaaatgacgacgatatctgtaagaaaccttgtagtgtggcgcctaacgacattccactggtctccagcaccaatttgattaatgagattaatggcgtgagcgagaagctgtcagcgactgagtctatcgttgagatcgtaaagcaggaagtgctccctcttacactggagctggaaatcctggagaaccctcccgaagaaatgaaacttgagtgtatccctgccccaattacacctagtactgtgccttcattcccccctacacccccaacaccccctgcctctcctccgcacacacccgtcattgtgccagcggcagccaccactgtgagctcgccgagcgccgctattaccgtgcaaagagtgctggaggaagacgagtccatccgcacctgtttgtcggaggacgccaaggaaatccagaacaaaattgaagtcgaggccgatgggcaaacagaagagatactagattcacaaaatcttaactctcggagaagccccgtgccagctcagatagcaattactgttccaaaaacctggaaaaaacccaaagatcggaccagaacaacagaagaaatgttggaagctgagctggagctcaaagccgaggaggagttaagcattgacaaggtcctggaaagcgaacaagacaagatgtctcaggggttccaccccgagagagatccctccgacttgaaaaaggtgaaagccgtggaggaaaacggcgaagaggccgagccagtacggaatggagctgaatcggtttccgagggcgagggtatcgatgccaactcaggaagtaccgactcctctggtgatggagtaactttcccgttcaaacctgaaagctggaaaccaacagataccgaagggaaaaaacagtatgaccgcgagtttctgctggactttcagtttatgcctgcgtgcatacagaaaccagaagggttgccccctatcagtgacgtcgtgctggacaagattaatcagcccaaacttccaatgcgaacactggaccccaggatcctgccaagagggccagatttcactcctgctttcgctgatttcggcaggcaaacccctggaggcagaggcgtgccactgctcaatgtgggctctcgaagaagtcagcctgggcagcgccgagagccaagaaagatcattacagtcagcgttaaggaggatgtgcatctaaagaaggccgaaaacgcatggaagcccagccagaagagggacagccaggcagacgacccggagaacattaagacgcaagaactgttcaggaaggtgcggtccatcctgaataaactgactccacaaatgtttaaccaactcatgaagcaggtttccggcttaactgtagacactgaggaaagacttaaaggtgttattgatctcgtgttcgagaaagcaattgacgagcctagctttagcgtggcttatgccaacatgtgccgatgccttgtcacgctgaaagtaccaatggctgataagcccggaaatacagtgaatttccggaaactgctccttaatcgctgtcaaaaagagttcgagaaggacaaggccgacgatgatgtttttgagaaaaaacagaaggagttagaggctgcctctgccccagaggaacggacacgcttgcatgacgagctggaggaggcaaaagataaggccaggcgcagaagcatcgggaacattaagttcattggagagctttttaaactgaaaatgctcactgaggcgattatgcacgactgtgttgtcaagctgctgaagaaccatgatgaagagagtttagaatgcctctgtagattattaacaaccatcggtaaggatcttgattttgagaaggccaagcccaggatggatcaatattttaaccagatggagaaaatcgtcaaggagcggaaaacctcatccaggatccgctttatgttgcaggacgtgattgatctgcgcttatgtaattgggtgtccagaagggcggatcaggggccaaaaacaattgaacagattcataaagaggccaagattgaggagcaggaagaacagcggaaagtccagcagctcatgactaaagagaagcgacggcctggcgtccagcgggtcgatgaaggaggatggaatactgtccagggcgctaaaaatagtagagttctggatccttccaagttccttaagattaccaagcccaccattgacgaaaaaattcagctggtccccaaagcacagttgggatcttgggggaagggaagtagtggaggcgctaaggcttcagaaacagacgccctgcggagcagcgcctcaagtttaaaccggttctccgcgctgcagcccccagccccttccggatccacacccagcacccccgtcgaattcgatagcaggcgcaccctgactagccgagggtccatgggcagagagaaaaacgataagcccctgcccagtgccactgccaggcctaatacttttatgcggggaggcagctcgaaggatctgcttgacaatcaaagtcaagaggaacagcgccgagagatgctggaaacagtcaagcagctgaccggcggagtggatgtagagaggaacagtacggaggccgaacgcaacaaaactcgggagagcgccaaacctgaaatcagcgccatgtccgcccatgataaagcggctctctctgaggaagaactggaacggaaatcaaagtctatcatcgatgagttcttgcacattaacgattttaaggaagccatgcagtgtgttgaagaactgaatgcccagggactgcttcacgtgttcgtgagggttggggtggaatccacattagagagatcccagattacccgtgatcacatgggccaattgctgtatcaactggtgcagtccgagaagctgtccaagcaggatttttttaaaggtttctctgagaccctagagctggccgacgatatggccatcgacatcccccacatctggctgtaccttgcagaactcgttacaccaatgttaaaggagggcggaatttctatgcgcgaacttaccattgagttctccaagccgctcttacctgtgggacgagccggtgttctgctgtccgaaatcctgcacctgctgtgtaaacaaatgtcacacaagaaggtcggcgcactctggagggaggcagacctttcatggaaagattttctgcccgagggcgaagatgtgcataacttcttgcttgaacagaagctcgactttatcgagtcagactccccttgttcaagcgaagctctctcaaagaaagagctgagtgctgaagaactttacaagcgccttgaaaagctcattatagaagataaggctaacgacgagcagattttcgattgggtggaagctaatctagacgagattcagatgagcagtcctacctttctgagagccttgatgactgccgtctgcaaagcagccataattgcagattctagcactttcagagtggataccgccgtcattaagcagcgagttcccatcctcttaaaatatctcgattcggataccgaaaaggagctgcaggcgctgtacgcactgcaggccagcatcgtcaaactcgaccagcctgcaaatctgctgcgcatgttctttgactgcctgtatgacgaggaggtgatcagtgaggatgccttttacaaatgggagtcctccaaggatcccgctgagcaaaatgggaaaggagtggccttgaagtcagtgaccgctttctttacatggttgcgggaagctgaagaagaatctgaggataatta

SEQ ID NO: 29657 - DNA, 4758 bp, synthetic construct
  source 1..4758: mol_type = other DNA; note = Synthetic coding sequence
atgaattctcaacctcagactcggtcacccttctttcaaaggccacagatccagccaccacgcgcaactatcccgaatagctccccatccatcagaccaggggctcagacaccaacagctgtttatcaggcaaaccagcacattatgatggttaaccatttacctatgccctatccagtgccgcaggggccacagtattgtattccacagtatagacattctgggcctccgtacgtgggccctccccaacagtacccggtacaaccaccaggcccaggacccttctaccccggaccaggccctggagattttcctaacgcctacggaactcctttttatccaagccagccagtgtaccagagcgcccctattattgtgcccacacagcagcagccccctcccgctaaaagggagaaaaaaacaatacgaataagggatcccaaccagggcggaaaggatatcacagaggagattatgtccggtggcggatccagaaaccccacaccaccaattggaaggcccaccagtacccctactccaccgcaacagctccccagtcaggtccctgagcattctccagtcgtttatggcaccgtcgaatccgctcatcttgctgcctctacccctgtgacagccgcttcagatcaaaagcaagaggagaaacccaagccagacccagtgttgaagtctccatctccggttttacgcttggtgctgtctggcgagaagaaagagcaagagggtcaaacatctgagacgacagcaatcgtgagcatcgctgaactgcctctgccacccagtcccaccactgtcagttcagtcgccaggagtactatcgccgcaccaacaagcagtgctctttcttctcagcctatattcacaaccgccatcgatgacaggtgtgaactatcaagtcctcgcgaagacacgatccccatcccgagcctcacctcttgcaccgaaactagcgatccgttacccacaaacgaaaacgacgacgatatctgcaaaaagccttgctctgtggctcccaatgatattcccctggtgagctccactaatctgataaacgaaatcaacggggtatcagagaaactttcggctactgagtctatagtggagattgtaaagcaagaggtgttacccctgacgttggagctggagatactggagaacccccctgaggagatgaagctggagtgcattccggcacccattacgccaagtaccgtcccatcgtttccgcctactcctccgactcccccagcatccccccctcatacacctgtcattgttcccgctgcagcgacaactgtatctagccccagtgccgctatcaccgttcagcgcgtcttggaggaggacgaatccatcagaacctgcttgtccgaagacgccaaggagatccagaacaagatcgaagtcgaagccgacgggcaaacggaggagattctagattcccagaatctgaattctcggaggtccccagtgcctgcccagatagccattacggttcctaagacatggaagaagccgaaagaccgcacccgcactactgaagagatgttggaggccgagctggaattgaaggcagaggaagagctgtccatcgacaaggttctggaaagcgagcaagacaagatgtctcaaggatttcacccagagagagatcccagcgatctgaaaaaggtgaaagcagtggaggaaaatggggaggaggctgaaccagtccgcaacggagcagagagcgtgtcagaaggtgaaggtattgacgcaaactctggttctaccgattcatcaggtgatggcgtgacttttccgtttaagcctgagtcatggaaaccgactgacactgaaggcaagaaacaatatgaccgggagttcctcctggattttcagtttatgccagcctgcatacagaagcccgagggactaccccctattagcgatgttgtcctggacaaaattaatcagcccaagttgccgatgagaacacttgatcctcgaatccttccgaggggacccgactttacgcccgctttcgcagatttcggtcggcagacacccggaggcagaggagtgcccctactgaacgtgggatcaagaaggtcgcaaccaggccagaggcgggagccgaggaagattattactgttagcgtcaaagaagacgtgcatctgaaaaaagctgagaacgcatggaaaccctcacagaagcgggactctcaggcggacgacccagaaaacataaaaactcaagaactgtttagaaaggtcaggagtatcctgaataaacttacaccccaaatgtttaaccagctgatgaagcaagtgtctggactgaccgttgatacagaagagagactgaagggcgtgatagatctggtgttcgaaaaagctatagatgaacctagtttcagtgttgcgtatgccaatatgtgtcggtgcttagtgacactcaaggtgcctatggccgacaagccaggcaataccgtgaactttcggaaactgctgttgaaccgctgccagaaggagttcgagaaggataaggcagacgatgacgtgttcgagaagaagcaaaaagaactggaagctgcgagcgctcctgaggagagaactaggctgcacgatgagttggaggaggctaaggataaggcacgtcgcaggtctattggcaacatcaagttcatcggcgagctatttaaattgaaaatgctgactgaagctattatgcacgactgcgtcgtaaaactgctgaaaaatcacgacgaggaaagcctggaatgtctttgcagactgttgactactataggcaaggacctggatttcgagaaagccaaaccacgaatggatcagtactttaatcagatggagaagattgtcaaagagcgaaagacaagcagccgaatccggttcatgcttcaggatgttattgatctgcgactgtgtaactgggtgagtcggcgagccgaccaagggcctaagaccatagagcaaatccacaaggaagctaaaatcgaggagcaggaggagcagaggaaagttcagcaactcatgacaaaggaaaagcggagacctggtgttcaaagggtggatgaggggggatggaatactgtgcaaggggctaagaattccagggtcctggatccgagcaagttcctgaaaattactaaacccaccattgacgagaagatccagctggtccctaaagcccagctggggagttggggcaagggctcgtctggcggtgccaaagctagcgagaccgacgcactgcggtctagcgcttcttcactcaacaggttctccgccctccaaccccctgcaccatccggatccacccctagcactcccgtggagtttgattccagacgaacactgacttcacgcggatcaatggggagggagaagaacgataagcccctaccctcagccactgcacgcccaaatactttcatgagaggtggttccagtaaagatttactggacaatcaatcccaggaagaacaaaggcgtgagatgttagagaccgtcaagcagttgaccggtggagtagatgtcgagcgaaactctactgaagctgaaagaaataagacccgtgagtccgctaagcccgaaatctctgcaatgtcagcccatgataaggctgcactcagtgaagaggaactggagcgtaagtccaaatctatcattgacgagttcctacacattaacgattttaaggaagccatgcagtgcgtagaagaattaaacgcccaggggttactccacgttttcgtccgggtcggtgtagagtccaccttggagcgctctcaaattactcgggatcacatggggcaattgttgtaccaactcgtgcagagcgaaaagctctctaagcaggacttttttaagggtttctctgagaccctcgagctcgcagacgatatggcaatcgacatcccacacatctggctgtatctggccgaactcgtgactcccatgcttaaggagggaggaatctctatgcgggagttgacaatcgagttctctaagcccctgctcccggtaggcagggcaggcgtgttgctatccgagatcctccatctcctgtgtaagcagatgtctcataagaaagtaggcgctctgtggcgcgaagccgaccttagctggaaagactttctgccagagggcgaggatgtccataatttcttgctggagcagaaactggactttattgaatctgattctccatgttccagcgaagctctgagtaagaaggaactttccgccgaagaactgtataagcgattagaaaagctgataatcgaagataaggctaatgacgagcagatctttgattgggtggaagcaaatctggatgagatccagatgtcgagccccaccttcctgcgggctctgatgacagcagtgtgtaaggccgcaatcatcgccgattctagcaccttccgagtggacactgccgttattaagcagagagtacctattcttctgaaatatctggatagcgacaccgagaaggagctccaggccctttacgcactgcaggccagcattgtcaagctggaccagcccgcaaacctcctccggatgttcttcgattgtctctatgatgaggaagttatctccgaggatgcattttacaaatgggagtcaagcaaggatccagctgagcagaatggaaagggcgtagccctcaagtctgtgaccgctttcttcacgtggctccgggaagctgaggaagagagcgaggataactag

SEQ ID NO: 29658 - DNA, 3087 bp, synthetic construct
  source 1..3087: mol_type = other DNA; note = Synthetic coding sequence
atggcttcggaggccgtgaaagtcgtagtgcggtgcagacccatgaatcaacgcgaaagagagctgaggtgccagcccgtggtgacagtggactgtgcccgagcacagtgctgtattcagaatccaggcgctgcggacgagcccccaaagcagtttactttcgatggggcatatcatgtcgaccatgttactgagcagatttataatgaaatcgcttaccctctcgtcgaaggggtcaccgaagggtataacggtaccatattcgcctacggtcagacaggttctggtaaatcctttaccatgcagggactcccagaccctccttcacagcgtggcatcataccaagagcttttgagcacgtgtttgagtctgtgcaatgtgcagaaaacaccaaatttctggtacgagccagttatctggaaatttacaacgaggatgttcgcgatctactaggcgctgacactaagcaaaagctggagctcaaggagcaccctgaaaagggcgtctacgtcaaggggctgagcatgcacactgtccattccgtcgctcagtgcgagcacataatggagaccggatggaagaacaggagtgtgggatacaccttgatgaataaggatagctcacggagccactccatttttacaatctccattgagatgtctgctgtggacgaacgaggtaaggatcacttaagggcgggtaaacttaacctggtagacctcgctgggagtgagaggcagagcaaaacaggcgctacaggcgagaggctgaaagaagcaaccaaaattaatctgtctcttagcgctctcgggaacgtgattagtgccctggtagacggaagatgcaagcacgtgccctacagagactccaagcttacgcgcctgctacaggattctctgggtggtaacacaaagacacttatggtcgcctgcttaagtcccgctgataataactatgatgaaactctgagcacactgagatacgcgaatagagctaaaaacattcgtaataagccacgtatcaacgaagatcccaaggacgccctgctgcgggagtaccaagaagagattaaaaaactgaaggctattctgacccaacagatgtccccgtcctccctgtctgcccttttgagcaggcaagtgccacccgatcccgtgcaggtggaagagaaactcttgccacagcctgtgattcaacatgacgttgaggccgaaaagcagctgatccgcgaagaatatgaggagcgactggcacggttgaaagccgattacaaagccgaacaggaaagtcgagccagactggaggaagacataaccgccatgcgtaactcatacgacgtgcgcctgtctaccttggaggagaacttgagaaaagagaccgaagccgtgctgcaggttggcgtcctctacaaagctgaggtgatgtcccgcgctgaattcgcctcttcagccgaatatccaccagcgtttcaatacgaaaccgtggttaaaccaaaggtgtttagcaccaccgacacgctgccctctgatgacgtcagtaagacccaagtgtcaagcagattcgcagagttacctaaggttgagcccagcaagtcagagatctctttggggtcttccgagtcaagctcactggaggagacaagcgtgagtgaggccttccctggccctgaagagccaagtaatgtggaagtctcaatgcccacagaggagtctcgatccaggtactttctggatgaatgtttaggtcaggaagcagcaggccatttactgggtgaacagaattacctccctcaggaagaaccacaggaggtgcctctccagggactcctcgggctgcaggacccctttgccgaggtcgaagccaaactggcacggctctcttcaactgtggcgcgaacagacgctccccaagcagacgtccctaaagttccagttcaggtgcccgcacctactgacttgttggaacccagcgatgccaggcccgaggctgaggccgctgacgatttcccgcctagacctgaggtggatctggctagtgaagttgctctggaagttgtgagaaccgctgaacccggtgtgtggctggaagcccaagccccagttgctttagtggcccagccagaaccccttcccgctactgccggagtcaagagagaatccgtaggaatggaagtagcggtcctaaccgatgacccactgcccgtggtcgatcagcaacaggtgttggccagactgcagctgctcgaacaacaggtggtgggaggggagcaggctaaaaacaaggatctgaaagaaaagcataagcgtagaaagaggtacgccgacgagagacgcaagcagttggtggccgctctgcagaattccgacgaggattcaggcgattgggttcttctgaatgtgtacgacagtattcaagaggaggtcagggccaaatccaagctgctggagaagatgcagcggaaacttcgcgctgccgaggtggagatcaaagatttgcagtcagaatttcagcttgaaaaaatcgactacctagcaaccattagaaggcaggagcgggacagcatgctcctgcagcagctcctcgagcaagttcagcctcttatccgcagagattgcaattacagcaacctggagaagattttgcgcgaaagttgctgggatgaggacaatgggttctggaaaattccccatcctgtcatcacaaaaactagcctccccgtggtgagtacgggtccgcagaacaaaccggcaaggaagacatctgctgcagataacggtgagcctaacatggaagacgaccggtaccgactcatgctctctcggagtaactcggaaaacatagcaagcaattacttccgctccaagcgtgcgtcccagatcctaagcacagacgccaggaaatcactaacgcaccataattcacctccagggctttcgtgtccattaagcaacaattctgctattccacctacccaggcccctgagatgcctcagcctaggccctttagactggaaagcctagatatcccttttacgaaagctaagcgcaagaaatcgaaatctaattttggatctgaaccactatag

SEQ ID NO: 29659 - DNA, 921 bp, synthetic construct
  source 1..921: mol_type = other DNA; note = Synthetic coding sequence
atgaggcagcatgataccaggaatggcagaatcgtattaatttcaggccgtcggagtttttgttccattttcagtgtgcttccctatcgtgattcgacccaagtaggggacctgaagctggatggaggccgtcagtcaacaggtgcggtgtccttgaaagaaattatcgggcttgagggagtcgagctgggcgcagatggcaagaccgtgtcctacacccagttccttttgcccaccaacgccttcggggcaaggcgcaatactattgacagcacatcaagctttagccagttcagaaatctttcgcaccgctcactgtcaattggcagagccagtgggacgcaagggagcctcgacacgggcagcgacctgggggatttcatggattatgaccctaacctgttggatgatccacagtggccctgcggcaagcataagcgagtgctgatttttccatcatacatgacaactgtgattgactatgtgaagccatcagacctgaaaaaggatatgaatgagacttttaaggaaaagttcccccacattaaattaactctgtcaaaaatccggagcttgaaacgggagatgcgtaaattggctcaggaggactgcgggctcgaagaaccaactgttgccatggcctttgtgtatttcgagaaactggccctgaagggcaaactgaataagcagaacaggaagctctgcgctggagcctgtgtccttctcgcggcaaagattggttctgatctaaagaagcatgaagtgaaacacctaatcgacaaacttgaggaaaaattccggctcaacagacgtgaactaatcgcgttcgaattccccgtgcttgtcgctctggagtttgccctccacctgcctgagcacgaagttatgccacattaccgccgattggtccagagctcctag

SEQ ID NO: 29660 - DNA, 2820 bp, synthetic construct
  source 1..2820: mol_type = other DNA; note = Synthetic coding sequence
atggctgcccagccacccagaggtattaggctatctgctctgtgtccaaagtttttgcatactaactctacgagtcacacctggccattctctgctgtcgccgagctgattgacaacgcctatgacccggatgtgaatgccaagcaaatttggatcgacaaaaccgttattaacgatcatatctgcctcacatttaccgataatggtaacggaatgactagcgataaactacacaagatgctgagtttcggtttctctgataaagtaaccatgaatggtcacgtgccagttggactgtatgggaatggttttaaatccggatctatgcggctaggcaaggatgccatcgtctttacgaagaatggggagtcaatgagtgttggtttactctcccaaacttatttagaggtgattaaggcagaacacgtggtggtgcctatcgtggcattcaacaaacatagacaaatgataaatcttgctgagtccaaagcatcactcgccgcaattttagagcattccctgttttctacagagcaaaaattgcttgcggaattggatgctattataggaaagaaaggtacacgtattattatctggaacctgagatcctacaagaatgccactgagtttgactttgaaaaagataaatatgacatacgaatcccagaggacttagacgagataaccggcaagaagggatataaaaagcaagagcggatggatcagatcgccccagagagcgactacagtctgagagcctactgttcaattctgtacctcaaacctcgcatgcaaattatcctccgcggacagaaggtcaagacacagctggtgagcaaatcactggcctatatcgagagagacgtgtacagaccaaagtttttgtccaagaccgttaggattacattcggcttcaactgcaggaataaagaccattacgggattatgatgtatcacagaaaccggttgataaaggcatatgagaaggtgggctgccagctacgggctaataacatgggagttggagttgtcggaataatcgagtgcaacttcttaaagcccactcataataagcaggacttcgattacaccaatgagtacagactaacaatcacggccctgggagaaaagctgaacgactactggaatgagatgaaagttaagaagaataccgagtatcctctgaatctgcctgtggaagacatccagaaacgccctgatcagacctgggttcagtgcgatgcatgtctaaagtggcgcaagctgcctgacggaatggaccagctgccagagaaatggtattgtagtaacaacccagacccacaattccggaactgcgaggtccccgaagagcctgaggacgaagacttggttcatcctacctacgaaaaaacctacaagaaaacaaacaaagagaagtttcgaataaggcagcctgaaatgatacccaggattaatgcggagctgctctttagacccaccgccctttctaccccttcattttctagcccaaaagagagcgttcccagacgccacctgagcgaagggaccaattcttatgcgactcgactcctgaacaaccaccaggtgcctccacagtccgaacccgaaagcaacagcctgaagcgccgactctctacccgcagttccatactaaatgccaaaaacaggagactctctagccaatttgaaaattccgtttacaagggtgatgacgatgacgaggatgtcatcatacttgaggaaaatagtaccccaaagcctgcagttgatcacgacattgacatgaagtcagaacagagccacgtggagcagggtggtgtgcaggtggaattcgtgggcgactcggaaccctgtggccaaacaggcagtacttcaacgagcagcagccggtgcgaccagggcaacaccgcagctacacagacagaggtgccatccctagttgtgaagaaagaagaaaccgtggaagacgagattgatgtaaggaatgacgccgtgattctgccatcttgtgtggaggctgaggctaaaattcacgagacccaagaaactactgacaaatctgccgacgacgcaggatgccagctccaagaattgagaaaccagctgcttcttgttaccgaagagaaagaaaattataagagacagtgtcatatgtttaccgatcaaattaaggttctccaacagcgaattttggagatgaatgacaagtacgtgaagaaggagacatgtcaccagagtacggagactgatgcagtgttccttctggagtctatcaatgggaagtcagagagcccagatcacatggtgtctcaataccagcaggcgctggaagagattgaaagattaaagaaacagtgtagcgcactccagcatgtgaaggctgagtgctcccagtgcagcaacaacgaatccaaatctgagatggacgaaatggcagtgcagcttgacgacgtgtttaggcagttagataagtgctccatcgagcgggaccagtacaaaagtgaagtcgaacttctggaaatggagaagagtcaaatacgttctcagtgcgaagaactcaagacagaagttgagcagctgaagtcaacgaaccagcaaacagccactgacgttagtacttcctccaatatcgaggaatcagtgaaccatatggacggcgaatctttgaagttgaggtccctgcgtgtaaacgtgggtcagctgttagccatgatcgtccccgacctggacctgcagcaagtgaattacgacgtggatgtagttgatgaaatcttgggacaggtcgtagagcaaatgagtgaaatttcctccacctag

SEQ ID NO: 29661 - DNA, 1149 bp, synthetic construct
  source 1..1149: mol_type = other DNA; note = Synthetic coding sequence
atgtcagccgcaaaccctgagactcccaattcgactatttccagagaagcctccactcagtcctctagcgctgcggcttctcagggctgggtgctgcctgaggggaagatcgttccaaacactgtattcgtgggcggtatcgacgcaaggatggatgagacagaaatcggcagctgtttcggacggtacggatcagtgaaggaagtaaaaatcatcactaatcgaaccggagtgtcgaaaggctacggctttgtatccttcgtcaatgacgttgacgtgcagaaaatcgtcggatcgcaaatacacttccacgggaagaagctgaagctgggaccggcaattcgcaagcagaagctgtgcgccaggcacgtgcaaccacgtcctctcgtcgtgaatccgcctccgcctccacagtttcagaatgtgtggaggaaccctaacaccgagacttatttgcagcctcagataaccccaaatcccgtcacacaacacgtgcaggcctattccgcatatcctcacagccctggccaggtcattaccggatgccagttgctggtctataactaccaagaatatccaacatatcccgacagcgcctttcaggtgaccacaggataccagctgccagtgtataactatcagccttttccagcatatcctcgaagcccttttcaggtgactgctggataccagttgccagtgtataactaccaggcttttcctgcgtatcctaattccccgtttcaggttgcaactggataccagttccctgtgtataactatcagccatttcctgcctacccttctagcccctttcaagtcactgctgggtatcagctgcccgtgtacaattaccaggcgttccctgcttatccaaacagcccttttcaggttgccactggttatcagttcccggtgtataattatcaagcgttcccagcctacccaaactcacccgtacaagtgactacaggttatcagctcccggtatataactaccaggcatttcccgcttaccccaactcaccttttcaagtggccaccggttatcagtttcccgtctataattatcaggctttccctgcatacccaaatagcccggtgcaggtcacaaccgggtatcaactgcctgtctacaactaccagtag

SEQ ID NO: 29662 - DNA, 5057 bp, synthetic construct
  source 1..5057: mol_type = other DNA; note = Synthetic coding sequence
atgtcattacccttctaccagcggtgtcatcaacactatgatttgagttacaggaataaggatgtgaggtccacagtttcccactaccagcgagagaaaaagcgctccgccgtgtatactcaaggaagcactgcatactcatctcgaagtagcgccgctcaccggcgtgagtccgaggcgttccgccgagcaagtgcctcctcgtcacagcagcaggcttcacagcacgcgctgagttcagaggtgtcccgcaaggcagcaagcgcatatgactatgggtccagtcacggcctgacggactcctctctgttgctcgacgactattctagcaagctaagtccgaaacctaaaagggccaagcactcacttctgtcaggcgaagagaaggaaaacttgccgtctgattacatggtgcccattttttcaggaagacagaaacatgtgagtggtattaccgatacagaagaggaacgcattaaggaggcagcagcatatatagcacagcgtaatctgctggcaagcgaagaagggatcactaccagtaagcagtccacagcatctaagcaaactactgcctccaagcagagtactgcctccaagcagagtaccgcaagtaagcagagtacagcctctcgtcagtctaccgccagtcggcaatcagtggtctctaaacaagcgacctccgccctgcaacaggaggagacgtccgagaaaaagagtcggaaggtggtgatccgcgagaaagctgaaagactcagccttagaaaaaccctggaagagaccgaaacataccacgccaaactgaacgaggaccacttgcttcacgcacccgagttcatcattaagccacggagccacaccgtgtgggagaaggagaacgtcaaactccactgcagcatcgcaggttggccagagccccgagtcacctggtataaaaaccaagtaccgatcaatgtgcatgctaatccaggtaaatatatcatcgaatcccggtacggaatgcacacattagaaatcaatggctgcgacttcgaggatacagcccagtatcgcgctagtgccatgaatgtcaagggagagctgtccgcctacgccagtgtggtcgtgaagcggtataaaggtgaattcgatgaaacgagattccacgccggagctagcaccatgccgctgagctttggagtcaccccctatgggtacgccagtagattcgaaatccacttcgacgataagtttgacgtgtcgttcggccgagaaggcgaaaccatgtctttgggttgtagggtggttataacccccgaaattaaacatttccagcctgagattcagtggtaccggaacggagttcccctgtctccaagcaagtgggttcaaacactctggtcaggcgaaagagctacactgactttttcccacctgaacaaggaggatgagggcctgtatacaatacgggtgcggatgggagaatactatgaacagtattccgcctacgtgttcgtacgcgatgcggacgccgaaattgagggcgcacccgcagccccactcgatgtaaagtgccttgaagcaaacaaggattacatcataatctcatggaagcagcccgcagtggacggagggagcccgatcctagggtactttattgacaaatgcgaggtgggtaccgactcttggagccagtgcaatgacaccccagttaaattcgcaaggttccctgtcacaggactgatagaaggcaggtcatacatcttcagagtacgggcagtgaacaagatggggataggatttccctcccgggtgtctgagccggtcgcggctttggaccccgctgagaaggctaggctcaaatctcggcctagcgcgccttggactggtcagatcatcgttaccgaggaggaaccctcggagggcatcgttccaggcccacccaccgacttgtccgttacggaggctaccagatcctacgtggttttgtcctggaaaccaccaggtcagaggggtcacgagggtatcatgtacttcgtggaaaagtgtgaggctggcaccgaaaattggcagagagttaacactgagctgccagtaaagagtcctcggtttgccctattcgatttagccgagggcaagtcctactgctttcgggttcggtgcagtaacagtgccggagtgggtgagccctccgaggcaaccgaagtcacagtggtaggggataagttggacatcccaaaagccccaggcaagataattccaagcaggaacactgatacctcagtggtggtatcctgggaagagtccaaagacgcgaaagagctggtgggatactatatcgaggcctctgtggctggttccggtaagtgggagccctgtaacaacaatcccgttaagggttctcgctttacttgtcatggcctggtcaccggccagtcgtatattttccgggtgagggcagttaatgcggcagggttatctgagtattcccaggatagtgaggcgattgaggtcaaagccgctatcggaggaggcgtgagtcctgacgtatgtcctgcactgtcagatgaaccagggggactgacggccagtcgtggtcgagttcacgaggccagccctcctaccttccagaaggatgccctgcttggctccaagcctaacaaaccctcattaccgtctagtagccagaacctgggtcagactgaggtcagtaaggtgtccgaaaccgtgcaagaagagctcacacctcctccccagaaagcagccccacagggaaaaagtaagagtgatccattaaagaagaagacggaccgggctcctccgagccctccatgcgacattacctgtctggagagctttcgagattcaatggtgctgggctggaagcagcccgacaagataggcggtgcagagatcaccggatactatgtgaactatcgggaagttatcgacggagttccaggaaagtggcgcgaggccaatgttaaagctgtctcagaggaggcatataaaattagcaacctgaaggagaatatggtctatcagttccaggtcgctgccatgaacatggcagggctaggggcaccctctgcggtctcggagtgcttcaagtgcgaggagtggacaatcgcagtgcctggcccaccccattcactgaagtgcagtgaggtcagaaaagactcattggtgctgcaatggaaacccccagtgcatagcggcagaacacccgtcacgggctactttgtggatcttaaggaagctaaggctaaagaggaccaatggagaggcctgaatgaggcggctatcaaaaatgtatacctcaaggtgagggggctgaaggagggcgtgagttacgtgtttcgagtgcgcgctatcaatcaagccggtgtggggaagccaagtgacctggctggaccggttgtggccgaaaccaggcccggaaccaaggaggtcgtggtgaacgtcgacgatgacggggtcattagtctgaattttgagtgcgataagatgacaccgaagagcgagtttagctggtcgaaagattatgtgagtaccgaagattctccaagacttgaggtcgaatctaagggaaacaaaaccaagatgacttttaaggacctcggcatggacgacctgggcatctactcctgtgacgtcaccgatacggacggaatagctagttcctacttaatcgacgaggaagagctgaagcgtctgctagccctgagccacgaacacaagtttccgacggtaccggtgaaaagtgaactagcagtggaaatcttggagaaaggtcaggtccggttttggatgcaggccgaaaaactcagtggcaatgctaaagttaattatatcttcaatgagaaagagatattcgaaggccctaagtacaagatgcacatcgaccgcaacacagggattatagaaatgttcatggagaagctccaagacgaggacgaaggcacctatactttccaacttcaggacggcaaggcaaccaaccattccaccgtggtgctggttggagacgtgttcaagaaattgcaaaaagaagccgaattccagaggcaggagtggatccgaaagcagggaccacatttcgtggagtacctgagctgggaggtcaccggggagtgtaatgttctcctgaagtgcaaagtggctaacatcaagaaggaaactcacatcgtctggtacaaggatgaacgggagatctctgtggacgaaaagcacgatttcaaagacggcatttgcaccctcctgattaccgagtttagcaagaaggacgccggtatttacgaagttattcttaaggatgacaggggcaaagacaagtcacgactcaaacttgtcgacgaggcatttaaggaactcatgatggaggtatgcaaaaaaatagctctatcagccacagatttgaagattcagtccacggctgaagggattcagctatattcatttgtgacttattacgtggaagacctgaaagtcaactggtcccataatgggtctgccattcggtatagtgatcgagttaaaaccggcgtaaccggagaacagatttggctacagattaatgaaccaactcccaacgacaaggggaagtatgttatggagctctttgacggaaagactggacaccagaaaaccgtcgacctatctggtcaagcctacgatgaagcctacgccgaatttcagagactgaaaaaatcgctgctgtttcaaaaagaccgcgcacgcgtgttagggggactccctgacgtggtcactatccaggaaggaaaggcccttaacctcacttgcaacgtctggggggatccaccaccagaggtcagctggctcaaaaatgaaaaagctctagcctccgatgatcactgcaatctgaagttcgaggccggaagaaccgcatatttcaccattaatggagtgtctacagctgactccgggaaatacggtctcgtggttaaaaataaatatgggtccgaaacatctgatttcaccgtgtccgtattcattcctgaggaggaagcaagaatggcagcactggagagcctcaaggggggaaagaaggctaagta

SEQ ID NO: 29663 - DNA, 3456 bp, synthetic construct
  source 1..3456: mol_type = other DNA; note = Synthetic coding sequence
atgatggccgcagcgctgggacccccagaagtgatagcacagctagagaacgcagctaaggtgctgatggctcctccatcaatggtgaataatgaacagcggcagcacgccgagcatattttcctgtccttcaggaagagcaagtctccattcgctgtgtgtaagcatatcttggaaacttcgaaagtcgactatgtactgtttcaggccgcaaccgccatcatggaagcagtcgtcagagaatggattcttcttgaaaagggctcaattgagtctctgcggacctttctgcttacctatgttctgcagcgcccaaacctgcagaagtatgtacgggaacagattctgctggccgtggcagtgattgttaagagagggagcctggataagagtatagattgcaaaagtatttttcatgaagttagccaactgatcagctctgggaatcctaccgttcagacgcttgcgtgcagcattctgactgcgttactctcagagtttagttccagttccaaaacatctaatattggattgtccatggagttccacggaaattgcaaacgggtcttccaggaagaggacctgcgtcagatttttatgttgacagtggaagtcctgcaggaattctcaagacgtgagaacctaaacgctcagatgtcctccgtcttccaacgctacctggcactggccaaccaggtgctctcgtggaacttcctacctcccaaattgggtcggcattatatcgctatgttcgagtcctcccagaatgtcctgctgaagcccactgagtcttggcgtgaaactttgctggactctcgggttatggaattgttcttcactgtgcataggaagattagagaagattctgacatggctcaggactcactccaatgcctcgcacagctggcctctctccacggtccgatctttcctgacgaaggttctcaggtggactatctggcacatttcatcgaaggcctgttgaacaccataaacggcatcgaaatagaggactccgaggccgtgggcatttcttcaatcatctccaatctcataactgtgttcccgcgaaatgtgttgaccgccattccctccgaactcttttcctccttcgtcaactgccttacccacttgacttgcagttttggacggtcagccgctttagaagaagtgttggacaaggatgatatggtatatatggaagcttacgataaactgctcgaatcctggctcacacttgtccaggatgacaagcatttccataaagggttttttactcagcacgccgtacaggtttttaactcttacattcagtgtcacctcgcagcaccagacggcactcggaacctgacagctaacggcgtggcctcccgcgaagaggaggaaatctcggaattacaggaagacgaccgggaccagttcagcgaccagctcgctagtgtaggaatgttaggcaggattgctgccgagcattgcattccattattgacgtcactcctcgaagagagagtgacaagactccacggacagctccagaggcaccagcagcaactcctggcatccccaggctcatccactgtggataataaaatgctggatgacctttatgaagatattcattggctgattcttgtcacagggtacctgcttgccgacgatacccagggcgaaacccccctcatcccgccagaaataatggagtattcgatcaagcactccagcgaggtggacatcaacaccacactgcagatcctcggcagcccgggagaaaaagccagctctattcctggttataaccggactgactctgtaattcgactgctctcggctattctgcgggtttctgaagtggagtctcgcgcaatacgggcagatctgactcatctcttatcaccccaaatgggaaaggatattgtttggttcctgaaacgatgggcgaagacctacctgcttgtggatgaaaagctttatgaccagattagtctgcccttttcaaccgctttcggcgcagatactgaaggatctcagtggattattggttacctgctacagaaggtcatttcaaacctgtcagtatggagctctgagcaggacctcgcgaatgacactgtacagttacttgtcacgctggtcgagcgtcgggagagggcgaacctggtgatacagtgcgaaaactggtggaatctcgctaagcagttcgcctcccgctctccaccactcaactttctttctagccctgtgcagaggaccctcatgaaagctctggtcctcggaggtttcgcccacatggataccgaaactaaacaacagtattggacagaggtgctccaacccctccagcaaagatttctgagggtcattaatcaggaaaacttccaacagatgtgccaacaagaagaagttaaacaggagatcacggccacacttgaggcattatgcggcatagctgaggcaacccaaatagacaacgtcgccatcctcttcaacttcctcatggacttcctgacaaattgcattggactgatggaggtgtacaagaatacacctgagaccgttaatctgatcatagaggtgttcgtcgaagtggctcacaagcagatctgttacctgggagagtccaaggcaatgaacctatatgaagcgtgcctcaccctgctgcaggtatactctaaaaataaccttgggcgacagcgcatcgacgttacagctgaggaggagcaataccaggacctactgctgatcatggagctcctgaccaatttgctgtcgaaggaattcatcgactttagcgatacagacgaggtgtttcgcggtcatgaacctgggcaagccgcaaatagaagcgtctccgcagctgacgtcgtgctgtatggcgtgaatctgattctgccccttatgagtcaggatttactcaaattcccaaccctgtgtaatcaatattataagctgatcactttcatctgtgagatcttccccgagaagataccccagctgccagaagaccttttcaagagtctgatgtacagtctcgaactcggaatgacctctatgtcttctgaggtttgccagttgtgcctcgaagccctcacacctctcgctgaacagtgtgcgaaagcgcaagagactgactctccactgtttctcgctacacgtcattttctgaaacttgtcttcgatatgctggtgctgcagaaacacaacacagagatgacgacagccgctggagaagctttttacaccctggtgtgcctgcaccaagccgaatatagtgagctggttgagactctgctttccagccagcaggatcccgtgatttatcaaagactcgcagacgcatttaacaagttgaccgcctcctcaaccccccctacactggacaggaagcagaagatggcgtttcttaagtcgcttgaagagtttatggctaacgtgggcggactgctgtgcgtcaagtag

SEQ ID NO: 29664 - DNA, 420 bp, synthetic construct
  source 1..420: mol_type = other DNA; note = Synthetic coding sequence
atgggcggaggtgaaaggtacaatattcccgctccccagtcccgaaatgttagcaagaaccagcagcagctcaaccgacagaagaccaaagaacagaactcccagatgaagattgtgcacaagaagaaggagcgtggccacggttacaattcctcagcagcagcttggcaggccatgcagaatggcggaaagaacaagaatttccctaataatcagtcttggaatagcagtctgtccggccctcgccttctcttcaaaagccaggccaatcagaattacgccggtgccaaattctctgagccaccttccccgtccgtgctccccaagccgccatcacactgggtgcccgtgagcttcaatccgtctgacaaggaaattatgaccttccagcttaaaactctgttgaaggtgcaggtctag

SEQ ID NO: 29665 - DNA, 984 bp, synthetic construct
  source 1..984: mol_type = other DNA; note = Synthetic coding sequence
atgaaagaaatgctggccaaggatctggaagaatctcagggaggcaaatccagcgaagtactgagcgcaaccgagcttagagttcaactggcccaaaaggagcaggaattggcacgtgcaaaggaggcgctccaggccatgaaagccgatcgtaagcgcctgaaaggcgaaaaaactgacctcgtaagccagatgcagcagctctacgctacacttgagtcccgagaggagcagctgcgggacttcatccgaaactacgaacagcaccgaaaggaatcggaggatgccgtgaaggctctagctaaggagaaggatctgctggaaagagaaaagtgggagctgaggagacaagccaaagaagcgactgatcacgccaccgccctgcggtcgcagctagatctgaaagataatagaatgaaggagctcgaggccgagttagccatggccaaacaatcattagccacattgacgaaagatgtgcccaagaggcactccctggctatgcccggtgaaacagttctgaatggcaatcaggagtgggttgttcaagctgacttgcctctgaccgccgctatccggcaatctcaacagacattataccactctcaccctcctcatccggctgacagacaggccgtgcgcgtgtcaccatgtcattcaagacagcccagtgtgatcagcgacgccagtgctgcggaaggcgacaggtcctcgacaccttctgatatcaatagccctaggcatcggactcatagcctttgcaacggggactctccaggacccgtccagaagaatctgcataaccccatcgtacaatcactggaggacctggaagatcaaaagagaaaaaagaagaaggaaaaaatgggctttggtagtatctcaagggtctttgctagaggcaaacagcgaaagagtctggaccccggactgttcgacggcaccgctcctgactactatatagaggaagacgctgactggtag

SEQ ID NO: 29666 - DNA, 984 bp, synthetic construct
  source 1..984: mol_type = other DNA; note = Synthetic coding sequence
atgaaggaaatgctggcgaaggatctcgaggaatcgcagggcggaaagtcatcagaggttctctcagccacagagctgcgcgtgcaactggcacagaaagaacaggagctagctagagccaaagaggccctccaggccatgaaggccgacaggaagcgattaaagggagaaaagaccgacctcgtgagccagatgcagcagttgtatgccacacttgaatctagagaggagcaacttcgtgactttatccggaattatgagcaacatagaaaggagtccgaggatgccgtcaaagctctcgccaaagagaaagacctgctcgaaagggagaagtgggagctgcggcgtcaggccaaggaggccacagatcacgctacggcactccgaagccagctggatctgaaggataaccgtatgaaggagctcgaggccgaactggcaatggctaaacagtctctcgccactctaaccaaggacgtgccaaagaggcactcccttgccatgcctggagaaacagttctcaatggaaaccaagagtgggtggttcaggccgacctccctctgaccgccgcaattcggcaaagccagcagaccctctaccacagccatcctccccacccagctgaccggcaggcagttcgagttagcccttgccactcccggcagcccagcgtgatcagcgatgcttccgccgctgaaggcgaccggagctcgaccccctctgacatcaattccccaaggcaccgaacccactccctttgcaacggggactccccaggacctgtccaaaagaacctccataaccctatagtgcagtctctggaagatctggaggaccaaaagcgcaaaaagaagaaggaaaagatgggatttggcagcataagcagagtgtttgcgaggggcaagcaaagaaaaagtcttgacccgggtctctttgacggtaccgccccagattactacattgaggaagatgctgattggtag

SEQ ID NO: 29667 - DNA, 609 bp, synthetic construct
  source 1..609: mol_type = other DNA; note = Synthetic coding sequence
atggacgaacaggccctgttgggcctgaatcccaacgccgatagtgatttcaggcaaagggccctggcatactttgaacagctcaagatctctcccgacgcctggcaggtctgcgcagaggccctggcgcagcggacgtatagtgacgaccacgtcaaatttttttgcttccaggtcttggagcatcaagttaagtacaaatacagcgagctgaccacggtccaacagcagctgattagagagactctaattagttggctgcaggcccagatgctcaatcctcagccggaaaagacttttatacgtaacaaggctgctcaggtattcgcattgctctttgtgaccgagtatctgaccaagtggccaaagtttttttttgatattttgagcgtggtggatttaaaccctcgaggggtggatctctatctacggatcctgatggctatcgactcagagctggtcgatagagatgtcgtccacaccagcgaggaggcacgtcggaataccctgatcaaggacaccatgagagagcagtgtattcccaatctcgtggaatcttggtaccagatcttgcagaactaccaattcactaactcagaggtgacgtag

SEQ ID NO: 29668 - DNA, 1803 bp, synthetic construct
  source 1..1803: mol_type = other DNA; note = Synthetic coding sequence
atgagtcgtgtagctaaatataggcggcaggtgagtgaagacccggacatcgacagcctgctcgaaactctcagccccgaggagatggaggagctggaaaaagaactcgacgtggtcgacccggatggcagtgtgcctgttggtctcaggcagagaaatcaaaccgagaagcaatctacaggagtgtacaaccgggaggcgatgttgaatttttgtgaaaaggagaccaagaaactcatgcagcgggagatgtcaatggatgagtctaaacaagtggagaccaagacagatgccaagaatggcgaggaacggggtcgtgacgctagcaagaaggcacttgggccacggagagacagcgacctgggaaaagaacctaagagaggcggactaaaaaagagtttcagccgcgacagggacgaagcgggtgggaagagtggggagaaacccaaagaggagaagatcatccgcggtattgacaaagggagagttcgcgcagccgttgacaaaaaggaagccggtaaagacggcagaggcgaagagcgagccgttgctacgaagaaagaggaggagaaaaaaggatccgatcggaacacaggtctcagtagagacaaagataagaagagggaagagatgaaggaggtcgcgaaaaaagaggacgatgagaaagtcaagggcgaacgaaggaacaccgatactaggaaagagggcgaaaaaatgaaacgcgctggaggcaataccgatatgaagaaggaggacgagaaagttaaaagggggaccggaaacaccgatactaagaaggacgacgagaaggtcaaaaagaatgagccactacacgaaaaggaagctaaagacgattccaaaactaagacccccgagaagcagactccatctggacctactaagccttcagagggaccagcgaaggtcgaagaagaggccgctccttcaatttttgacgaaccccttgagagagtcaagaacaatgaccccgagatgacggaggtcaacgtgaataattcagactgcattactaacgagatactcgttcggttcactgaggccctggaattcaacaccgtggtcaaactgttcgccctggccaacaccagagccgacgaccacgtcgcttttgctatcgccattatgctcaaagctaacaaaactattacatctctgaatctggattctaaccatattacgggaaaggggattctggccatttttagggctctgcttcagaataacactctgacggaattacgctttcacaaccagcggcatatttgcggcggaaagaccgagatggaaatcgccaaacttctgaaggagaacactactctcttgaaactgggttaccacttcgagctcgcaggacccaggatgaccgtgaccaacctgctgtccaggaacatggataagcagagacagaaaaggctgcaggagcagagacaggcccaggaggctaagggtgaaaaaaaagatctgctggaagttcctaaagctggggcagtggctaaaggctcgcctaaacccagcccacagccaagtcctaagccttcccctaagaacagtcccaagaagggaggggctccagccgctcctccgccacctcccccacccctggcccctcccctcattatggaaaacctaaaaaacagcttgtcccctgccactcagcggaaaatgggggataaggtgctgcccgctcaggaaaagaacagccgggatcagctcctcgctgcgatcagatcaagtaacctgaaacagctcaaaaagctggaactgcctcttttactccaatag

SEQ ID NO: 29669 - DNA, 201 bp, synthetic construct
  source 1..201: mol_type = other DNA; note = Synthetic coding sequence
atgatcgggacaaccgaagttccctgctgtggaccaagtgcaacctgggcactacgctggtctgatcagatcaccctgccttcactcccgtggaccatgtcctctctgtggtgtatccctctgaaaggaatgctcgcgacttgcccggtatctctgttagaacacgcctattccaacgctttaagagggtggaagccttag

SEQ ID NO: 29670 - DNA, 2121 bp, synthetic construct
  source 1..2121: mol_type = other DNA; note = Synthetic coding sequence
atggctaccgctaactttggcaagatacagatagggatctacgtggagattaaacgcagtgacgggcgaattcaccaggcaatggttacgtccctgaatgaggataatgagtcagtgaccgtcgagtggatagagaacggagatacaaaagggaaggagatagatctggagtcaatatttagcctgaacccagacctcgtgcccgacgaggaaatcgagcctagccccgagaccccgccacctccagcaagctctgccaaagttaataagattgtgaagaatcggagaactgttgcaagcattaagaacgacccaccaagtcgcgataacagggtggttgggtctgcccgagctagaccctcccaatttcctgagcagtcttcttctgcccagcagaatggatctgtgtcagacatcagtccagtgcaagcagcaaagaaagagtttggtccaccaagcagaagaaagtccaactgtgtgaaggaggtcgagaagttgcaggagaagagggaaaagaggagacttcagcaacaggagctccgcgaaaagagggcacaggacgtagacgccacaaatcccaactacgagatcatgtgcatgatccgagacttcagaggttcattggactatcgacctctgaccacggccgaccccatcgacgagcaccgcatttgcgtctgtgttagaaaacgtcccctgaataaaaaagagacacagatgaaagacctcgatgtgatcaccataccatcaaaggatgtggtaatggtgcacgagcccaagcagaaggtcgatctgacgagatacctggagaaccaaacttttcggtttgattatgcgtttgatgattcagccccaaacgagatggtttaccgatttactgccaggcccctggtcgaaacaatttttgaaagaggaatggccacctgcttcgcgtacggtcagacaggatccggcaagacacacaccatgggcggagactttagcggcaagaaccaggattgttccaaggggatctacgcgctggcagcaagggacgtgttcctgatgctgaagaagcctaattacaagaaacttgaattgcaggtgtacgccacgttctttgagatttatagcggcaaggtctttgacctgcttaataggaagaccaagctgagggtgctggaggacggtaaacagcaggtgcaggtggtcggcttgcaggaacgggaagtgaaatgcgttgaagacgtgctgaaattaattgacattggcaatagctgtcgtacctccgggcagacgagcgctaacgcccattctagtcgcagccacgccgtgtttcagatcatcttgaggcgtaaagggaagctccatgggaaattctctcttattgacctggcaggcaatgaaaggggcgcagatacctcatcagctgatcgccagaccaggctggaaggtgcagagataaacaagagtctactcgctcttaaggaatgcatcagagctctagggagaaacaaaccacacactccttttcgtgcttctaagctcacacaggtccttcgggattcttttatcggagagaactctcggacctgcatgattgcaactatcagtcccggaatggctagctgcgagaatactctgaatacgctgcgatatgcaaaccgcgtcaaggaattgactgtggatcccaccgctgctggtgatgtgcgccctataatgcatcacccacccaatcagatcgatgacctcgaaactcaatggggagtgggatctagtccccagagagacgacctgaagttgctttgcgagcagaacgaggaagaagtctcaccgcagctgtttacctttcacgaagcagtgtcgcaaatggtggagatggaggaacaagtagtggaagatcatcgagcagtgtttcaggaatccattagatggcttgaagatgagaaagccctcctggaaatgacggaagaagtcgactacgacgtcgattcatacgccacgcaactagaggccatcctagaacagaaaatcgacatcctcactgaattgagggataaggtgaagtcattcagggctgcactccaggaggaagaacaagcctctaaacagattaatccaaaacgtcccagagccttgtag

SEQ ID NO: 29671 - DNA, 1281 bp, synthetic construct
  source 1..1281: mol_type = other DNA; note = Synthetic coding sequence
atggctcatttgcgaggttttgccaaccagcactcgagggtcgaccctgaggaattgttcaccaagcttgaccgcatcgggaagggctccttcggcgaagtctacaagggtatagacaatcatacaaaggaggtcgtggcaatcaaaattattgacctggaagaagctgaagacgagatcgaagacattcagcaggaaatcacggtattatcccagtgcgattccccatacataaccaggtacttcgggtcatacctgaagtccacaaagctctggatcattatggagtacctgggaggcggaagcgccctggacctgttgaaaccaggtcctcttgaggaaacctacatcgctactattctgcgcgaaatactcaagggcctggattacctccacagtgagaggaaaattcacagagacatcaaggcggctaatgttctgctaagcgagcagggcgatgtcaaactggcggattttggcgtggccggtcagctgacagacacccaaataaagcggaacaccttcgtgggcacccctttctggatggcgccagaagtgatcaaacaaagcgcatacgatttcaaggccgacatatggtcgctggggattacagccattgaactcgccaagggggagccgcctaatagcgatctccatcccatgcgcgtcctctttctcattcccaagaattccccaccgacactcgaaggacagcattctaagcccttcaaggaattcgtcgaggcatgcctaaacaaagatcctagattcaggcccacagccaaggagttgcttaagcacaagttcataactcgctacaccaagaaaaccagcttcctgaccgaactgattgacagatataagaggtggaaatcagaaggacatggcgaggagagttcttctgaggacagtgatatcgacggcgaggccgaggacggtgaacaaggtccgatctggacctttcctcctaccatccggccaagtcctcatagtaagctacacaaggggaccgcattgcattcaagtcagaaacctgcagagcccgtgaaaagacagcccagatctcagtgtctgagcaccctggtgaggcccgttttcggggagctgaaggagaagcataaacagtccggaggctccgttggcgcactggaggagctggagaacgcatttagtctagccgaggagagttgtccaggaatctcagataagctcatggtgcacctcgtggagagggtacagcggttctctcacaaccggaaccaccttaccagtacaagatag

SEQ ID NO: 29672 - DNA, 996 bp, synthetic construct
  source 1..996: mol_type = other DNA; note = Synthetic coding sequence
atgcttcggtgtggtcagatgatttttgcgcaggcccttgtgtgtcggcatctgggtcgtgactggaggtggacacagagaaaacggcagcccgactcatatttcagtgtgttgaacgccttcattgaccgaaaagattcttactattccatccaccagatcgcccagatgggcgtgggcgagggtaagtcaattggtcagtggtatggccctaacaccgtagcccaagtgcttaaaaagcttgccgtgtttgatacatggagtagcctggctgtgcatattgccatggataatactgtcgttatggaagagatccggaggttgtgtcggacttctgtgccatgcgctggcgcaactgcgttccccgctgattcggatcggcactgtaatggcttccccgcaggcgctgaggtgacgaaccgcccatcaccttggcgtcccctggtgttactcattccgctccggcttggcctgacagatattaacgaagcatatgtcgagactctcaaacactgcttcatgatgccccagtctttaggcgtaattggcggtaagcccaactcagcccactatttcatcggctacgtgggggaagagctgatatacctcgacccacatacgacacagcctgccgtagagccaacagacgggtgcttcattcccgatgagtccttccactgtcagcatcccccttgtcggatgagcatcgccgagctggaccctagcattgcagtaggtttcttttgcaagaccgaagacgacttcaacgactggtgccagcaggtgaaaaaactgagtctattaggcggagccctgccaatgtttgagctggtggagctgcagccctctcacttggcctgtcctgatgtgcttaaccttagcctcggggaatcgtgtcaggtgcaggtaggctcactgggagacagctctgacgttgagaggttagagagattctttgattcggaggacgaagattttgagatactgagtctgtag

SEQ ID NO: 29673 - DNA, 1461 bp, synthetic construct
  source 1..1461: mol_type = other DNA; note = Synthetic coding sequence
atgagtgtgacctatgacgactcagtaggagtggaggtttcctccgactcattttgggaagtagggaattataagcggaccgtgaagcgaatcgacgatggacaccgcctttgttctgatctgatgaactgtctgcatgagcgggctagaattgaaaaagcttatgctcagcagttgaccgagtgggcaagacggtggcggcagttggtcgagaaaggccctcagtacgggaccgtggaaaaggcctggatggctttcatgtcagaagccgaacgtgtgagcgaactccacttggaagtgaaggcttctcttatgaatgacgatttcgagaaaatcaagaactggcaaaaggaggcctttcataaacagatgatggggggattcaaagagacgaaggaggcagaggacgggtttcgaaaagcccagaaaccctgggctaagaagctgaaggaggtggaggctgcaaagaaggcacatcatgctgcttgcaaggaggagaaactggcaatctctagggaggccaactccaaagctgatccttcactgaaccctgaacagctgaaaaaactgcaagataaaattgagaaatgtaagcaggatgtccttaagactaaagagaaatacgaaaagtctttgaaagaacttgatcaaggcacaccccagtacatggagaacatggagcaggtgttcgagcagtgccaacaattcgaggagaagcgcctgcgcttctttcgggaggtgctgttagaggtccagaaacacctcgatctttccaacgtcgcaggatacaaagctatctaccatgacctggagcagagcatccgcgctgccgatgcagtggaggacctccgttggtttcgggcaaatcacggacccggtatggcaatgaactggccgcaattcgaagaatggagcgccgaccttaatcggacactgagtcgaagggagaagaaaaaagccaccgacggcgtaacattaaccggcattaaccaaaccggcgatcagtctttgccctctaagccgagttcaacgctgaatgtgccctccaaccccgcacagagcgctcaaagccaatcatcttataacccatttgaagatgaagacgacactggttcaacggtctcagaaaaagacgatactaaggcaaagaacgtgagcagctatgaaaaaacccagagctacccaactgactggtcggatgatgaatcaaacaatccattctcttcaaccgatgcgaacggagacagtaacccatttgacgacgacgccacatctggtacagaagttcgggttagggctctgtatgactacgagggacaagagcatgacgaactgtcctttaaggcaggtgatgaactgactaagatggaggatgaggatgaacaggggtggtgtaaaggcaggctggacaacggtcaggttgggctgtatccagcgaattatgtagaggcaatacagtag

SEQ ID NO: 29674 - DNA, 3075 bp, synthetic construct
  source 1..3075: mol_type = other DNA; note = Synthetic coding sequence
atgaatttcataaaggataattccagagccctgattcaaaggatgggtatgacagtcattaaacagatcaccgatgacttgttcgtgtggaacgttctaaacagggaagaggtgaacattatatgctgcgagaaggtggagcaggatgcagcccgaggtattatacacatgatccttaagaaggggagcgagtcctgcaacctctttttgaaaagtctcaaggagtggaactatccactattccaggatctaaatggacagtcgctgtttcatcagacctctgagggcgacctcgacgatttagctcaagacctgaaagatctttaccacacacccagctttttgaacttctatcctttgggggaggacatcgacatcatcttcaacttgaagtccactttcaccgaaccagtgctgtggcgaaaggaccagcaccaccaccgcgtcgagcagcttaccctcaatggacttctgcaggcactgcagtctccctgtattattgagggcgaaagcggcaagggtaagagcacattacttcagagaatagcaatgctctgggggtcaggcaaatgtaaggcactgacaaaattcaaattcgtgttttttctgcgcctgagccgggctcaggggggtcttttcgagactctctgcgatcaattattagacatccctggtacaattcgcaagcaaacttttatggccatgttgctgaagcttcgccaacgcgtgttattcctactagacggctacaatgagtttaaaccccagaactgtcctgagattgaagcactcatcaaggagaatcacaggttcaaaaatatggtcatagtaactacaaccaccgagtgcctacggcatattagacagttcggggcactgaccgccgaagttggcgacatgacagaagactcagctcaggctcttatacgcgaggtgctaataaaggagctggctgaaggcctgctgttacagatacagaagtctagatgcctgaggaatctcatgaagacacccctgttcgtagttattacatgtgccattcagatgggagaatcagagttccattctcacacccagaccaccctgtttcacaccttctatgacctactgattcaaaagaataaacacaaacataagggcgtcgctgcctccgacttcatccggtcattggatcactgcggggaccttgccttggagggggttttcagtcataagttcgacttcgaattgcaagacgtgagtagtgtcaacgaagacgtgctgcttactaccggactgctttgcaaatacacagcgcagaggttcaaaccgaaatacaagtttttccataaatctttccaggaatacacggcgggtaggagactgtcttccctgttgacctcccacgaacctgaagaagtaaccaaaggcaatggttatctccagaaaatggtttcaattagtgacatcacttctacctattccagcctgttaaggtacacatgtggaagcagtgtggaggccacccgggctgtgatgaaacacttagccgctgtctatcagcatggatgtcttcttggtttgagtatcgccaaaaggcccctgtggagacaggaatctctgcagtccgtgaaaaataccaccgagcaagagattctgaaagcaatcaatattaactcttttgtagaatgcggcatccacttgtaccaggagagcacgtcaaagtctgctcttagtcaagagtttgaagctttctttcaagggaaatccttgtatatcaattcagggaacattcccgactacctgttcgacttcttcgagcatttgcccaattgcgcttcagccttggattttattaagctggatttctacggcggtgcgatggccagctgggagaaggctgctgaagatacggggggaattcacatggaggaggcaccggagacatatattccctcacgagccgtgagcctctttttcaactggaaacaagaatttcgaactcttgaagtcactttgagagacttctctaaactgaataaacaggatatcagatacctgggcaagatcttctccagtgcgaccagcctcagactgcagataaaacggtgtgcaggcgtcgctggttctttatcactggtcttgtcgacctgtaaaaacatttactcattaatggtggaagcaagccccctaaccattgaagatgagcggcatataacatctgtgacaaacttgaagacactctctatccatgacctccaaaatcagcgtttgcctggcggactgacggacagtttgggaaacctgaagaatttaaccaagctcattatggacaacatcaagatgaatgaagaggacgctatcaaacttgccgagggcctgaagaacctcaagaaaatgtgcctgtttcatctaacccatctctccgatattggcgagggcatggactatatcgtcaagtcattaagcagcgagccttgcgatctcgaagagatccagctggtgtcatgctgcctcagcgcaaacgccgtaaagatccttgctcagaaccttcacaatctggtaaagctgtcgattctggatctttctgaaaactacctggagaaggatggcaatgaagcactgcatgaattaattgacaggatgaatgttctcgagcagctgaccgccctgatgctaccgtggggatgtgacgtgcaggggagcctttcgagtcttcttaaacacctggaggaagttccacagctggtgaagttgggcctgaaaaactggcgattgaccgatacggagatccgcatccttggcgcattcttcggcaaaaaccccctcaaaaatttccaacagttgaacctggccggtaatcgtgtctctagtgatggctggctggcctttatgggcgtgttcgagaatctcaaacaattagtgttttttgactttagcaccaaagaattcctcccagaccctgctcttgtgcggaagctgtcccaggtgttatctaagctaacattcctgcaggaggccagactggtgggctggcagttcgatgatgacgacctgtccgtaatcaccggggcattcaaactcgtcactgcctag

SEQ ID NO: 29675 - DNA, 339 bp, synthetic construct
  source 1..339: mol_type = other DNA; note = Synthetic coding sequence
atggacgataaggcctccgtggggaagatctccgtgtcttctgactctgtgagtactttaaacagtgaagatttcgttctcgtctctagacagggcgatgagacacctagcacgaacaacggatcagacgacgagaaaacaggcttgaagatcgtgggcaacggatccgagcagcagcttcaaaaggaactggccgacgttctgatggaccctccgatggacgaccagcccggagagaaggagctggtgaaaagatcacagctagatggtgagggcgacggccctttgagcaaccagctgtctgcgtcttccaccattaaccccgtccccctggtctag

SEQ ID NO: 29676 - DNA, 441 bp, synthetic construct
  source 1..441: mol_type = other DNA; note = Synthetic coding sequence
atgctgaaagaagactgtgccagcgagcttaaggtgcaccttgccaagtccctgcctctaccttctagtgtaaaccggccaaggatcgacctgatcgtgttcgtcgtgaatctccactcaaagtacagcctccagaataccgaagagtcactgcgtcatgttgacgcctctttttttctcggaaaggtctgttttctggctacaggcgcaggaagggagagtcattgttcaatacatcgacacacagtggttaagttagctcacacctaccagagtcctttactgtactgcgatctggaggttgaaggctttcgagcaactatggcgcagcggctcgtgagagttctgcagatctgcgcaggccatgtgccaggtgtgtcagcactgaacctgctgagcctcctacggtcctctgagggtcctagccttgaagatctttag

SEQ ID NO: 29677 - DNA, 1203 bp, synthetic construct
  source 1..1203: mol_type = other DNA; note = Synthetic coding sequence
atggcgtctgatactcaggcggttccagatgtgtcaggacggtcacgggcacgacgatatgcagaatggtcttcaggactgaggtcagggagggcgggtggaggggagacctctgttgaacgacgcagaacatgcgcttttgataccttagaggccttccttatcatggacggagaggatattcccgacttttccagcctgaaggaagaaaccgcatattggaaagagctgagcctgaagtacaagcagagctttcaggaggccagggatgaactggtagaatttcaagaagggagccgtgaactcgaggccgagctcgaagctcaactggtacaggccgaacaaagaaatagagaccttcaggccgacaaccagagactgaagtacgaggttgaggcgctcaaggagaaacttgaacaccaatacgcacagtcctataagcaggtgtccgtcctcgaggacgatttgtcccaaacccgtgcgattaaggagcagcttcacaaatacgtcagggaacttgagcaggccaatgacgatctggagcgagccaagcgggcaacaattgtgtctttggaagacttcgaacagcgtctgaaccaggccatcgaacgaaacgcctttctcgagtctgaattagatgaaaaggagtctttgttggtttcagtacagcggcttaaggacgaggcaagggacctgcggcaggagctcgccgttcgggagcgacagcaggaggtgacaaggaagtcagctcctagcagcccgacactcgactgcgagaaaatggactcggctgttcaggcctcactcagtctgccagccacaccagtgggcaaggggaccgaaaacaccttcccaagccctaaagctattccaaacggattcggtactagcccattaactccaagtgctagaatctctgcactaaatattgtcggcgatctccttagaaaagtgggcgctttggaaagcaagctggccgcatgtagaaatttcgccaaggatcaagcctctaggaaatcctacatctctgggaatgtgaattgtggcgtactaaatggtaacgggactaaattcagccgctccggtcatacctccttttttgataaaggagctgttaacggatttgaccctgcgcctcccccaccaggactaggctcatctaggccttcgagtgccccaggaatgctgcccctctccgtatag

SEQ ID NO: 29678 - DNA, 699 bp, synthetic construct
  source 1..699: mol_type = other DNA; note = Synthetic coding sequence
atgacccctcctcagcagccacctcccctgcgcagtgagcctgggactttgggttcagccgcatcatcctattcacctttaggactgaatggcgtgcccggttctatctgggatttcgtctccggaagcttcagccctagtcccagccccatactttcagctggaccaccttcttcaagttccgcgtccccaaacggagctgagctggcgagggttcgcagacaactggatgaagccaagcgcaagattcggcaatgggaggagtcttggcagcaggtgaaacaagtctgtgatgcatggcagagagaggcccaggaggcgaaagagagggcacgcgtagctgattcagaccgccaactcgcattgcagaaaaaggaggaggtggaagcccaggtgaaacaactgcaggaggagctggaagggcttggagttgccagtaccctcccaggcttacgcggatgcggagatatcggcaccattcctctccctaagctgcactccctgcagagtcagctccgcttagatctcgaggccgtcgatggagtcatcttccaactgcgagccaagcaatgcgtagcctgtagggaaagggcgcatggtgcggtgctgcgcccttgccaacaccatatcctatgtgagccctgtgccgcaacagcccctgaatgtccctactgcaagggccagcccctgcagtggtag

SEQ ID NO: 29679 - DNA, 1500 bp, synthetic construct
  source 1..1500: mol_type = other DNA; note = Synthetic coding sequence
atgctgccctggcccccagcattagctatgccgatgcccaccgaaggaacacctccccctctgtccggcactcctatacccgtgcctgcatacttccgacatgctgaacccggattcagtctgaaaagacccagaggcctgagccgaagtctgcccccaccccctcccgctaaggggtccatccccatttctcgcctgttcccacccagaacgcctgggtggcaccagctacagccgagaagggtaagtttcagaggtgaagcctctgagaccctacagtcacctggatacgatcctagtcggccagaatccttcttccagcaatcctttcagcggctttcccgcctgggccatgggagctacggcgaggtcttcaaagtcaggtctaaggaggacggaagactgtacgctgtgaaacgcagcatgtcaccattccggggaccaaaggacagggcccgaaagttggcagaggtcggctctcacgaaaaggtcggacagcatccttgttgtgtgaggctggagcaggcatgggaggaaggaggcattctgtatttgcagacggagctgtgtgggccttccctgcagcagcactgcgaggcttggggtgcttctctccccgaggcgcaagtttgggggtatcttagggatacactcctggcgttagcgcaccttcactcccagggtcttgtgcatcttgacgtgaaaccagctaacatcttcctcggccctcggggaagatgcaagctgggtgattttggcttgcttgtggaattggggaccgcaggcgcaggagaagtgcaggagggcgacccgagatacatggctcctgagctcttacagggatcctacgggaccgccgctgacgtgttctctttaggtctgaccatcctggaggtcgcttgtaacatggagcttcctcacgggggagaaggctggcaacagctcagacagggatatctgcccccagaattcaccgcaggcctgagcagcgaactccgttctgtgttggtcatgatgctggaacctgatccgaagttaagagcaacagccgaagccttgctggctttgcccgttttaagacagccccgtgcgtggggcgtgctctggtgtatggccgcagaagcgctttctcgcggttgggctctgtggcaggcactcctggcgctgctatgctggctgtggcatggtctggcccatccagcatcatggctccagccgctggggcctcctgccaccccgcctggaagccctccctgttctctcttgctggattccagcctaagtagcaactgggacgatgatagcctcggtcctagcctctccccggaggccgtgttggcccgaaccgtggggtccacgtcgacaccgcgatccagatgtacgccacgggatgccctggatctttccgacatcaattctgaaccgccacggggatcattcccctcttttgagccacgcaacctcctctccttattcgaggacactctcgaccccacgtag

SEQ ID NO: 29680 - DNA, 3153 bp, synthetic construct
  source 1..3153: mol_type = other DNA; note = Synthetic coding sequence
atgctgtgctgggggtattggtctctcggccagcccggtattagcacaaacctgcagggtatcgtcgcagaaccgcaagtatgtgggttcatcagtgaccgatctgtcaaggaagtagcctgtggcggaaatcactcagtctttctactggaagatggcgaggtttacacctgcggtctcaatacgaaggggcagctggggcatgagagggagggcaacaaaccagaacaaataggggcactggccgaccaacatatcatacacgttgcctgcggtgaaagtcatagcttagccttatcggacagaggacaactcttcagctggggggcaggaagcgatggccagctcggcctgatgactacagaagacagcgtggctgtgcccaggctgattcagaaactgaaccaacagaccattctgcaagtctcctgtggcaattggcactgtctggcactggcggctgatggacaatttttcacgtggggtaagaatagtcacggccagttgggcttaggtaaggaatttccctcccaggcatcacctcagagggtacggagtctggagggcatcccactcgcacaggtggcagctggaggagcacacagcttcgccctctctctctctggtgcagtgttcggctgggggatgaacaacgccggacagctggggctcagtgacgaaaaagatagggagtcgccttgccacgtgaagctgttgcggacccagaaggtcgtgtatattagctgcggggaggagcacactgccgttctgacaaaaagcggaggggttttcacattcggcgcaggctcatgtggtcagctcgggcatgatagcatgaatgacgaagtcaatcccagaagagttcttgagcttatggggtcagaggtcactcagatcgcatgcgggaggcagcacaccctcgccttcgtgccctcttctggcctgatttacgctttcgggtgcggggctcgcggacaattgggcaccggccacacgtgtaacgtcaagtgtcctagcccagttaaaggctactgggcagcacactctgggcagctctccgctcgggctgaccggttcaagtatcacattgtgaagcaaatattcagcggaggagatcagacatttgtcctgtgttctaaatacgagaattattctcctgccgtcgacttccgcactatgaaccaggcccattatacttcgctcataaacgacgagacaatagcggtgtggagacaaaagctgtccgagcacaataatgctaacaccatcaacggtgtggtacagattctaagtagtgcagcctgttggaacggcagctttttagagaagaaaatcgatgaacattttaagaccagtccaaagatccctggcatcgatctgaacagcacccgcgtcctttttgaaaaacttatgaattcacaacattcgatgattctggagcaaattttaaacagttttgagtcatgtctgatcccccagctatcgtcttcccccccagatgttgaggcgatgagaatttatctgattctgcccgagtttccattgttgcaggatagtaaatactatatcaccctaactatccctctcgccatggctatactgagactggataccaacccatccaaagtcctggacaattggtggtcccaggtctgcccaaaatactttatgaaactagtaaatctgtataaaggagcagtcctataccttctgcgcggaaggaaaacctttttgattcctgtgctcttcaacaactatattaccgccgcactcaaactgctcgagaaactttataaagtgaatctcaaggtgaagcatgtcgagtatgacaccttctacattccagagattagcaacttggtagacatacaggaagattacttgatgtggtttttacaccaggccggaatgaaggcaagaccctccatcatccaggatacagtgaccttatgtagttacccttttatctttgacgcccaggcaaagaccaagatgctgcagaccgatgctgagttgcagatgcaggtagcagtgaacggcgcaaacctgcagaacgtgttcatgctgcttacactggagccacttctagctcgctcccccttcttagttttgcatgttcgtcgtaataacctggtcggtgatgctctaagggaattatctatccacagtgatatcgatctgaaaaagccactgaaggttatctttgacggcgaagaggccgttgacgctgggggtgtgaccaaggaattctttttactgttgctgaaagagctgctgaatcctatttatgggatgttcacctactatcaagacagcaatcttttgtggttttctgatacatgcttcgtggagcataattggtttcatctgatcggcataacctgcggcctggccatatacaattctactgtagtcgacttgcatttccctctcgccttgtacaaaaagcttctgaatgtgaaacctggccttgaggacctaaaggaactctctcctaccgagggacgcagcttgcaggaacttcttgactatcctggggaagacgtggaagagacattttgtctcaatttcacaatttgccgagagtcctacggagttatcgaacagaaaaaactgataccgggtggagataacgtgacagtgtgtaaggacaataggcaggagttcgtggatgcatacgtgaattatgtgtttcaaatctctgtgcacgagtggtacactgctttctcttctggctttctgaaggtgtgcggtgggaaagtcttagagttgttccaaccaagtgaactccgagctatgatggtgggaaactctaactacaactgggaggaactggaagaaacagcgatctataagggcgactatagtgctacacaccccaccgtgaaattgttctgggagacatttcacgaatttccgctggaaaaaaaaaagaaattccttctgttcctgacaggaagtgatcggattcctatttacgggatggcctcactacaaatcgtgatccagtccacagccagtggggaggaatacctgccagtggcgcatacctgctacaatctgctggatctaccaaagtatagttccaaggagatattaagcgcacgcctgacacaggcactggacaactacgagggcttcagcctagcgtag

SEQ ID NO: 29681 - DNA, 363 bp, synthetic construct
  source 1..363: mol_type = other DNA; note = Synthetic coding sequence
atgagcatcggagtgccaatcaaggtgcttcacgaggcagaaggccatatcgtgacgtgcgagactaacactggagaagtctaccggggaaaactcatagaggctgaggacaatatgaattgccagatgagtaacattacagtcacatatagggacggaagagtggcccagctcgagcaggtgtacatcagaggctccaagatcagattccttatcctgcctgacatgcttaagaatgcaccaatgctgaagtccatgaagaacaagaaccaaggaagcggggctgggaggggaaaggcagctatcttgaaagctcagggttatctgtcttctttagagtgggtactggtgcacatttgctag

SEQ ID NO: 29682 - DNA, 1182 bp, synthetic construct
  source 1..1182: mol_type = other DNA; note = Synthetic coding sequence
atggaagaaaataatcttcagtgctcctccgtggttgatggcaacttcgaggaggtgccacgtgaaacggccatccagtttaaacccccactctaccggcagcgatatcagtttgtgaagaacctggtggaccagcacgaacctaagaaggtcgctgatctgggatgcggggatacctcacttttaaggctacttaaggtaaatccttgcatcgaactgcttgtcggcgtcgatataaacgaagacaaactacggtggcggggagacagtttagccccttttctgggcgatttcctcaagccacgcgacctaaacttgacgatcaccctttatcacgggtcggtcgtcgagagggattcccgccttctgggtttcgacctgataacatgcatagagttgattgaacatctcgactctggggatctagctaggtttccagaagtggtatttgggtatctctctccctccatgatcgtcatctcaacccccaactccgaatttaatcctttattccctagtgtgacccttcgagatagcgaccacaagtttgaatggacacggatggagttccagacatgggcactgtacgtggctaacagatatgactacagtgttgagttcactggagtaggggagccccctgccggagcggaaaacgtcggctactgcacccaaataggcatttttcggaagaatgggggtaaagccactgaatcctgtctgagtgagcagcacgatcaacacgtctataaagctgtctttactacatcatatccctctttgcagcaagaaaggttcttcaagctggtactcgttaatgaagtctcacagcaggtagagagcctgcgggtgagccatctacccaggaggaaggaacaggccggtgaaagaggcgacaaacctaaggatataggagggtccaaggctcccgtgccatgcttcggccctgtctttaccgaggtcgagaaggccaagattgagaactctccgactcctttttgcgtgggcgacaagttttttgtccctttgcaacggttactggcttaccccaaactgaacagactgtgcgccaacgaagagatgatgcgctctgtcatagctgattctatccctctgtcctccgatgggtcagcagtagttgcggacttgcgaaactattttgatgaacagttcgagttttag

SEQ ID NO: 29683 - DNA, 228 bp, synthetic construct
  source 1..228: mol_type = other DNA; note = Synthetic coding sequence
atgtctccccagaagagagttaagaacgtacaagcccagaatcgcacaagccaaggttctagcagcttccagaccactttatctgcttggaaagtcaaacaggacccctccaattcaaaaaatatctccaagcacggacagaacaaccccgtaggcgactatgagcatgctgatgatcaggccgaagaggatgccctgcagatggctgtgggttacttcgagaagtag

SEQ ID NO: 29684 - DNA, 996 bp, synthetic construct
  source 1..996: mol_type = other DNA; note = Synthetic coding sequence
atggcatttgtcactcggcaattcatgcgttctgtttcaagctcttccacagccagcgcatccgccaaaaaaatcatcgtcaagcacgtgacagtcatcgggggagggctaatgggggcaggaattgcgcaagtcgcagctgccactggccataccgtggtactagttgatcagacggaggacatcctcgctaaaagtaagaagggaattgaagagagcctgcgaaaggtggccaaaaaaaaattcgcggagaacttaaaagcgggtgatgagttcgtggaaaagacccttagcaccatcgcaacctcaactgatgccgcttccgtggtgcattctacagatctggtggttgaggctattgtggaaaatttaaaggtgaaaaacgagctatttaagcgacttgacaagtttgcggctgagcatacgatattcgcttctaatacatcctctctccaaatcaccagcatcgccaacgcgactactcgccaagacagatttgccggactgcactttttcaaccctgtgcctgtgatgaaactggtcgaggtgatcaagacacccatgaccagccaaaagacatttgagagcctggtggatttttccaaagctctaggcaagcacccagtgtcttgcaaggatacgcccggttttatcgtgaataggctcctcgtgccctatttaatggaagctatcagattgtacgagagagattttcaaacctgtggcgatagcaattctgggctgggctttagtctgaagggtgatgcttcaaaggaagacatagacaccgccatgaaattaggggctggttatcctatgggtcctttcgaattgctagactacgtcggcctggacactacaaagtttatagtggatgggtggcacgagatggatgctgagaaccctcttcaccagcctagtccaagccttaataagctggtggctgagaataagtttggtaagaaaaccggagaaggattttacaaatacaaatag

SEQ ID NO: 29685 - DNA, 1281 bp, synthetic construct
  source 1..1281: mol_type = other DNA; note = Synthetic coding sequence
atggcccacttgcgagggtttgccaatcagcactcacgggtggaccccgaggagctcttcaccaagctggataggatcggtaagggaagttttggagaggtttataaaggcattgataatcacaccaaagaggtggtcgcaattaagatcattgacctggaggaagctgaagacgaaatcgaagatatccaacaggaaatcactgtcctgtctcagtgtgacagcccatatataacacgatatttcggttcctatctgaagtcaacaaagctctggatcatcatggaatatctgggaggtgggagtgcgctcgatttactgaagcctggacctttggaagagacgtatattgcaacaattctccgggaaatacttaagggtctggactatctccactccgaacggaagatacatagggacatcaaagcagctaatgtactgttgtcggaacagggcgacgtgaagctcgccgattttggggttgctggacaattaactgatactcagattaagcgcaatacattcgttggcactcccttctggatggcaccggaggtcataaaacagtctgcttacgatttcaaggcagacatttggagtctaggaataacagctatcgaattggccaagggggaaccgccaaattccgatctccatcccatgcgcgtgctcttccttatacctaagaactcaccccctacattggaggggcaacattccaaacctttcaaagagttcgttgaggcttgtctcaataaggatccgagatttcggccaacggccaaggagttattgaaacataagtttattacacggtacacaaagaaaacctcctttttgaccgagcttatcgaccggtataagcgctggaagtccgaaggccatggggaagagtcgtcctcggaagacagcgacattgacggggaagctgaagacggagaacagggaccgatttggaccttcccgcctacaatcagaccaagcccacactctaagctgcacaagggcaccgcgctccatagtagtcagaagcccgctgaacctgtgaagcgacagcctcggtcacagtgcctgtctaccttggttaggcccgtcttcggcgaactgaaggaaaagcataaacagagcggtgggagcgtcggggctctggaagagctcgaaaacgccttcagtttggcggaagagtcctgtccgggaattagcgataaattaatggtccacctggtcgagagagttcaacggttctctcataatcggaatcacctgacctccacgcggtag

SEQ ID NO: 29686 - DNA, 1290 bp, synthetic construct
  source 1..1290: mol_type = other DNA; note = Synthetic coding sequence
atgccgaacgtcctgctgccaccaaaggaaagcaacttgttcaagcgtatcctgaagtgctacgagcagaagcagtacaagaatggcctcaaattctgtaaaatgatcctcagcaacccgaaatttgctgaacatggggagacgctcgccatgaaagggctaacactgaactgcctggggaagaaggaagaggcttatgagttcgtgaggaaaggcttgcgcaacgacgtcaagagccatgtatgctggcacgtctacggcctgttgcagcgctcggataaaaagtacgacgaggccatcaaatgttaccgtaacgctttgaaactggataaggataacctgcagattctaagggatctttcgttgctgcaaatccagatgagagacctggagggttaccgcgaaacccgctaccaactactgcagctccggccaacccagcgggcaagttggattggctatgctatagcttatcacctgctcaaagactacgatatggcactgaagttgctggaagagttccgccagacacaacaggtgccaccaaacaagattgattacgagtactccgaactcatcttataccaaaaccaggttatgcgggaagccgatctgttacaggagtctctggaacacattgagatgtacgagaaacaaatctgcgataagctgttggttgaagagattaagggggagattctccttaagctcggtcggctgaaggaggcaagtgaggtgttcaaaaatttgattgaccgtaacgctgagaactggtgttattatgaaggactggagaaagctctgcagatcagtactctggaggaaaggcttcagatatacgaggaaatttccaaacagcacccaaaggcgatcacaccccgacgactccctctgacactggtccctggcgaaagattccgggagctcatggacaagttcctgcgggtgaatttctctaaaggttgccccccactgttcacaacactcaagagtctgtactacaacacggagaaggtgtcaattattcaggagctagtgacaaactacgaggcctccctgaagacatgcgatttcttcagcccttacgaaaatggtgagaaagaaccacctactactcttctgtgggtgcagtactttcttgcccagcatttcgacaaactggggcagtacagcctggccctcgactacatcaatgccgctatcgcgtcaacgcctactctcatcgagttattttacatgaaagctaaaatttataaggtgaaatcagagtcctgttttctctcgtcatag

SEQ ID NO: 29687 - DNA, 360 bp, synthetic construct
  source 1..360: mol_type = other DNA; note = Synthetic coding sequence
atggacaaaaatattggcgagcagttgaacaaggcctatgaggcatttaggcaggcctgtatggaccgggattcggcagtgaaagaactccagcagaagacagaaaactatgagcagcggatcagagaacagcaggaacagctgtctcttcagcagaccataattgataagctgaagagccagctgctgctggttaatagtacccaggataataactatgggtgtgtcccgctgctcgaagactccgagaccaggaaaaacaacctaaccctggaccagccccaggacaaggttatttcaggcattgcaagagagaagctcccaaaagttgatatcgcaagtgccgaaagttccatctag

SEQ ID NO: 29688 - DNA, 699 bp, synthetic construct
  source 1..699: mol_type = other DNA; note = Synthetic coding sequence
atgactcccccacagcagccaccgccactgaggagtgaaccaggaaccctcggcagcgctgcctcctcgtattcccctttagggcttaacggcgttcctggctccatatgggatttcgtgtctggcagtttttcaccttccccctccccaatcctgagcgctggcccacccagctcctcctccgcttcgcccaatggggcagaacttgcccgtgttcgcaggcagcttgacgaggccaagaggaagatccgacagtgggaggagtcttggcagcaagtcaaacaggtatgcgatgcgtggcagagagaagctcaggaggccaaggaaagagctcgagtggcagactccgaccgacagctggcgctacagaagaaggaggaggtagaagctcaggtgaaacagctgcaggaggagttggaagggctgggagtggccagcaccctccccggtctgagagggtgcggggatatcggcaccattccattacccaagttacactccttacagtcgcagttgcgtcttgacctcgaggcagtagacggcgtcatatttcagctgcgagccaagcagtgtgttgcttgccgggaacgcgcacatggcgcagttttgcgaccctgccagcatcacattctctgcgagccctgcgccgctactgcccctgaatgcccttattgtaaagggcagccactgcagtggtag

SEQ ID NO: 29689 - DNA, 1461 bp, synthetic construct
  source 1..1461: mol_type = other DNA; note = Synthetic coding sequence
atgtctgtaacgtacgacgactcagtgggcgtggaagtgagttccgattccttttgggaggtcgggaattataaacggaccgtcaaacgcatagatgatgggcatcgactgtgttccgacttgatgaactgtctgcatgagagggcccgtatcgagaaagcttatgcccagcagcttaccgagtgggctcggcgatggcgacagcttgtggaaaaaggacctcagtacggcactgttgagaaggcgtggatggccttcatgagcgaggcagagcgagtgagtgagctccatctcgaagtcaaggccagcctgatgaatgacgatttcgagaagataaaaaactggcagaaggaggcgtttcacaagcagatgatggggggattcaaggagactaaagaagccgaggacggattccggaaagcccaaaaaccttgggctaagaaacttaaagaagtggaagccgcaaaaaaagctcaccacgcagcatgcaaagaagagaaactggctatcagtcgagaagccaactcaaaagcggacccatcccttaacccggagcagttgaagaagctgcaggacaaaattgagaaatgtaagcaagacgttctcaaaaccaaagaaaagtatgaaaagtcactgaaagaactcgatcaggggacaccacagtatatggagaacatggagcaggtatttgaacagtgccaacagtttgaagagaaacgcctgcgcttcttccgagaggtactgctcgaagttcagaaacacctggatctatcaaacgtggcagggtacaaggccatctaccatgatttagagcagagtattcgggcagccgacgcagtagaagacctaagatggtttagggccaaccatggcccaggcatggccatgaactggcctcaatttgaggaatggagtgccgacttgaacaggaccttatcccggagggagaagaagaaagcgacagatggcgtgacgctgacagggatcaatcagaccggagatcagagccttccttctaaaccatcgtctacgctgaatgtaccttcaaaccctgcacagtcggcacaatcccaatcatcctacaacccatttgaggatgaggatgatactggctccacagtcagcgagaaagatgacacaaaagcaaaaaacgtgagttcctatgaaaagacccagtcatatccaaccgactggtccgacgatgagagcaacaatcctttctcaagcaccgacgccaacggagacagtaacccgttcgatgatgacgccacaagtggcactgaggtgagagttcgggctctttatgactatgagggccaggagcacgacgaactgagctttaaggccggagacgagcttactaaaatggaagatgaggacgaacagggctggtgtaagggaaggctggataacggccaggtgggattataccctgctaactatgttgaagccatccagtag

SEQ ID NO: 29690 - DNA, 3075 bp, synthetic construct
  source 1..3075: mol_type = other DNA; note = Synthetic coding sequence
atgaatttcattaaagataactctcgggcactgatacagcgaatggggatgacggtaataaaacagatcacagatgatttgtttgtgtggaacgttctgaatagagaggaggttaacattatttgctgtgaaaaagtcgagcaggacgcggctaggggtatcattcatatgattttgaagaaggggtctgagtcatgtaacctcttcctgaaatcactgaaagagtggaactacccactctttcaagaccttaacggccagtctctcttccaccagactagcgagggcgacctcgatgatcttgcacaggacctcaaggatctgtatcacaccccgagcttcctcaacttctacccacttggcgaggacatcgacattattttcaatctcaaatctacattcacggagccagtgctgtggcgtaaagatcagcatcatcaccgagtggaacagctcaccttgaatggactcctgcaggccctgcaaagcccatgcataattgagggggagtcggggaagggcaagtccaccctgcttcagaggattgccatgttgtggggctctgggaaatgcaaagccctcacaaaattcaaattcgtgttcttcctgagactctcacgagcccaggggggacttttcgaaacactttgtgatcagctcctggatatcccagggacaatcaggaagcaaactttcatggctatgttattgaagctgcgccagagggtcctgtttctgctggacggctacaacgaattcaaaccacagaattgtcctgaaatagaagctcttatcaaggagaatcatcgcttcaagaacatggtcatcgtgaccactaccacagagtgtctgaggcatatcagacagttcggggcactcactgccgaagtgggagacatgactgaggacagcgcccaggcgctgattagagaggtgttgattaaggagctggccgaaggcctgctgctgcaaatccagaaatcaagatgcttgcgtaacctcatgaaaacccctctgttcgtggtgataacatgcgccatccaaatgggcgaaagtgagttccactcacatacccaaacaaccttgttccacacattctacgatctgctcatacagaaaaacaaacacaaacacaaaggtgtggcagcctccgacttcataaggtctctcgaccactgtggagatctggcactggagggagtgtttagccacaagttcgactttgaattgcaggacgtgtcatctgtaaatgaggacgtgctgttgactactggcctcttgtgcaaatatacagctcagagatttaagcctaagtacaaattctttcataagagcttccaggaatataccgctggcaggcggctctccagcctcctgacctcgcacgaacccgaggaggtgaccaagggcaacggttatttacagaagatggtgtctatcagcgatatcacttcgacttattcctccctcttgaggtacacatgtggaagctcagtcgaggccacgcgcgctgtgatgaagcacttagctgcagtgtaccagcacggttgtcttctaggcctctcaatcgccaaaagaccactttggcggcaggagagcttacaatcagtcaaaaacacgactgagcaagaaatcctcaaggccattaatatcaattccttcgtggagtgtgggattcatctctatcaggagagtacctccaagagcgcattgtcccaggaatttgaagcctttttccagggaaagtcactgtatatcaattccggtaacatccctgactatctgttcgacttctttgaacacttaccgaactgcgcttccgctctcgactttattaaattagatttttacggtggagccatggcctcatgggagaaagctgcggaagatacggggggaattcatatggaggaagcacctgagacttacattccctcccgcgctgtctctctgtttttcaattggaaacaggaattccggacccttgaagtgacgctgcgcgacttctcaaaacttaataagcaagacatccgatacctgggaaaaattttttcctcagcaacgagcctcagacttcagattaagcgatgtgccggagtggcaggctctctgtcgttagtgctgagcacctgcaagaacatttactcccttatggtcgaagcctcccccctgacaatcgaagatgaacggcacatcacaagtgtcacaaaccttaagacgctttccatccacgatctgcagaatcaacgcctgcctggagggctgactgactcactggggaatctaaaaaacctaactaaactgattatggacaacataaaaatgaacgaagaagatgcaatcaagctcgcggagggtttaaaaaatttaaaaaaaatgtgtctatttcacctcacacacctgagcgatataggagagggcatggattatatagtgaaatccctgtcctccgaaccttgcgacctcgaggagatccagctggtctcatgttgtctgagtgctaatgctgtgaaaatcctggcacagaatctgcacaatctggtcaagctgagtatcctggacctaagcgagaactaccttgagaaagacgggaacgaggctctacacgaactcattgataggatgaacgtactggagcagcttacagccttgatgctgccatggggctgcgacgtgcaaggctccctgtcatctctgttaaaacacctggaagaagtacctcagttggtaaagttgggactcaagaattggcggctgacggataccgaaatccgcattctgggcgctttcttcggcaaaaaccctctcaaaaactttcagcaactcaatctggccggaaatagagtgagcagcgacggttggctagcattcatgggcgtcttcgagaatctgaagcagttggtgttttttgatttcagcacaaaggaatttctacccgacccagcactggtgaggaagctttcccaggtactgtctaaactgacttttttgcaggaggcccgtctggtcggatggcaatttgacgacgatgatctgtcagtcattacaggagccttcaagctcgttactgcttag

SEQ ID NO: 29691 - DNA, 1767 bp, synthetic construct
  source 1..1767: mol_type = other DNA; note = Synthetic coding sequence
atgagcagttgtgtatcctcacaaccaagctcaaatagagcggctcctcaggatgaactcggcggaaggggatcgtcctcaagcgaatcgcagaagccctgtgaggcgctgcgcggtttgagtagcctgtctattcatctgggcatggaatcatttatagtagtgactgaatgtgagcccggttgtgccgtggacctgggactggcaagagatagacctctggaagccgacggccaagaggtccctttagacacctcgggatcacaggctcggcctcacctgagtgggcgaaagctttcactccaggagcgttcgcaggggggtctcgccgctggaggaagcctggatatgaacggacggtgtatctgtccttcccttccatatagtccagtgtctagtccccagtccagcccaagactgcctcggcgtcctacagtggagagccaccatgtgtccattaccggtatgcaggactgcgtgcagcttaatcaatacacactgaaagacgagatcggcaaagggtcctacggggtggttaagctggcttataatgagaatgataatacttactacgcgatgaaagtgctttcaaaaaagaagcttataaggcaggctggtttccctcggcgaccccctccacgcggtactcggcctgccccaggaggttgtatacagcccaggggccctatcgaacaggtatatcaggagatcgcaatccttaagaaattagatcacccaaatgtcgtgaagcttgtggaagttttggatgaccctaacgaggaccatctctatatggtatttgagctcgtgaaccaaggcccagtaatggaggtcccaaccctcaagccgctcagtgaggatcaggccagattctattttcaggacttgattaagggtatcgagtacctgcactatcagaaaatcatacacagagatattaagcctagcaacctcttagttggagaggacggtcatataaaaattgcggattttggagtttctaatgaattcaaaggatctgacgccttactatcaaacaccgttggcacacccgcattcatggcaccggagtccctaagcgagacaaggaagatcttttccggaaaagccctggatgtgtgggctatgggagtgacactctactgcttcgtgttcggccagtgcccttttatggatgagaggatcatgtgccttcacagcaagatcaaatctcaggcactggagtttcctgatcagccagatatcgctgaggacctgaaggatctaatcaccaggatgttggataagaaccctgagagcagaatcgttgttcctgagattaaactccacccatgggtaacccgccacggggcagagccactgcccagcgaggacgagaattgtactctggtggaggtaactgaagaagaggtggagaattccgttaaacacatcccctccctggccaccgtgattttggtgaagaccatgatcaggaagaggtccttcggaaatccattcgaagggtctagaagagaggaacgaagcctgtctgctcctggtaatctcttgactaaaaagcccaccagggagtgcgagagcctgagtgagctgaaagaagccagacaacgcaggcagcccccaggacacaggcccgctccaagggggggtggcggatccgctcttgtacgcggatcgccttgtgtggaatcttgttgggccccagcccctggctctccagctagaatgcacccgctgaggccagaagaggccatggagcccgaatag

SEQ ID NO: 29692 - DNA, 666 bp, synthetic construct
  source 1..666: mol_type = other DNA; note = Synthetic coding sequence
atgctgaaaaacaaggggcactccagtaaaaaagataacctggctgtgaacgccgttgccctacaggatcacatactccacgaccttcagctcagaaatctctcagtggccgaccatagcaaaacccaggtgcaaaaaaaagaaaacaagtccttgaaacgcgacacaaaggccattatagataccggtttaaaaaagaccacgcagtgcccgaaacttgaagactcagagaaagagtatgtgttggatccaaagccacctccactgacactcgcccagaagctcggccttatcggtcctccccctcccccattgtctagtgacgagtgggaaaaagttaagcaacgatctctcctgcagggcgactccgtgcagccgtgcccaatatgtaaggaggagtttgaactgaggccacaggtcctactgtcttgtagccacgtgtttcacaaggcttgtctgcaagcttttgagaagtttaccaataaaaagacctgccccttgtgccggaaaaaccagtaccagacacgcgtgatccacgacggcgcacgactcttccggatcaagtgcgtgacccgaatacaggcatactggcgaggatgtgtggtccgaaagtggtacagaaatctgcgcaagactgttccaccaaccgacgccaaactgcgatag

SEQ ID NO: 29693 - DNA, 900 bp, synthetic construct
  source 1..900: mol_type = other DNA; note = Synthetic coding sequence
atggtggataagaaactcgtggttgtcttcgggggtaccggcgctcagggcggatccgtcgctagaaccttgctggaagacggaactttcaaagtgagggttgtgaccagaaatcctaggaagaaagccgctaaggaattacggctgcaaggagcagaggtcgtccagggggaccaggatgaccaggtgatcatggagctggcacttaacggagcctatgcgacattcatcgtaaccaattactgggaaagctgtagtcaagagcaggaggtcaaacaaggaaaactcctggctgatttagctcgcaggctgggactacactacgtggtatatagcggactggagaacatcaagaagttaacggccggtagactggctgctgctcacttcgatggtaagggagaggtagaggaatattttcgtgacataggcgtgccaatgacaagcgttaggcttccatgctacttcgaaaatctactttcccatttcctcccccagaaggctcccgacggcaagtcctacctcctatcgctcccgactggcgatgtgccaatggacggaatgagcgtcagtgacttgggccctgttgtgctctctttgttaaagatgccagagaaatacgtggggcagaacattggtctttctacatgccgccataccgcagaggaatacgccgcactccttacgaagcatacacggaaggtggtgcatgacgccaagatgacacctgaagactacgagaaactgggctttcctggtgccagggacctcgcaaacatgtttcggttttacgccctgcgacctgacagagacatcgaacttacactaaggcttaatccaaaggcgttgaccctcgaccaatggttggaacaacacaaaggcgacttcaacctactgtag

SEQ ID NO: 29694 - DNA, 2193 bp, synthetic construct
  source 1..2193: mol_type = other DNA; note = Synthetic coding sequence
atggaggatctattcgagactttccaggacgaaatgggatttagcaacatggaggatgacggcccagaagaggaggagagggtcgccgagcctcaggcaaattttaatacacctcaggccctgcgctttgaggagctgctggcaaatctgctgaacgaacagcatcaaattgccaaagagctgttcgagcagctgaagatgaagaaaccctctgccaagcaacagaaagaagtcgaaaaggtgaagccccaatgcaaggaggtgcatcagactctcattctcgatcccgcacagaggaagagactacagcaacaaatgcaacagcacgttcagctcctgacgcaaatccacctgctcgctacgtgcaaccctaatctcaatcctgaggcgagctccactaggatctgtttaaaagaactggggacttttgctcagtcatctattgccttgcaccatcagtacaaccctaagtttcagacactgtttcagccctgcaatctgatgggggcaatgcaactcatagaggacttctccacacacgttagtatcgactgttcgccccataagacagtgaagaagaccgctaacgagttcccttgcctgccaaagcaagtggcatggatcttggccacttccaaggtctttatgtatcctgagcttcttccagtgtgtagcctgaaggccaaaaacccccaggacaaaatcctgtttacgaaggccgaggacaacaaatacctgttgacctgcaaaaccgcacggcagctgaccgtcagaataaagaacctcaacatgaaccgggcacctgacaacatcattaagttctacaagaagacgaagcagctgcccgtgttaggcaaatgctgcgaagaaatccagcctcatcagtggaaacctcccatagaacgagaagaacatagactgccattttggctgaaggcttcccttcccagcatccaagaagagctgcggcacatggcagatggtgccagggaggtgggtaacatgactggtaccaccgaaatcaattctgatcagggcttggaaaaggacaactctgaattaggctccgagacacgatatccgttactgctccccaaaggggtcgtgttaaagctgaaacccgtggccgaccggttccctaagaaggcctggaggcaaaagcgcagttctgtcctgaagcctttactgattcagccctccccctccctccagccctccttcaatcctggaaaaactcccgctcagagcacccactccgaggcacctcctagcaaaatggtactccggattccacaccctatacagccggctacagttctgcagactgtacccggagttcctccattgggggtttctggcggagagagcttcgaaagcccggctgccctcccagcaatgcccccagaggcgcgaaccagctttccactgtcagagagccaaacgcttctctcatctgcacccgtgcccaaggtcatgatgccctctcccgcatcttcaatgtttcggaagccttacgtgaggagacgtccctcaaagaggcgaggagcacgcgctttcaggtgcattaaacctgcccctgtcatccatcccgcatccgtcatcttcacagtaccggcaactaccgtgaagatcgttagcttgggcggaggatgcaacatgatacagcccgtcaatgcggctgttgctcagtcacctcagactattcccattgctacattgctagtgaatccaacgtctttcccctgccctctgaatcagccactggtcgcgtctagtgtttctcccctcatcgttagtggaaattcagtgaacctgccaatcccctcgacccccgaggataaggctcacatgaatgtcgatattgcctgtgccgtcgcagatggggaaaacgcctttcagggactcgagcctaaactcgaaccacaggagctctcacccctgtcggcaactgtgttcccaaaagtggaacacagccccggaccaccgcctgtcgataaacagtgccaggaggggttgagcgaaaactctgcttacaggtggaccgtcgtgaagaccgaagaggggcgtcaggccctggaaccactgccacagggaatccaggagtcattgaataattcttcgccaggcgatttagaggaagttgtgaagatggagcctgaggacgccactgaggagatatccggcttcctatag

SEQ ID NO: 29695 - DNA, 1563 bp, synthetic construct
  source 1..1563: mol_type = other DNA; note = Synthetic coding sequence
atgtttgtgagcgattttagaaaagagttttatgaggtggtccaatcccagcgcgtactattgtttgtggccagcgacgtggatgcgctatgcgcttgcaaaatcttgcaggcattatttcagtgcgaccacgtgcagtacaccctggtccccgtgtcggggtggcaggagctagagacagcctttcttgaacacaaggaacaaattaagctgctgataaagcaggacgatgacctggaggttcccgcatatgaggacatttttcgtgacgaagaggaggacgaggaacatagcggcaacgatagtgacgggagtgaaccgtctgaaaagcgcactagactggaggaagaaatcgttgaacagaccatgaggagacggcagcgtcgggagtgggaggcccgacggagggacattttgttcgactatgaacagtacgaatatcacgggacatcctccgctatggttatgtttgagctcgcctggatgcttagcaaagatctcaatgatatgttgtggtgggctatcgttggtcttactgaccagtgggtccaggataagattacacagatgaagtacgtcaccgatgttggggtcttacaacgccatgtcagtcgacacaaccacaggaatgaagacgaggagaacacactgtcagtagactgtacgcgaatatcgttcgagtatgacttgcgccttgtgctgtatcagcattggtctctccatgacagcctgtgcaacacctcctataccgccgcacggttcaaattgtggagcgttcatgggcagaaaagactgcaggagtttctggccgacatgggacttcccctaaaacaggtgaaacagaagttccaagcgatggacatctctctcaaagagaatctccgtgaaatgattgaagagtccgccaacaagttcggtatgaaggacatgcgggtgcagaccttcagtatacactttgggtttaaacacaagttcctggcatctgacgtggttttcgctactatgtcactgatggaatctccagagaaggatgggtccggaacagatcatttcatacaggccctggattccctgagtcgctctaacctcgataagttgtaccacggtctggagctcgccaaaaaacagctccgcgctactcagcaaaccatcgcttcttgtctgtgcaccaacctggttattagccagggacccttcctgtactgttccctgatggagggcacaccagacgttatgctgttctccaggccagcatccctcagtctgttgagtaagcatctcctgaagtcattcgtatgctcaaccaaaaatcgtaggtgtaaattactccctttagtgatggccgctcctctgtcgatggagcacgggaccgtgaccgtggtgggcattcccccagaaacggatagttccgatcgcaaaaacttcttcggcagagctttcgagaaagcagcggaaagcacgtcgagccgcatgctgcataaccatttcgacctctccgtaatagagctgaaggccgaggatagaagcaagtttctggatgcactgataagccttttgagctag

SEQ ID NO: 29696 - DNA, 567 bp, synthetic construct
  source 1..567: mol_type = other DNA; note = Synthetic coding sequence
atgacggcgccatcttgcgctttccccgtacagtttcgtcagccttctgtgtctggcctttcccagattacaaagagtctctatatttctaatggggtggcggctaacaacaagttgatgctctcaagcaaccaaattaccatggtgatcaatgtcagcgtcgaggtcgtaaacacactctatgaggatattcagtatatgcaagtccctgtggctgacagtcccaacagcagattatgcgactttttcgatcctatcgcggaccacatccatagcgtggaaatgaaacagggacggacactgctccattgcgccgcaggggtttcccgatctgccgctctgtgccttgcatatctgatgaaatatcatgcaatgagcttgttggatgcccatacctggactaaatcgtgcaggccaattatcaggcccaactccggattttgggagcagctgattcactatgaatttcagttatttggtaaaaacaccgttcacatggtgagctcacccgttggcatgatccctgacatttatgagaaagaagtccgcctgatgataccactgtag

SEQ ID NO: 29697 - DNA, 1182 bp, synthetic construct
  source 1..1182: mol_type = other DNA; note = Synthetic coding sequence
atggacgcagccacgttaacatatgacacactgagattcgctgaattcgaagacttccctgagaccagcgaacctgtctggattctcgggcgaaaatattcaatcttcactgagaaggatgagatcctctctgacgttgcttccaggttatggttcacctaccggaagaatttccctgctatagggggtacgggcccaacctctgataccggatggggctgcatgctgcgctgtggtcagatgatttttgcacaggccctcgtctgtcgacatctaggtagagactggagatggacgcaaagaaagcggcaacccgattcatatttctccgtgctcaacgccttcattgatcgcaaggacagctactactcaattcaccaaatagctcaaatgggggtaggggaagggaaatcaattggtcagtggtatgggccaaacactgtggcccaagtcctcaaaaaattagccgtattcgacacgtggagctctctggctgttcacattgcgatggataatactgtggtgatggaggagatcagacgcttgtgcagaaccagcgtcccgtgtgcgggtgcaaccgccttccccgctgattcagacaggcactgtaatgggtttccggctggcgctgaggtcactaatcgtccatctccttggcgtcccctggttttgcttatcccactgaggctcgggcttactgacattaacgaggcctatgttgagacactgaagcactgttttatgatgccacagtccctgggggttatcggcggaaagccaaatagcgcccattattttatagggtatgtcggagaggagttaatctatctggacccacataccacccaaccagcggtcgaacccactgacggttgttttatcccggatgagagttttcactgccagcacccaccttgtcgaatgtcaattgcagagctggatccctcaatcgctgtggggtttttttgtaagaccgaggacgactttaacgactggtgccagcaagtgaagaagttatcgcttcttgggggagcactgcccatgtttgaactcgttgagttacagccatctcatttggcctgccccgatgtcctgaatctgtccctggacagttcagacgtggagcgccttgagcggttcttcgattcagaggatgaggacttcgagatcttgagtttatag

SEQ ID NO: 29698 - DNA, 780 bp, synthetic construct
  source 1..780: mol_type = other DNA; note = Synthetic coding sequence
atgaaggatgttgacaacctcaagtctattaaggaagagtgggtgtgtgaaacgggatctgacaaccagccacttggaaacaatcagcagtcaaattgcgagtattttgtagatagtttatttgaggaggctcagaaggtgtcttccaaatgcgtatcgcccgctgaacagaagaagcaagtggacgtcaacatcaagctgtggaagaatgggttcactgtgaacgatgacttccggagttatagtgacggtgccagccagcagttcctaaattccatcaaaaagggtgagcttccctccgaactgcaagggatctttgacaaggaagaggttgatgtgaaagtcgaagacaagaagaatgagatctgcctgtctacgaagcctgtcttccagccgtttagcggccaaggccaccggcttggctccgcaactcctaaaatagtttcaaaggccaagaatattgaggtggagaacaagaataatttatccgctgtgcccctaaacaatctggagccaattaccaatattcagatttggctggcaaatggcaagcgtatcgtccaaaagttcaacataacacacagagtttctcacatcaaagactttatcgagaaataccagggctctcagcgctcacctccgttcagtctcgccactgccctcccagtcctacgcctactggatgagacgctgaccctggaagaagccgatcttcagaatgccgtcatcatccagagactgcagaagaccgccagcttcagggaactgtcagagcactag

SEQ ID NO: 29699 - DNA, 852 bp, synthetic construct
  source 1..852: mol_type = other DNA; note = Synthetic coding sequence
atgatacctccccaggaagcgtccgctagacggagagaaattgaagacaaactcaagcaggaggaagagaccctgtcttttatccgcgactccctcgaaaaatcagatcaattaaccaaaaacatggtaagcattctgtcctcatttgaatctcggctgatgaagcttgagaattcaattatccccgtccataaacagacagagaacctgcaaagactgcaagagaacgtagagaagactttgtcatgcctggatcatgtcatctcttactatcacgtagcctccgacacagaaaagatcatccgggaaggtccaacgggcagactcgaagaatatctgggctccatggctaaaatacagaaggcagtggagtatttccaggacaactccccagattctcctgaacttaacaaggttaagctcctcttcgagagaggtaaggaggcattggagtcagagtttaggtcactgatgacacggcactccaaagtggtatctcctgtacttatcctcgacttgattagtggcgacgatgatctcgaagctcaggaagatgtgacactagaacaccttccagagtccgtcctgcaggacgtgatccggatctcacgatggctcgtcgagtatggtcgcaaccaagactttatgaacgtctattatcagatccgatcctctcagttggatcgaagtatcaagggactcaaggaacattttcacaaaagctctagcagttcaggcgttccatacagccctgcaatacccaataagagaaaagatacacctaccaagaagccagtcaagcgcccaggggaaccgccatcctggccaatctccgccacagccaggggatag

SEQ ID NO: 29700 - DNA, 2121 bp, synthetic construct
  source 1..2121: mol_type = other DNA; note = Synthetic coding sequence
atgaacgaggctatggctacagactcccctcggcgtccatcgagatgtacgggcggtgttgtcgtgagaccccaggctgtgacagagcagagctatatggaaagcgtcgtaaccttcctccaggatgtggttccccaggcctacagtggtacccctctgactgaagagaaggagaaaatcgtctgggttcgcttcgagaacgcagacttgaacgacactagccgcaatctggaattccatgaaattcattctacaggcaacgaacctcctttactgatcatgatcggctattcagacggcatgcaggtgtggagtatcccaatttccggtgaagcgcaagagctgttttccgtgcgtcatggacccattcgggcagctcgtattctgcctgcccctcagttcggcgcacagaagtgcgataatttcgccgagaaaaggcctcttcttggagtgtgcaagtccattggcagctcaggcacaagtccgccatattgctgtgttgatctctattctctgaggaccggggagatggtcaaatcaatccaattcaagacccccatttatgacctgcactgtaataagcggattctcgttgtggtcctgcaagaaaaaatcgcagccttcgattcatgcacatttactaaaaaattttttgtgacgagctgctatccttgcccagggccaaatatgaatcctatagctcttgggtccagatggctggcctacgcagaaaacaaactgatccggtgccaccaaagtcggggtggagcctgtggtgataacatccagagctataccgctacagtgatttccgccgctaagacactgaagagcggactaaccatggtcggcaaggtggtgacacaactgactggtacccttccatccggggtgacagaagacgacgtcgccatccactccaatagcagacgttcccctcttgttcctggtatcattactgttatcgacaccgagaccgtcggagagggccaggtgcttgttagcgaggactccgattcagacggcatcgtggcacactttccagcacacgagaaacccgtgtgttgtatggccttcaatacatccgggatgctacttgttaccaccgataccctgggccatgatttccatgtgtttcagattttgacacatccatggtccagctcccagtgtgctgtccaccacctctacaccttgcacaggggagagaccgaagctaaagttcaggacatctgctttagtcatgactgccgatgggtggtggtctccacactgcgagggacttcacacgtatttcctatcaatccctatggtggacagccgtgcgtgcggactcacatgagccccagagtggttaacaggatgtcacggttccaaaaatccgccggactagaggagatcgaacaggagcttacttctaaacaggggggtagatgctcccccgtcccaggactgagttccagccccagcggtagccccctgcacggtaagctgaattctcaagactcatacaacaacttcacaaacaacaacccgggaaacccacggctctctccgctgccgagcctaatggtagtcatgcctcttgcacagatcaaacaaccaatgactttgggaaccatcaccaagcggactggaccctatctgtttggcgctggctgcttctctattaaagctccttggtcgtatatcatgacaaagtatatattttatattaagccaccgaataaggttaagccccctccccaaatttctcccagcaagagcatgggaggagagttctgtgtggcagccatctttggcactagccggtcctggttcgccaacaacgccggactaaagcgggaaaaggatcaaagcaaacaggtcgtggttgaaagcctgtacattatctcgtgctacgggactctcgtggagcatatgatggagcctcgccctctttccaccgcaccgaaaattagcgatgatactccacttgaaatgatgacaagccccagggccagctggacactggttagaaccccgcagtggaacgagttgcaaccgccatttaatgctaatcaccctctccttcttgcagctgatgccgtgcaatattaccagtttttgctggcaggctag

SEQ ID NO: 29701 - DNA, 1815 bp, synthetic construct
  source 1..1815: mol_type = other DNA; note = Synthetic coding sequence
atggggggttgcttctcaaaacctaaaccaggggcagcactgcctactgtcgagctcaaaatcgaagtggtcctccctgagaaagagaggggcaaagaagaactgagcgcttccggtaaggggagcccaagggcttaccagggaaatgggactgccagacacttccatactgaggaaaggctctccacgcctcacccataccccagtcctcaggactgcgttgaggctgcggtttgtcacgtgaaggacctcgaaaacggccaaatgagagaagttgagctgggatgggggaaagtgctgctggtgaaggacaacggggaatttcatgccttggggcacaagtgtccccactatggcgctccgctcgtgaagggtgtgctgagccggggacgtgtgcgatgtccttggcacggggcatgcttcaacatttctactggtgacctggaagacttccctggattagacagcttgcacaaattccaggtgaaaattgagaaagaaaaagtttacgtgcgggcaagcaaacaagctcttcagctgcaacggcgtactaaggtgatggctaaatgcatatcccctagcgccggttatagctcttccacgaatgtcttgattgtgggcgctggagctgccggtctggtgtgcgctgagaccctgcgccaagagggcttctcagaccggatcgtgttatgcaccctagataggcatctgccgtacgaccgacccaagctctcaaaaagtctcgacactcagcccgaacagcttgcactgcgcccaaaagagtttttccgcgcttacggcatagaggtcctgacggaggcccaggtcgttactgtcgatgtgagaaccaaaaaagtggtatttaaggatggcttcaaactggaatacagtaagctccttcttgcacccggtagctcacctaagactctctcgtgcaaagggaaagaggtcgagaacgtgttcactattcgcaccccagaagacgcaaatcgggttgtgcggctagccagagggcgaaacgttgtcgtcgttggggctggatttctgggaatggaagtggccgcatacttgacagaaaaggcacattctgtttcggttgttgaactggaggagaccccttttcgacgcttcctgggagaacgggtgggccgagccctcatgaaaatgtttgaaaataacagggtgaagttttacatgcagactgaggtgagtgaactgcgcggtcaggagggaaagctgaaagaggtggtgctgaaatccagcaaggtcgtgcgcgcagacgtgtgcgttgttggaatcggtgcagtgccggctactggatttctgcgacagtccggaattggcctcgactctaggggcttcattccggtgaacaaaatgatgcaaacgaacgtcccaggagtgtttgctgccggagacgccgtgacattcccgctcgcctggagaaacaaccgtaaagtaaacataccgcactggcagatggcacatgcccaaggaagggtagcagctcagaacatgctggcacaggaagctgagatgtctacggtgccatacctttggacagcgatgtttgggaagagcctaaggtacgccggatacggtgaaggattcgatgatgtaatcattcagggggatttagaagaacttaagtttgtggccttctacacaaagggcgacgaggttatcgccgtcgcatccatgaactacgatcctatcgtgagcaaggtggcagaggttcttgctagtggcagagctatcaggaagcgtgaagtggagaccggagacatgtcgtggcttactggcaagggtagttag

SEQ ID NO: 29702 - DNA, 744 bp, synthetic construct
  source 1..744: mol_type = other DNA; note = Synthetic coding sequence
atgagcacagccgctgttcccgaactaaaacagatctcacgcgtagaggctatgagactcggacccggatggtcccattcatgtcacgcaatgttatatgccgctaatccaggccaactgttcgggaggattccaatgcgattttcggttctgatgcaaatgaggtttgatggcctcttaggatttcctggaggcttcgtcgatagaagattttggtctttggaagacgggttgaatagggtgctggggctgggcctgggatgcctgcggcttactgaggccgactacctctcatctcacctgactgaaggcccacaccgtgtggtcgcccatctgtacgccagacagcttactcttgaacagctccatgctgtagaaatttcagccgttcactccagagatcacggcctcgaggtaggcccaccgccaggacctcgaccccctccccgaggactggccctcgcgccttggaaggctcctatgggtaatacttcccccgaggggccactcgctggcctcggcagagtttctctgagcccagctatgggatggggtgagggctctggcgcaggaagacctggaaaggagggaagaggttggggccctgcactgggactgccacaaggctgcgtaactagcgctttgttacccgctatcgctaatcccggtagcggcggagtgggatccgtgggcagaaaaggctgggggagaagtggagactgtctgggcagctgggaaacatag

SEQ ID NO: 29703 - DNA, 1338 bp, synthetic construct
  source 1..1338: mol_type = other DNA; note = Synthetic coding sequence
atgtacccgaatcctctgatttactgtacttgctgggatccatggaatctgggccctcgcaaactgatcaagactccgcagttgccacgaaaaaacagtactgggtcttccaagttgactccgcttgttccagctcccaagaaccataattatctgcagccaaccaaacctgttgtgtcacctaagatgaaaatccattctgcccgtcaggaggagactaacaaatctttttatgaggtcatcaacgtgagccctggatatcagctggtaagaaaccgagaacaaattagcgttacactgggagatgagatgttcgaccgcaaaaaacgttgggaaagcgaaatccctgacaagggccgatttagtcggaccaacattatctctgacctcgaggagcagattagcgaactcaccgctatcatcgaacagatgaatagagaccaccaaagtgcccagaaacttttgtcctcggaaatggacctgcgatgtgcagagatgaagcagaactttgagaataaaaaccgtgagctcaaggaggcacacgaggcagagctgtcggaactcgagaataattataaagcagctcttaaggccgaaaaactggccgctcaggaaaagctcgaggagatggggaaggaatacaaatatctcaagaacatgttccgtacctatcaagacagcatttacgatgaaatggaagagaagtggagcaaacagaaggcaaagtggaagaaagatgagaaatttgagcgggagaacatattgcttcagcagaagaaaaagatgacaaaaaagtttgagatggagtcaggggaggaagataagaaaatcaacgaatcttgctctgctgtatttgagaacttcatacaggagaaggaagagctgctgaaacaacatcaatccgacaccctgcagcttgaagagctgcgaaagaccaaggaggtgccttggaggcgcgaccagatcaacagacactggcatgatgtcttacaacaattgcttctcatgcaggtcatgcaggaggaattgcacgcccaggcccttattctggagtcccttaacactaatctgtattacacacagcttgaattgcagaaggaaaaggctatcgtagggaacctggaaaaaatgctccagaccaaattcgcagagacagaagaaaaatacaagcatactatccagattctgacggaagaaaacattcacctgaaacagaagattatctccaagaacgaggaaatctgcgaggggtgcagtgggagacttgcctccatcaccgtctctaaagacgattctgatacggtacaggacggtagtaagaaagggcaagagtcttag

SEQ ID NO: 29704 - DNA, 1335 bp, synthetic construct
  source 1..1335: mol_type = other DNA; note = Synthetic coding sequence
ttcagagtccctgccgcaggtcgccgttgtcccttggcccgaggggctcgtcggcctccggactcagcatgcggaaggtttcctcctgaccccggaagccccccagaggaagaagatgcagatctgtctgagagagaggaatcctggcttctcgcagaacgggaagaaaaccaggaggcggagtttccagggcttaggagggctgtgcagctgaatctgagccggcctattgaagagcaagggccactggatgtaataattcacaagctgacagacgtaatattggaggccgatcagaatgattcacagagcttggaactggtccacagatttcaagagtatatcgacgctcaccctgagactatcgtgttggacccgctgcctgcgattagaacactcctagacaggagcaagtcctacgagctgattcgaaagattgaagcctatatggaagatgatcgcatttgctccccaccattcatggaactgacttccctctgtggcgacgacactatgagattgctggagaaaaacgggctgacgttcccgttcatttgtaagacacgcgtcgcacacggcacaaattcccacgaaatggcaatcgtgtttaatcaggagggactgaacgccatccagccaccatgcgtggtccagaattttatcaaccataacgccgtgttgtacaaagtgtttgttgtgggagagagctatacagttgtccaacggcctagcctaaaaaacttctccgccggtacatctgatcgcgaaagcatctttttcaacagccataacgtctctaaacccgagtctagtagcgtgttgactgagctggacaagatcgagggagtcttcgaacgcccttccgatgaggtcatccgggagctcagcagggcactgcgacaggctttaggcgtctctctgtttgggatcgatatcattattaataaccagactggacagcacgccgtcatcgacatcaatgccttcccgggatatgagggagtgtcagaatttttcacggacctcctgaaccatatagccaccgtgctgcagggtcagtccaccgccatggccgcaacaggggacgtcgctttgcttagacattccaaactcctggccgagcctgctgggggtctcgtgggtgagaggacttgctcagctagcccaggctgctgcggctcgatgatgggacaggatgcaccctggaaggcggaggcggatgccggaggtacagcgaagctgccccaccagcggctcggatgcaacgccggagtctcccccagtttccagcagcactgtgtcgcctctcttgccacaaaggctagttcccagtag

SEQ ID NO: 29705 - DNA, 864 bp, synthetic construct
  source 1..864: mol_type = other DNA; note = Synthetic coding sequence
atgtgtggccgacgtaggaggcagagagccgctctcctatcccattgggacccaacgttgtcgagcgactgggatggtgaaaggaccgccccacagtgcctcttaagaatcaagcgtgatatcatgtccatttacaaggagcctccccctggaatgtttgttgtgcctgacacggttgatatgactaaaatacatgccctgatcacagggccttttgatactccgtacgaaggtggattcttcctctttgtttttcgttgccccccagattaccccattcaccctcccagggtgaagttgatgactacagggaacaatacagtgcgttttaatcctaatttctaccggaacggaaaggtgtgtctcagcatccttggtacctggactggaccagcatggtcaccagcccagtccataagtagtgtcctgatttctattcagagcctcatgacagagaacccttaccataatgagcctggcttcgagcaggaaagacatcctggagacagcaaaaactacaacgagtgcatcagacacgagacaataagagtagctgtgtgcgacatgatggaaggaaaatgcccctgcccagagccgctccgtggtgtcatggagaagtcattcctggagtactacgacttctatgaggtcgcatgcaaagatcggttacatcttcagggccagaccatgcaggaccccttcggcgagaagagaggccattttgactaccagagccttctgatgagactgggtttaataaggcagaaagtcctggagcggctccataacgagaacgctgagatggattcggactcctcaagcagcggaacggagaccgatctccacggcagtctgcgagtttag

SEQ ID NO: 29706 - DNA, 852 bp, synthetic construct
  source 1..852: mol_type = other DNA; note = Synthetic coding sequence
cccccatgcagtctgatcagcgactgttgcgccggtaaccagcgcgactccgttggcgtggggccaagtgagccgggttgctacccttgccccggtccaaacatgaatccaattgcactcggcagtcgctggctggcctacgccgagaataaactaatccgctgccaccagtctcggggaggagcctgtggcgacaatattcagtcctataccgctactgtgataagtgccgctaagaccctgaaatcagggcttactatggtaggtaaggtcgtcacacagttgactgggacactgccttcgggggtaacggaggacgatgtagccatccacagcaatagtcggcgaagccccctcgttcctggaataataaccgtcattgacacagagacggtaggagagggtcaggtgctagtgtccgaggatagcgatagtgacgggatcgtggctcacttccccgctcacgagaagcctgtgtgttgtatggcctttaacacatccggaatgctcttggtgactacagacaccctgggacacgatttccatgtcttccaaatcctgacacacccctggtcctcatcgcagtgcgcggtgcaccatttgtatacattacaccggggagaaacagaggccaaggtccaggacatatgcttttcacacgactgccggtgggtggtcgtgtcaacgctgcggggaacaagtcacgttttccccataaatccctatggcggtcagccatgtgtccggacccacatgagcccgagggtcgtgaaccggatgagccgatttcagaagtccgcaggcctcgaggaaatagaacaggaattgacctctaagcagggaggtcggtag

SEQ ID NO: 29707 - DNA, 2235 bp, synthetic construct
  source 1..2235: mol_type = other DNA; note = Synthetic coding sequence
atgagcgccgcaaatcccgagacgccaaattccacaatcagtagagaagcaagcactcagagctccagcgctgccgcaagtcaaggttgggttttacctgagggcaagattgtgccgaatactgtatttgtcggcggaatcgatgcacggatggacgagacagaaatcgggtcctgcttcggcagatatgggagcgttaaggaggtgaaaataatcaccaaccgcacaggtgttagcaagggctacggctttgtctcatttgttaatgacgtggatgtgcagaagatcgtgggaagtcagattcacttccacggcaaaaagctgaagcttggtccggcaattagaaaacagaagctatgtgcccgtcacgtccaacccagacccctggtggtgaaccccccacctccgccacaattccaaaacgtttggagaaaccctaacactgagacctacttacaacctcagatcacccccaaccccgtcacccagcatgtgcagtccgctgctaatccggagacgcccaatagtacaatttcccgcgaggcaagtacccagagttccagcgctgctgcttcccagggttgggttctgcccgaaggcaagattgttcctaacacagtgtttgtgggcggtatcgacgccaggatggacgaaactgagatcggctcttgtttcggcagatatggatccgtgaaggaagtcaagataatcaccaatcgaaccggagtatccaagggatacggatttgtttcctttgtaaatgatgtcgatgtccagaagattgtggggtcccagatccacttccacgggaagaagctgaaactcgggccagctatccggaagcagaaactgtgcgcgcgacacgtccaaccaaggccacttgtggtgaatccccctcccccaccacagtttcagaacgtctggcgcaatcctaatacagaaacgtaccttcagccgcagatcactcccaatccggtcacacagcacgtgcagagtgccgctaaccctgagacacccaacagtacaattagtagggaggcctcaacacagtcctcatccgccgctgcaagccaagggtgggtcctgccggagggcaagattgttcctaatacggtctttgtagggggtattgatgcaagaatggacgagacggagatagggtcttgcttcggcagatacggctccgtgaaagaagtcaagatcatcacaaatcgcaccggcgtttctaaaggctacgggtttgtgtcttttgtgaatgacgtagatgtgcagaaaattgtgggtagtcagatccattttcatggcaagaagctgaagcttggccctgctataaggaaacaaaagctgtgcgccaggcacgtccagcctagacctctcgtggtgaacccaccccctcctccccagtttcaaaacgtttggcggaaccccaatacagaaacgtacctgcagccccagataaccccaaacccagttacacaacatgtgcaggcatacagtgcctacccccattcacccggacaggtaattactgggtgtcagctgctggtgtataattaccaggagtatcccacgtaccctgattcagctttccaggtgacgacaggctatcaactgcctgtctacaactatcagccctttccagcatatcctaggagccccttccaggttactgcagggtaccagctgcccgtctataactaccaagcctttcccgcttatcccaactcaccgttccaggttgccacagggtatcagttcccggtctacaattaccagccctttcctgcctatccttcttccccttttcaggtcaccgccggataccagttgccagtatacaactaccaggcgtttcccgcataccccaattcgccttttcaggtggctaccgggtaccagtttccggtctataattaccaggcgtttcctgcatatccaaacagcccagtccaggtgaccactggatatcagctgcccgtctataactaccaggcatttccagcttatcccagtagccctttccaggtcacgacagggtaccaactgccggtctataattaccaagcctttcccgcataccccaactcagccgtgcaagtgactacgggctaccaatttcatgtctacaactatcagatgcccccacagtgtcccgtgggagagcagagacgcaatttatggacagaagcttacaagtggtggtatctggtttgcctgatccagcgtcgtgactag

SEQ ID NO: 29708 - DNA, 1089 bp, synthetic construct
  source 1..1089: mol_type = other DNA; note = Synthetic coding sequence
atgttgaagaacaagggtcactccagcaagaaagacaatctggctgtgaatgcagtcgctttacaagaccacatcttacacgatctgcaattgcggaatttgtccgtggctgaccattcaaagactcaggtgcaaaagaaagaaaataaatcacttaaacgggatactaaagccatcattgacactggcttgaagaaaacaactcaatgcccgaaattagaagattcagaaaaagagtacgtgctggaccccaagccacctccattgactttggctcagaagctcggcctaataggtccccctccccctccactctcttcggatgaatgggagaaggtcaaacagcggtcactgctgcagggtgacagcgtccagccctgtcccatatgtaaggaggaattcgagctgcggcctcaggtactcttgtcctgtagccacgtgttccataaggcgtgcctacaggctttcgaaaagtttaccaataaaaagacctgtcctctctgccggaagaaccagtaccaaacgagagtgatacacgatggagcacggctctttagaataaaatgcgtgactagaatccaggcttactggagggggtgcgtggtccggaagtggtaccggaacttgcggaagaccgtacccccaaccgatgccaagttgcggaagaagttctttgaaaagaagtttacagagattagccacagaattttgtgctcttacaacactaacatagaggagctttttgcggagatcgaccaatgcctggcaatcaataggtctgtcctgcaacagttagaggagaagtgcgggcacgaaatcactgaggaagagtgggagaagatccaggttcaggcactgcgcagagagacacatgaatgtagcatctgcctcgctccattgtccgctgcagggggacagcgcgtgggggctggccgacgcagcagggagatggctctactttcgtgttctcatgtcttccaccatgcttgcttgcttgctctggaggaatttagcgtgggggaccgcccacccttccatgcctgtcccctctgtcggagctgttatcaaaagaaaatcctggagtgctag

SEQ ID NO: 29709 - DNA, 2130 bp, synthetic construct
  source 1..2130: mol_type = other DNA; note = Synthetic coding sequence
atggccgatgctggcatccgtagagtcgtgcccagcgacttgtaccccttggtactgggattcttaagggataatcagctgagcgaggttgcaaataaatttgctaaagccacaggggctactcagcaggacgctaacgcctcttcactgctggacatctactccttctggttgaaaagtgctaaggttcccgaaagaaagttacaggccaatggacctgtcgcaaaaaaagccaagaaaaaagctagttcttccgacagcgaggacagtagcgaggaagaggaggaggtccagggaccgccagctaagaaggcagccgtgcctgcaaagagagtgggactcccccctggcaaagcggctgcaaaggcttctgagagctcatcatcagaggagtccagcgacgatgacgatgaagaggatcaaaagaaacagcccgtgcagaaaggcgtcaagccccaggcgaaggcagccaaggcgcctccgaaaaaggctaagtcctcagatagcgacagtgatagctccagcgaagacgaaccgccaaagaaccagaaaccaaagattaccccggtcactgttaaggcccagacaaaggctcccccaaaacccgctcgagccgctccaaagatagccaacggaaaggccgctagctcttcttcctcttcatctagcagttcatcttctgacgactctgaggaggagaaggcggcagccactccaaaaaaagtgtggacaatcacttccgtgcgtgccgagactgtaccgaagaaacaggtagttgcaaaagctcctgtgaaggctgcgaccaccccaacccgaaagtctagttcttcagaggattcctccagcgatgaagaagaagagcagaagaagccaatgaagaacaagcctgggccttatagtagcgtgccaccacctagtgcccctccaccaaagaagagtttgggtacccagccccctaaaaaagctgtcgagaaacaacagccggtcgaatctagcgaggactcatccgatgaatcagattcaagttctgaggaggaaaagaaaccccctacaaaggccgtggtttccaaggccaccaccaaacccccacccgctaagaaggctgccgaatccagctctgattcctccgattcagacagctccgaggacgacgaggccccatccaagccagccggaaccaccaaaaactcgagcaataaaccagcagtcacaacaaaatcacccgctgtgaagcctgccgcagcaccaaaacaacccgttgggggtggacagaaacttttgactaggaaggcagactcgtcctccagtgaagaagagtcttctagttctgaggaggagaagacaaagaaaatggtggctacaaccaagcctaaggctaccgcaaaagctgccctgagtctgcctgccaaacaggcaccccaaggctcacgcgactcctcaagtgactctgattcctcctcgagcgaggaggaggaagaaaagactagtaagtccgcagtgaagaaaaagcctcaaaaggtcgcaggaggagccgctccttcaaaacccgcatccgctaagaaaggcaaagctgaatcatccaattctagttcatctgatgatagctccgaagaggaggaggaaaagctaaagggcaagggctctccacgccctcaggctccaaaggctaatgggacatccgcacttaccgctcagaacggaaaggccgcaaagaactctgaggaggaggaagaagagaagaagaaagccgctgtggtggtgagcaagtctgggagcctcaagaagagaaagcagaatgaagcagcaaaggaagccgagaccccacaggccaagaaaatcaagctccagactcctaacactttccccaaacggaaaaagggggagaagcgggctagtagccctttccggagggtacgcgaagaggagatcgaggtagattcccgcgtggcagataatagttttgacgcaaaacgcggagccgctggggattggggggagcgtgcaaaccaagtgctgaagtttaccaagggcaagtctttcagacacgagaagacaaagaaaaagaggggcagctataggggcggtagcataagcgtgcaggtgaactccatcaaatttgactcagaatag

SEQ ID NO: 29710 - DNA, 558 bp, synthetic construct
  source 1..558: mol_type = other DNA; note = Synthetic coding sequence
atgcagcagaagagccaaaagaaagcggagctgctggacaacgagaagcccgcagctgtggttgcccctatcactaccggctacacagttaaaatctcaaactacgggtgggatcagtccgacaagttcgtgaaaatctacatcacgctgaccggagtccaccaagtacccaccgagaatgtacaggtgcactttactgagaggtcattcgatctgctggtcaaaaatttaaatggtaaaagctactccatgattgtcaataacctgttgaagccgatttccgtggaagggtcaagcaagaaggtgaaaaccgacacagtgctgatcctgtgccgtaaaaaggtcgagaataccaggtgggattatttgacacaagtggagaaagagtgtaaagaaaaggaaaagcctagctatgacacagagacagatccatcagagggcctgatgaacgtgctgaaaaagatctacgaggatggcgacgacgatatgaaaagaaccataaacaaggcctgggtggagtcacgagaaaagcaggcgaagggagatactgagttctag

SEQ ID NO: 29711 - DNA, 1764 bp, synthetic construct
  source 1..1764: mol_type = other DNA; note = Synthetic coding sequence
atggccagcgaggatatagctaagctggctgagacactggccaaaacccaagtcgcgggtggccagctcagcttcaaagggaaatctctgaaattaaacactgccgaggacgcaaaagatgtcataaaggaaattgaggacttcgactctcttgaggcacttaggctggagggcaacaccgtgggagttgaagcggcaagagtcatcgccaaagctctggagaaaaagtctgagcttaaacgctgccattggtccgacatgtttaccggcaggttacgcacggaaatccctccagctctgataagcctcggcgagggactgatcaccgccggagcccagctggtcgagttagatttaagtgataatgcgttcggacccgatggtgttcagggcttcgaggcgctgctgaagtcatcagcttgtttcacattgcaggagcttaaactgaataattgcggaatgggaattggtgggggaaagattcttgcagccgcattgactgagtgtcatcgtaagagttctgcccagggaaagcccttagctcttaaggtatttgtcgcagggagaaacagactcgaaaatgacggggcaactgcccttgcagaggccttccgggtgattggaacactggaggaggtgcacatgccccagaacggaattaaccacccaggcattacagcactggcacaggctttcgccgtgaaccctttacttcgggttattaatttgaacgacaatacgttcactgagaaaggcgcagtggcaatggccgaaacgctgaagaccctgcgccaggttgaggtgatcaattttggagattgtttggtacggtccaagggggctgtggctatagccgatgcgattagagggggattgcccaaattaaaggagctaaatctgagcttctgcgagattaagagggatgctgccctggcagtagcagaagctatggcagataaggcggagctggagaagcttgatttgaatggcaatactctgggcgaagaaggctgtgagcaattgcaggaggtcctcgagggtttcaacatggcaaaggtcttggcgtcattgagtgatgatgaggatgaagaagaggaggaggaaggtgaggaagaagaggaggaagcagaagaggaagaggaggaggacgaggaggaagaggaggaggaggaagaagaagaggaggaagagccacaacaaaggggacaaggagagaagtctgccaccccctcgagaaagatcctggaccccaacaccggcgaacccgctccagtcctttcctccccacctcccgcagatgtgagtacattcctcgccttcccgtcgcccgagaaactactccggctcggcccaaaaagctccgtgcttatagcgcagcaaacagacaccagtgaccctgagaaggtggtgtcggccttcctgaaagtgtccagcgtgtttaaggacgaagcaaccgtgcgaatggccgttcaagacgctgtcgacgccttaatgcaaaaggcgtttaatagcagttcctttaactccaacactttcctcactaggttactggtccatatgggcctgctgaagtccgaggataaagtgaaagctattgccaatttatatggacccctcatggccttgaaccatatggtgcaacaagactatttcccgaaagcccttgccccactgctgcttgcctttgtgaccaaacccaattctgccttggaaagctgtagcttcgcaagacactcccttctacagacactctataaggtatag

SEQ ID NO: 29712 - DNA, 1098 bp, synthetic construct
  source 1..1098: mol_type = other DNA; note = Synthetic coding sequence
atgaaggagctgtggtgcgtgatggattgggctgttcctggtctgctaggcagtgggacatacttcaaaaagcaattttctgaccccgtagagcatggtcagagacataccgccaccaagagagagctggccaccgggagaaaggccatgcagcgccttgctaaaaagatgagcgggtggtttctgcggagaactaagacgttgatcaaggaccagttgcctaaaaaagaagaccgcatggtctattgctctttgacagattttcagaaagctgtttatcagacggtgctggaaaccgaggatgtgaccctgattttgcagtcaagcgaaccctgcacatgccgaagtggtcagaaacggaggaactgctgttataaaaccaatagccacggtgaaaccgtcaaaaccctgtacctctcctacctgaccgtgttgcaaaaagtagccaatcacgtggcactcctacaagccgcaagcacaagtaaacaacaggagacattgatcaagagaatctgcgaccaggtcttttctagatttccagatttcgtgcaaaaaagtaaagatgccgcttttgaaactctctctgatcccaagtatagtggcaaaatgaaggtgctgcaacagctgctgaatcactgcagaaagaacagggataaggtactcctcttttcattctccacgaagctgttagacgtgctgcagcagtactgcatggccagtggcctggattaccggcgactggacggttcaaccaaatcagaagaaaggctgaaaatagtcaaagaattcaatagcacccaggacgttaacatctgtctggtctctactatggcagggggacttggtttaaatttcgttggagcaaatgttgtagttctgtttgacccaacctggaatcccgcaaacgacctgcaggccatcgacagaacccagactcactgtagaagagagcgagacgctgaaccgctttcgtcagctcctgggctacaaaacgggagcgagaatgctgttccctacccttggtggtgttgcgtaactggtgcatcaatttcctgttggagatgtgaaatctgtcgcatccaggatgtgctggagtag

SEQ ID NO: 29713 - DNA, 1104 bp, synthetic construct
  source 1..1104: mol_type = other DNA; note = Synthetic coding sequence
atggaaaagaagaaaatggtgacacagggcaatcaggaacctacaaccacccctgatgccatggtgcagccatttaccacaatcccttttcctcccccaccccaaaacggcattcccacagagtatggcgtgccacacacgcaggactacgccggacagacgggagaacataacctcaccctgtatggttcaacccaggcccacggggagcagtcctcgaatagtccttccacccagaatggaagcctgactcagacagagggtggcgcacaaaccgacgggcaacagagccaaacccagagtagcgaaaactctgagtccaagtcaacgcccaaacggctccacgtatcaaacattccttttagattccgagatccagatctgcgtcagatgtttggacagttcggaaagatccttgatgtggaaatcatcttcaacgaaaggggctccaaagggtttggattcgtgacttttgaaaatagcgccgatgcagatagggcccgtgaaaaactccacggtaccgttgtggagggaagaaagattgaggtgaacaatgctactgcaagggttatgactaataagaaaatggtaacgccatacgctaatggatggaaattaagtccagtagtgggggctgtttatggcccagaactatatgctgcttcgtctttccaggctgatgtgagtttagggaacgacgccgctgtcccactgagcggcagggggggtattaacacttatataccccttataatcccaggatttccatacccaacggcagccaccactgcggctgccttccgcggtgcacatttacgtggaagaggaagaactgtatatggcgctgtccgggctgtaccacccacagccatccctgcataccctggagttgacatgcagcctaccgatatgcactcacttctactacaaccgcaacccccacttctgcagcccctgcagcccctgactgtcacagttatggcgggttgcacacagccgactcccacgatgcctctgccactgcctctcgccatggagctggctctttggagggtgtacacggaggtagccaccgcggacctgccaccaacagaggttacttag

SEQ ID NO: 29714 - DNA, 1764 bp, synthetic construct
  source 1..1764: mol_type = other DNA; note = Synthetic coding sequence
atggcaagcgaagacattgcaaagcttgcagagaccctcgccaaaacccaggttgcaggcggtcagctaagttttaagggcaaatctctgaagctgaataccgccgaagacgccaaagacgtgataaaggaaattgaggatttcgattctctggaagcactgaggttggagggcaatacagtaggagtggaggcagcacgggtcatagccaaggccctggagaagaagtctgagctcaaacggtgtcattggtctgacatgttcaccgggaggctgcggacagaaatccctcccgctttaatcagcctcggcgaaggtttgattaccgccggagcccagctggttgaacttgatttgtccgacaacgccttcggacccgacggtgtgcagggcttcgaagcgctgctaaaaagttccgcctgtttcaccctgcaggaattgaagctaaataactgcggtatgggtatcgggggtgggaaaatcctcgcagccgcacttacagaatgtcatcggaaaagctccgcgcaggggaaacctctggccctgaaagttttcgttgctgggcgaaatagacttgagaacgatggggctaccgccctggccgaggccttccgggtgattggcacgctcgaagaagttcacatgccacagaacggcatcaatcaccctggtattacagccctggcccaggcatttgcagtaaacccattactgcgtgttataaacctcaacgacaatacattcactgaaaaaggagcagtagcaatggcagagacacttaagaccctccgccaagtggaggtgatcaatttcggcgactgtctcgtgaggtctaaaggggctgtggccatcgcagatgccattcgcggagggctcccgaagctcaaggagctgaatctttctttctgcgaaattaaacgggacgccgctttagctgtggccgaagctatggcagacaaagcagaactggagaagttggatctgaacggaaataccctgggcgaggaggggtgtgagcagctgcaggaagtgctggaaggcttcaatatggctaaggtactagctagtctctctgatgatgaggacgaagaggaagaagaggagggagaggaagaagaagaagaggctgaagaggaggaggaggaggacgaagaagaagaagaggaagaggaggaagaggaggaggaagaaccccagcagaggggccaaggcgaaaagtccgctactccctctcgaaaaatcctggatcccaacactggagaacccgcaccagttcttagtagcccgcctcctgccgacgtgagcacattcctcgctttccctagccccgagaagttgctccgcctgggtcccaagtcctccgttctgattgcacagcagacggatacctctgaccctgagaaggtggtgtcagcattcttgaaagtctcctccgtatttaaagacgaggccacagttaggatggctgtccaagatgccgtggacgcactaatgcagaaggcgttcaactctagctcctttaactcaaataccttccttacacgccttctcgtgcacatgggactgcttaagtctgaggataaggtgaaggccatcgccaacctgtatggtcctcttatggccctgaaccatatggtgcagcaggattacttccctaaagctctcgccccactactgctggcctttgtaactaagcctaacagtgcgctggaaagttgcagtttcgctagacactcccttttacaaaccttgtataaagtctag

SEQ ID NO: 29715 - DNA, 1143 bp, synthetic construct
  source 1..1143: mol_type = other DNA; note = Synthetic coding sequence
atggacgccgcaactttgacttatgataccttaaggttcgcagaattcgaggactttccagagacaagcgaacctgtgtggattctcggacgtaaatattcaatatttacggaaaaagacgagatcttgagtgatgtggcatctaggttatggtttacctacagaaaaaattttcccgctatcgggggaacaggccctactagcgacacaggttgggggtgcatgcttagatgcggacagatgatctttgctcaggctttggtttgcagacatcttggcagggattggcgttggacccagaggaagcgacagccggacagttatttttccgtccttaacgcctttatagataggaaggactcatactatagcatacatcagattgcccagatgggggtgggcgagggcaaaagtatcggccaatggtatggtccgaacactgtcgcccaggtgctaaagaagctcgcggtatttgacacctggtcatctttagctgtccacattgcaatggataatacagtagtgatggaggagatccgacgattgtgcaggacctccgttccatgcgcgggtgccacagcctttcccgctgacagcgaccggcattgcaatgggtttcccgcaggggctgaggtgacaaatcgaccctccccatggagacccctcgtgctgctgattccactgagacttgggcttactgatataaatgaggcgtatgtggagacattgaaacactgcttcatgatgccccagtctctgggtgtcatcggaggaaagccaaatagcgcccattattttattggatacgtcggggaagagctgatttacttggaccctcacacgactcagccggctgtcgaacccactgacggctgcttcatccccgacgagtcattccactgtcagcaccccccttgccgcatgtcgatagcagaattagatccttcaattgcggtgggctttttctgtaaaaccgaagacgattttaacgactggtgtcaacaggttaaaaagctgagtttattagggggagcactccccatgttcgagctggtggaacttcagccctcccacctggcctgccctgatgtactgaacctcagtctgggcgaatcttgccaggtccagatcttgttaatgtag

SEQ ID NO: 29716 - DNA, 2124 bp, synthetic construct
  source 1..2124: mol_type = other DNA; note = Synthetic coding sequence
atgataccacctcaggaggcgtccgcacgaaggcgcgagattgaagataaactgaaacaagaggaggagaccctgtcgtttattcgagattccttggagaagtctgatcagctgacaaaaaatatggtcagtatactctcctcattcgaatctcgtctcatgaaattggaaaacagcatcatacccgtacacaagcaaactgaaaacctgcagagattgcaggagaacgtagagaaaactctgtcctgcctggatcacgtcattagctactaccacgtggcatctgatacggaaaagataataagggaaggaccaacaggcagactcgaagaatacctgggaagtatggccaagattcaaaaggccgtggaatacttccaggacaactcacccgattccccagagctcaacaaggttaagctgctcttcgagcggggaaaggaagccctggagagcgagtttcgcagtctcatgacccgccactcaaaagtggtcagcccggtcctaatactggatttgatctccggtgacgacgacctggaggctcaggaagatgttactctggagcacctgccggagtcagtgctgcaagatgtcatccggattagtcgatggcttgttgaatatggcagaaatcaagacttcatgaatgtctactatcaaatccggtctagccaactagaccggtccatcaaaggtctaaaagaacactttcataagtcatcctcttctagtggggttccgtattcaccagcgatccctaataaacgtaaagacactcccaccaagaagcctgttaagcgccctggtacaatcagaaaggcgcagaatttgctcaaacagtactcacagcatggcctagatggaaaaaagggcggtagtaacctgatccccttggaaggccatgaacacgattttcgcgtcaaacatctcagcgaagctcttaatgacaagcacggtccattggcgggaagagatgacatgttggacgtcgaaactgatgcttatatacactgcgttagcgcgttcgtgaagttagcccaaagcgaatatcagctactcgcagacatcattcctgaacaccaccaaaaaaagacgttcgactcattaatccaggatgccctcgatggactgatgctggagggggaaaacatcgtctccgcggctcgaaaagccattgtgcgccacgacttttccacggtgctgacagtgtttccaatcctgagacacttgaagcagaccaagcccgagtttgatcaggtattgcagggtacggccgctagcaccaaaaacaagctcccgggtcttattacgtctatggagacgatcggagccaaggctcttgaagacttcgcagataacattaagaacgatcccgataaggagtataacatgcccaaagatggcaccgtgcacgaactcacttccaacgccatcctgtttctgcagcaactcctcgactttcaagagaccgcgggagcaatgctggcctctcaagagacgtcctcttctgctactagctattctagcgagttctctaagcggctgctatccacatacatctgcaaggtcctggggaacctgcagctcaatctactgtccaagagtaaggtctacgaagaccctgcactctccgcaatttttctgcacaacaattataattatatactgaagagtctggagaaaagcgaactgatccaactggttgctgtgacacagaagaccgcggaaagatcatatagagagcatattgaacagcaaatccagacataccaacgctcctggcttaaggtgacagattacatcgcagagaagaacttgcctgtttttcaacccggagtgaaactgagggacaaggagagacagataatcaaagaacgttttaagggcttcaatgatggtctcgaagaactctgcaaaatacagaaagcatgggctatcccagacaccgagcagcgggatcgtattaggcaggcccaaaagaccatcgtgaaagagacctacggggcattcttacagaagttcggctccgttcctttcacgaagaacccggagaagtatataaagtacggcgtggagcaggtgggggacatgatcgatagactgtttgatacatctgcttag

SEQ ID NO: 29717 - DNA, 1026 bp, synthetic construct
  source 1..1026: mol_type = other DNA; note = Synthetic coding sequence
atggcccaggaatcccccaagaacagcgcagccgagattcccgtcactagcaacggtgaagtagacgattccagagagcacagtttcaatagggatttaaagcacagtcttcccagtggattgggtctctcagaaacacaaattaccagccacggatttgacaacacgaaagaaggagttatcgaggccggagcctttcagggcggacaaagaacgcagaccaagagcggacccgtaatactagccgatgaaatcaagaacccagcaatggaaaagcttgaactggtacgtaagtggtctttaaacacctacaaatgcacacgccagatcatttccgaaaagttgggcaggggctctagaactgttgatctagaactcgaagctcagatagatatcctgcgagacaacaagaaaaaatacgaaaatatattgaaactggcacagacgctgtcaacgcaactgtttcagatggtgcacacacaaaggcagttaggagacgcctttgccgatctgtcacttaaaagcttagaactgcatgaagaattcgggtacaacgccgacacacagaagttgcttgccaagaacggagaaaccctactcggggcaatcaatttcttcatcgcaagcgtcaatacactggttaataaaaccatcgaggacactcttatgacggtgaaacagtatgagtctgcacgcattgaatacgacgcatatagaacggacctggaggaactgaatttgggacccagggacgctaataccttgcctaagattgagcagtcccaacatctgtttcaggcccataaggagaaatacgacaaaatgagaaatgatgtgtccgttaagttaaagttccttgaagagaataaggtcaaagtcctgcataaccaactcgttctgttccacaatgcaatcgcagcatactttgcgggtaatcaaaagcaactggagcagacgctgaagcaattccatatcaagttgaaaacacccggagttgatgcccctagctggttagaagaacagtag

SEQ ID NO: 29718 - DNA, 1488 bp, synthetic construct
  source 1..1488: mol_type = other DNA; note = Synthetic coding sequence
atggcaggggttggtcgttcagggggtccgtgggggagaacacgaggaggtagatccggccgtctgggtgtctccctgggggctctgagtagcctcccgctggaggagcttcccagacctctatgttgtcgcagatgcaggcggcactttgggtttgctttacggggagagacaatcccagtctcggtcgccggttcagcgtcctcacagttcgccccactggccctgcacctttctctcctgctcagcagaatttctgcctcccgcttgacacgctggcctcctcccgataaaagagaagggagtgcagtcgaccccggaaagaggcggtctctcgcagcaactcccagcagcagccttccttgcacactgatcgctctcgggctcaggcatgagaaagaagccaacgagctcatggaggatctttttgagacctttcaggacgaaatgggttttagtaacatggaagatgacggtcccgaagaggaagagagggtcgccgagccccaggccaacttcaatacacctcaggctttgagattcgaagaactgctcgctaacttacttaatgagcaacatcagattgccaaggagctgtttgaacaattaaaaatgaagaaacccagtgcaaaacagcagaaggaggtagagaaggttaagccacagtgcaaagaagtccaccaaactctgatcctagatcctgcccagcgcaagcggctgcaacagcaaatgcagcagcatgtccagctgctgactcagatacatcttctggcaacttgcaacccaaaccttaatcccgaggcttcttctactcgcatctgcctcaaggagcttggcacattcgcccagtcaagtatagcactgcaccaccagtacaacccgaagttccagactctcttccaaccttgcaacctcatgggcgcaatgcagctgatcgaagatttttccacccatgtgagcatcgactgctctccccacaagacggtaaaaaaaacagctaacgaattcccttgcctccccaagcaagtagcctggatcttagccacctccaaagtctttatgtaccccgagctgctaccggtctgctctctgaaggctaaaaacccacaggacaaaattctgttcacaaaggccgaggacaacctgttggccttggggctcaagcattttgagggaacggagtttctgaaccccctcatttcaaagtacctgttaacctgtaagaccgcaagacagctcactgtgcggatcaaaaaccttaatatgaacagggccccagataatattattaagttctacaagaagactaagcaactacccgttctcggcaaatgttgtgaggagatacagccccaccagtggaagccccctatagaaagggaagaacaccggttacccttttggctgaaggtgcagccatcatcctccaaaagcgtagggggacgaaggagtttaaaagtgctccgggagtatcagggactcccttag

SEQ ID NO: 29719 - DNA, 180 bp, synthetic construct
  source 1..180: mol_type = other DNA; note = Synthetic coding sequence
atggctgctccgggtgccttgctcgtaatgggcgtgtcagggtccgggaattgggatggcaattccatgatgttaatgattattactagaagaaagattgagggccgatgggaaaaggcctatcgatctatgacccggaccggctttcatgggtcggttacttgtatgactttctactag

SEQ ID NO: 29720 - DNA, 207 bp, synthetic construct
  source 1..207: mol_type = other DNA; note = Synthetic coding sequence
atgggcgagaccgaggggaagaaggatgaggccgattataagcgcctgcagacgttccctctagtccggcacagtgacatgcccgaggagatgcgtgtcgagaccatggagctttgtgtcaccgcatgcgaaaaattttccaacaacaatgaagtactcccggcagtacaggctgccccaagagctttcgatggcccttgcgggtag

SEQ ID NO: 29721 - DNA, 2451 bp, synthetic construct
  source 1..2451: mol_type = other DNA; note = Synthetic coding sequence
atggtattaatgttccagattcgctatatttctcagacccagggactcccagcggagtatctcctttctgcgggaacaaagacaactaggtttttcaatagggatcccaatctcgggtacccgctttggcggctgaaaacgccagaggaacatgagctggagactggaattaagagcaaggaggcccgaaagtacattttcaactgcttggacgacatggctcaggtgaacatgtcaaccgacttggagggtacagacatgctggcagagaaagccgacaggagagaatacattgatttgttgaaaaagatgcttacgattgacgccgataagcgcattacaccacttaaaaccttgaatcatcagttcgtgacgatgactcacctgctggactttccacactcaaatcacgtaaagtcctgctttcagaacatggagatctgcaagagacgggttcatatgtacgataccgtgtctcaaattaaatcccccttcaccactcacgtggctcctaatacttctaccaatctcaccatgagtttctctaaccagctcaatacagtgcacaatcaggcttctgtgctggccagttctagcaccgcagccgcagctaccttatccctcgctaattccgacgtcagtctccttaactatcaaagcgccctttacccaagttcagccgcacccgtgcccggagtggcgcagcagggcgtatctcttcagcctggcaccacacagatctgcactcagacagatccgtttcaacaaacattcatagtgtgtccacctgcgtttcagacgggccttcaggccactaccaagcatagcgggttcccagttcggatggacaatgccgtgcctattgtccctcaggcacccgctgctcagccattacaaatccagagtggagtgttaacccagggatcatgcacacccctgatggtggccactctacacccacaggtggccacaattacgccacagtacgcagtccccttcacgcttagttgtgctgcagggagacctgcactggtcgaacagactgctgcagtcctacaagcttggcccggtgggactcagcaaattcttcttccctctacttggcaacagctgccaggcgttgctctgcataacagcgtgcagcccacggcaatgattccagaagccatggggagcggacagcagttggccgactggcgcaatgcccattcccatggcaatcagtactctactatcatgcaacagccttccctgctgacaaaccatgtcaccctggccaccgctcagcccttaaatgttggtgtggcccatgtggtgcggcagcagcagtcttcaagcctcccctccaagaaaaataagcagtctgctccagtgtcatccaagtcctctctggatgttctgccgagccaggtgtactctctcgtcggaagttctcctctcaggaccacatcaagctataacagcctcgtgcctgtccaggaccagcaccagcccatcataatccccgacactccttctccgccagtgtctgtcattacaatcaggtctgacaccgatgaagaagaggataataagtacaagcctagctcttcaggactgaaacccagatccaacgtgatttcttacgtgacagttaacgactcccccgatagtgattcatccctatcttcaccttatagcacagacactctgtccgcgttgaggggtaacagcggatcagtgctggaaggtccagggagggtcgtggcagatggaaccgggactcgcacaattatcgttccacctctcaagacccagctgggcgactgtactgtggcgacgcaagcttccggtctcctgagcaacaaaacaaaacctgtagccagcgtttctggacagtcttcagggtgctgtatcacaccaactgggtacagggcgcagcgcggtgggacaagcgccgctcagcctctgaatctgtcccagaaccagcagagttctgctgcaccgacaagccaggaaaggagctcaaatccagcccctcgaagacagcaggcattcgtggcccctctgtcccaggctccgtacacgttccagcacggctcccctctgcacagtactgggcatccccatctagcacccgcacctgcacaccttccatcccaggcccacctgtatacctacgccgcaccaacctccgcagccgcattgggttcaacctcctcaatagcccatctgttctctcctcaagggagcagcaggcacgccgcagcgtataccactcacccctcaaccttggtgcaccaggtcccagtatctgtgggcccttcactcctgactagtgcatcggtggctccggctcagtaccagcaccagtttgccacgcaatcctatatcggatcttctcggggatcaacgatttacactgggtaccccttgtctccgaccaagatttcccagtattcttacctgtag

SEQ ID NO: 29722 - DNA, 1119 bp, synthetic construct
  source 1..1119: mol_type = other DNA; note = Synthetic coding sequence
atggacgtgctgtccccactgagcttcatcaaagtgtcacacgtgcgtatgcagggaatcctcctgttagtgttcgcaaagtaccagcatctcccttatatacagattctctcaactaagtcgacacctacgggcttattcggttattggggcaataaaggtggggttaatatctgtcttaaactctatggttactacgtctctataattaactgccatttgcctcctcacatctctaataattaccagagactggaacactttgatcggatcctcgaaatgcagaactgtgaaggcagagatatccctaatatcctcgatcacgacctgattatttggtttggtgatatgaacttcagaatcgaggattttggcctgcattttgtcagggagtcaatcaaaaatcggtgctatggaggactgtgggagaaggaccaactgagtattgccaaaaagcacgatccattgttacgagaattccaggaaggcaggctcctgttcccaccaacttataaatttgacagaaacagcaacgattatgacacatcggagaagaaaagaaagccggcttggactgacagaattttatggaggcttaagagacagccttgtgcaggacctgataccccaatacctcccgcaagccatttctcactgtccctgaggggctactcctctcatatgacatatggcattagtgaccataagcctgtctctgggacctttgacctagagctgaaacccctggtgtccgcgccattaatcgtgctgatgcccgaggacctgtggacggtagagaacgacatgatggtgtcctactccagtacctcagatttcccctcatccccttgggactggatcggcctgtataaggtgggtctccgggatgtcaatgattatgtctcttacgcctgggtaggcgacagcaaggtcagttgctctgacaatctgaatcaggtgtacatcgatatttccaacataccaacaactgaggacgagttcctgctatgctactactccaatagcctgaggtctgtagtcgggatctctaggccatttcagatccctcctggctctctgcgggaggaccccctgggagaagctcagcctcagatctag

SEQ ID NO: 29723 - DNA, 480 bp, synthetic construct
  source 1..480: mol_type = other DNA; note = Synthetic coding sequence
atgataccaccacaggaggctagtgcccgtcgtcgggaaatagaggacaagctgaagcaggaggaggaaaccctctcgtttattcgcgattcgctggaaaaatctgaccaactcaccaagaatatggtgagcatcctgtccagtttcgaatctagactaatgaagctggagaactctatcattcctgtacacaaacagacagagaacttacaacggctccaggaaaatgtggaaaagacgctctcgtgtttagatcacgtcatttcctactaccatgtggcttctgatacggagaaaattatccgagaagggcctacgggtagactcgaagagtatctcggaagcatggcaaagattcaaaaagccgtggagtattttcaggacaattcccctgactctcctgaactcaacaaggtggtccgtggaccacagaataacgtgcgctccttgggcatctctgtctccgctctggtgagctag

SEQ ID NO: 29724 - DNA, 243 bp, synthetic construct
  source 1..243: mol_type = other DNA; note = Synthetic coding sequence
atggctagcgaagaactgcagaaagacctggaggaggtgaaagtgctgctggagaaagcgaccaggaagcgtgtgagagacgcactgacggcagaaaaatctaagattgaaaccgaaatcaagaacaaaatgcagcaaaagtctcaaaagaaggctgagctactcgataatgagaaacccgctgccgtagtcgctccaattacaaccgggtacacggatggcatcagccagataagcctctag

SEQ ID NO: 29725 - DNA, 606 bp, synthetic construct
  source 1..606: mol_type = other DNA; note = Synthetic coding sequence
atgccctctgagacgctatgggagatcgccaaggctgaggtggaaaagcgaggcatcaacgggtcggaaggcgatggtgctgagattgctgagaaatttgtcttcttcatcggctccaagaatggagggaagactaccataattctgagatgccttgatagagatgagcccccaaagcctactctcgcacttgaatatacttatggaaggagggcaaagggccataacacccctaaagacatcgcacacttttgggaattgggaggcggaacatctctcctggatctgatctccatccctataaccggggacactttacgaacattctctctagttctggtcctcgatctgtctaaacccaatgatttgtggccaactatggagaatttgctgcaggctacgaaaagccacgttgacaaggttatcatgaagttggggaagacaaacgccaaagctgtgtctgagatgcgccagaagatctggaataatatgcctaaggaccaccctgtatcctgttgcctgggtctgctgcttgaatccctcgttccatttatcgttaatgataacattactaataattttttcaggttcttatgcatgacgtag

SEQ ID NO: 29726 - DNA, 1401 bp, synthetic construct
  source 1..1401: mol_type = other DNA; note = Synthetic coding sequence
atgagttacaggccagtcgtctctccagtcatgagcctcactagacggtgtatgcgaagcaggactagcatgaggactgacgcggtgttcctgatcctctacaaagaactctattaccgacacatctacgcaaaggtgtcagggggtccttcactcgaacagcgatttgagtcctattacaattactgtaatctgtttaattatatcctaaacgcagacggcccagcgcctctcgaactgcctaaccaatggctctgggacataatagatgaatttatataccagttccagtcgtttagtcagtatcgctgcaagactgccaagaaatctgaggaagaaatcgattttctgcggagcaatcctaagatctggaatgtccattccgtgctgaatgtccttcacagcttggtagataagtcaaacatcaatcggcagctggaggtgtacacaagtggcggagaccctgagagcgtagcgggagaatatggcagacacagtttatacaagatgctgggttattttagcctggttggactgctgagactgcactccttattgggggactactaccaggccattaaagtattggagaacatcgaacttaacaagaaaagtatgtactctcgggtacctgagtgtcaagtgacgacttactattatgttggcttcgcttatctcatgatgcgcagatatcaggatgctatccgagtattcgcgaacatactgctgtatattcagcggaccaagtccatgttccagagaacaacttacaaatacgaaatgattaacaaacagaacgaacagatgcatgcattgttggctatcgccctcactatgtatcccatgagaattgacgagtccattcacctgcagctgagagaaaagtacggggataaaatgttgagaatgcagaagggcgacccccaggtgtacgaagagctgttcagttatagctgccccaaattcctctctcctgtcgtccccaattacgataacgtgcacccgaactaccataaggagcccttcttgcaacaattaaaagtgttttcagatgaagtgcagcagcaggcccagctttcaactatccggtctttcctcaagctgtataccaccatgcccgtcgctaaacttgctggatttctggacctcaccgagcaagaattcaggatacagctgctcgtttttaagcacaaaatgaaaaatctggtgtggaccagcgggatatcagccctagatggggagtttcaaagcgccagcgaggtggatttctatatcgataaagacatgatccacatagctgacacaaaggtggccagacggtacggagatttttttataaggcagatacacaaattcgaggaacttaatagaactctgaaaaaaatgggacaaaggccgtag

SEQ ID NO: 29727 - DNA, 597 bp, synthetic construct
  source 1..597: mol_type = other DNA; note = Synthetic coding sequence
atgagccgtgccgtgaccattgccgaggccttttgtcacatacttttccggattataagtgagatcctgatgagaatgctcgaagagcaatgcttgtttcctctgccggagccccaggatctgtttcaggccagccagatgaaatttgaagactttcagaaagacctcagaaagctaaaaaaggacctcaaggcttgcgaggtcgaggcaggtaaggtctatcaggtgagctctaaagaacacatgcaacctttcaaagagaacatggagcaatttattatacaggccaagattgaccaagaggccgaagagaactcactgacagaaacacacaagtgttttctcgagacgaccgcctacttctttatgaagccgaaactgggtgagaaagaggtctcacctaacgcttttttctctatttggcatgagttctcatccgacttcaaagatttttggaagaaggagaataagcttctgctgcaggaaagggttaaggaggccgaagaagtgtgccgccagaaaaaaggcaagtccttatacaagatcaaacccagacacgactcaggcataaaggccaagatctctatgaagacatag

SEQ ID NO: 29728 - DNA, 441 bp, synthetic construct
  source 1..441: mol_type = other DNA; note = Synthetic coding sequence
atggagcctacacgggactgtccgctgttcgggggtgccttcagtgccatattgccgatgggcgctattgacgttagcgacctgagacccgtcccggataaccaggaagtgttctgtcaccctgtgactgatcaaagcctgatcgttgagctcttggaattgcaggctcacgtcaggggagaggcggcagctcgatatcattttgaagacgtcggcggagtgcagggtgcaagggccgtccacgtggaaagtgtacagcctctgagcctggaaaatctcgccctgagaggtcgatgtcaggaggcgtgggttctgtccgggaaacaacagattgctaaggagaaccagcaagtggccaaggatgtgactctgcatcaagcccttctgagattaccgcaataccaaactgacctgttactgaccttcaatcagcctccctag

SEQ ID NO: 29729 - DNA, 1584 bp, synthetic construct
  source 1..1584: mol_type = other DNA; note = Synthetic coding sequence
atgtcactgtgtggagctagggccaatgccaagatgatggcggcttacaacgggggtacatcagcagcggcagcgggacatcaccaccatcatcaccaccacctacctcaccttccacccccacatctacatcaccaccaccatcctcagcaccatttgcatccgggaagcgctgcagcggtccatcccgtacagcagcatactagctctgcagccgctgctgccgcagctgccgctgccgctgcagctatgctgaatcccggtcaacaacaaccttactttccttctcccgctccagggcaggcccctggtcctgcagcggctgctccagctcaagtgcaggcggctgccgcagcaactgtgaaggcccaccatcatcaacactcccatcatcctcagcagcagctggacatcgaaccggatagaccgatcggatatggggcatttggagtggtttggtccgtaacagatccccgagacggcaaaagagtcgcactgaaaaagatgcctaacgtttttcagaacttagttagctgcaagagagtgttcagggaacttaaaatgttgtgtttttttaaacacgacaatgtcctttcggctttagacattttacagccacctcacattgattattttgaagagatctatgtcgttacagagctgatgcagtccgacctgcataagatcatcgtttccccccagcccctgagctccgaccatgttaaggtgttcctgtatcaaatcctgcggggtctcaagtacctccactctgccggaatcctgcatcgcgacatcaagccaggcaacctgttggtgaactctaattgcgttctcaagatctgtgacttcggactggctcgcgtggaagaattagacgaaagccggcacatgacccaggaggtggtgacacagtattatcgtgccccagagatcttgatgggctctagacattactccaacgctatcgatatctggtctgtcggatgtatctttgccgaattactggggcgtcggatcctcttccaggcgcaatcccctatccagcaacttgacctgataaccgatttgctaggtaccccctcactggaggcaatgcggacagcgtgtgagggggcaaaggcccatattctgagagggcctcacaaacaacctagcctcccagtgctgtacacactgagctctcaggccactcacgaagcagtgcatctgctttgccgtatgcttgtttttgacccatcaaagaggatcagtgccaaggacgccctagcccatccgtatctcgacgaaggcagattgagatatcacacctgtatgtgcaaatgttgcttcagtacgagcaccgggcgtgtctacacctctgatttcgaacctgttacaaaccccaagtttgacgataccttcgaaaaaaacctgtcttcggtgagacaagttaaggagatcattcatcagttcattctcgaacaacagaagggcaaccgcgtgccgttatgcatcaacccacagagcgcagctttcaagagtttcatctcatccactgtggcccagccaagtgagatgccaccgagccccctggtgtgggagtag

SEQ ID NO: 29730 - DNA, 2742 bp, synthetic construct
  source 1..2742: mol_type = other DNA; note = Synthetic coding sequence
atgaatgaagcgatggccactgacagtcctcggaggcctagtagatgcacgggaggagtggtggtacgaccccaggctgtaacagaacagtcatacatggagtctgtggttacttttctccaggacgtcgtgcctcaagcatattccggcacgcctcttaccgaggaaaaggaaaaaattgtttgggtgcggttcgaaaatgccgacctcaacgatacatcccggaatctggaattccacgaaatacatagcacagggaacgaacctcctctgctgatcatgataggatactccgatgggatgcaggtttggagtattcctattagcggagaagctcaagagttgttcagcgtgcgccacggcccaattcgtgcagccagaatattaccagccccacaatttggcgcacaaaagtgtgacaatttcgctgagaagcgtcccctgctgggggtgtgcaagtctataggaagcagcggcacaagtccaccctattgttgcgtagacctctacagtctgcgtactggtgagatggtgaaatccatccaatttaagacaccaatttatgatctacattgtaacaagaggatcttagtagtggtcctacaagaaaagatagctgccttcgatagctgcacatttactaagaagttctttgtcaccagttgctacccctgcccagggccaaatatgaatcccattgccctcggatctcgttggttagcctatgctgaaaacaagctgatcaggtgccaccagtctagaggaggagcgtgtggagataacatccaaagctatactgcaactgtgatttccgctgcaaagactttaaagtcggggctgacaatggtgggcaaggtcgtaacacagttgacaggcacactcccttcgggagtcaccgaagacgacgtagccatccattcgaactcgagacggtccccattggtcccgggaatcattaccgtgatcgacaccgagaccgtcggcgaagggcaagtcctcgtgagcgaagactccgacagcgacggcattgtggcacactttcccgctcatgaaaagcctgtgtgttgcatggcttttaacacctctggaatgctattggtgaccacagatactctggggcatgacttccacgtgtttcaaattctgacacatccatggtcaagttctcaatgcgctgtgcaccacctttacaccttgcaccgaggcgaaacagaggcgaaggtgcaggacatttgcttcagtcacgactgtcgctgggtggtcgtgagtactcttcggggtaccagccacgtgttccccattaatccatacggcggtcagccgtgcgttcggacacacatgtccccacgagtggtgaaccgtatgagcagattccagaagagtgcgggactagaggagatcgagcaggagctgaccagcaaacaagggggtagatgctcgcccgtccccggactgagttcctccccatcgggtagtccactacatggtaagctgaacagccaggattcttataacaactttaccaacaacaatccaggtaatcctcgtttatccccactgccttctctgatggtagttatgccactcgcccagatcaagcaacctatgacactgggcacaatcaccaaaaggacaggcaaggtgaaaccaccaccgcagatttcccctagtaaaagtatggggggtgagttctgtgtggccgcaatcttcgggacttctcgctcgtggttcgctaataatgccggattaaaaagggagaaggaccagtcaaagcaggtagttgtggagtctttgtatattatcagctgttatggaactctggtggagcacatgatggaaccgagacctctgtcaaccgcaccaaagatctccgatgatacacccttggagatgatgacctctccccgagccagctggaccttagttcgcactccacagtggaatgaactccaaccacccttcaacgcgaatcatccattgctactggctgccgatgcggttcagtactatcagttcctattggcagggcttgttccccctggttctcctggacccattacgaggcacgggtcttacgattccctcgcaagcgatcattccggtcaggaagatgaggagtggttgagtcaggttgaaatcgtcacccatacagggcctcacaggcgcctttggatggggcctcagttccaattcaagaccattcatccatcaggacagactacagtgatcagttcatccagctccgtgctgcagagtcacgggccttctgatactccccagcccctgctggactttgacacagacgatctggacctgaactcactgcgcattcagcctgtcaggtccgacccagtctccatgccaggcagctctcgccctgtcagcgatcgcagaggcgtgagcacagtgattgatgccgctagtggcacctttgatagaagcgtcacactattggaagtctgtgggtcctggccagaaggctttggccttcggcacatgagttcaatggaacacacagaggaaggacttcgcgagcgtctggccgatgcaatggcagaatccccctcaagggatgtggtgggctcaggaactgagctccagagggagggctctatagagacattatcgaatagttcagggagtacgtcgggctcaattccaagaaatttcgacggataccgcagcccgctgccaactaacgagtcccagcctctcagcctgtttccgacagggtttccttag

SEQ ID NO: 29731 - DNA, 2160 bp, synthetic construct
  source 1..2160: mol_type = other DNA; note = Synthetic coding sequence
atgggcttcagcaacatggaagacgacgggcctgaagaagaggagcgcgtagcggagccacaagccaactttaatacgcctcaggccctacgctttgaagagctgttggccaatttgctgaacgaacagcatcagatcgccaaggagctgttcgagcagctgaaaatgaagaaaccttcagccaagcagcagaaagaggttgaaaaagtgaaacctcagtgtaaagaggttcaccagaccctgatactggatccagcccaacgaaagcggctccagcaacaaatgcagcaacacgtgcagttgctgacacagattcatctgctggccacctgcaaccctaacctcaatccggaagcgtcatcgacgcgcatctgtctgaaagaattagggaccttcgctcaatcaagcatagctctgcaccaccaatacaaccccaagttccagactcttttccagccatgtaatctgatgggcgcaatgcaattgatagaggacttctctacacacgtctccatcgactgcagcccccataagacggtaaagaaaactgccaacgagtttccctgtctgcctaagcaggtggcttggattctggccacgtctaaggtgttcatgtatcccgagctgttgccagtgtgttcgctcaaagctaagaacccccaggataagatcctattcactaaagcggaagataataaatacctgctgacctgcaaaactgccaggcagcttacagttagaatcaagaacctgaacatgaatagagctcccgacaacattatcaagttttacaagaaaactaagcagctgccagtgctcggtaaatgttgcgaggaaattcagccacaccagtggaagccccctatcgagcgagaagagcacagactcccgttttggctgaaagcctctttaccatctatccaggaagagcttaggcatatggctgacggtgcacgagaagtgggaaacatgacgggtactactgaaatcaattccgatcagggactggagaaagataattctgagcttggaagcgaaaccagatacccactgcttcttcctaaaggcgtggtgctgaagctcaagcccgtggctgatcgcttccccaagaaagcctggcgacagaagagaagtagtgtcttgaaacccctcctaattcaacctagtccttcattacaaccatcttttaatcctggaaagacacctgctcagagtactcactctgaggcacccccatcgaagatggtcctcaggattccacaccctatccagccggctactgtgctccaaacggtgccgggagtaccgcctctaggcgtgagcggcggagagtcatttgagagcccagctgccttgcccgctatgcccccagaagcacgcaccagctttcctctgagtgaaagtcagaccctactgtcctcggcacccgttccaaaggtcatgatgcctagcccagcctcttctatgttccgtaaaccgtacgtgagaagaaggccaagcaagagaagaggcgctagggcatttaggtgcatcaaacctgcacccgttatccacccagcatctgttatattcacagtgcccgctacgacagtgaaaattgtcagccttggcggagggtgcaatatgattcagcccgtgaatgcggctgtggcacagtccccacagactattccaatcgccactttattagttaatcccactagctttccttgccctttaaatcaaccccttgttgcgagttcagtgtccccgctcatcgtatcaggcaactccgtgaacctcccaattccgagtacacccgaggacaaagcgcatatgaacgtggatatagcgtgcgccgtggccgatggcgaaaatgcatttcagggtctggagccaaaattagaacctcaggaactcagccctttgtctgcgaccgtgtttccgaaggtcgagcatagccctggtccgccaccagttgacaagcagtgtcaggagggcctgtctgagaattctgcttaccgctggaccgtggtaaaaacagaggaggggaggcaagctttagaaccgctaccgcagggcatacaagaatcactgaacaattcaagccctggagacttggaagaggttgtgaagatggaaccagaggatgccactgaggagatcagcggattcttgtag

SEQ ID NO: 29732 - DNA, 324 bp, synthetic construct
  source 1..324: mol_type = other DNA; note = Synthetic coding sequence
atgtcggtgctgcgtcctctggataagcttccagggttgaacaccgctaccatcctgctggtgggcactgaggacgcccttctgcaacagctagcagatagcatgctgaaggaagattgcgcttccgagctgaaagtacatctggcaaaatccctgcctctcccatcctctgtgaaccggccacggatcgacctgattgtgttcgtggtgaacctccacagcaagtacagcctgcagaacacagaagagtcgctgagacacgtagacgcctcttttttcttaggtaaagtgtgtttcttggccactggaggcggaaggctctag

SEQ ID NO: 29733 - DNA, 1599 bp, synthetic construct
  source 1..1599: mol_type = other DNA; note = Synthetic coding sequence
atgttcgtgctgggcattccattatgccctgcactcagcttcagtgggggtgacgattcccagacacagctttttgtgagcagtaaagatgtgatcaaagaaattgaggattttgattctttggaggcattgcgcttggagggtaataccgtgggagtggaggcagccagggtgatcgcaaaagccctggagaagaagtccgagcttaaaagatgccattggtctgatatgtttactggtagactgaggacagagatcccacccgcactgatctccctgggggaaggtctgattacagctggcgcacagctggtggaacttgacctctcagataacgcatttggtccagacggggtccaaggatttgaggcccttttaaaatctagcgcctgcttcacgctgcaggaattgaagctgaacaactgtgggatgggaattgggggaggcaaggtaattggaactctggaagaagtgcatatgccccagaatggcattaatcatccaggcattaccgccctagctcaggccttcgcggtcaatcccctgttacgagtcataaacctgaatgataacacatttacggagaaaggcgcagtcgccatggctgaaactttaaagacactgcgacaggtagaggtaattaatttcggtgattgccttgtccgctcaaaaggagcggtggccatagcagacgcgatccggggtggtttgcccaagctgaaggaactaaatttgtccttctgtgaaataaaacgggatgctgccctggcagtagctgaggccatggccgacaaggccgagctcgagaagctggatctaaacggaaacaccttaggagaggagggctgcgagcagctccaggaagtccttgaagggttcaatatggctaaggtgctggcctccttgtccgatgatgaggatgaagaggaggaagaggagggagaagaagaggaggaagaggctgaggaggaggaggaggaggacgaggaagaagaagaggaagaagaagaggaagaggaggaggagccccagcaacgcggacagggggagaagtctgccactcctagtaggaaaatactggaccccaatactggggagccagcaccagtcctctcttccccacccccagccgacgtcagcacattcctggcctttcccagcccggaaaaactgctgaggctcggtcctaagagctctgtcttaatagcccagcaaactgacaccagtgaccctgagaaagtggtttcagctttcctgaaagtttcttctgtctttaaagatgaggccacagtccgaatggccgttcaggatgccgttgacgctctcatgcaaaaagcttttaatagctcttccttcaactccaatactttcctcacaaggctgctagtgcacatgggtcttctaaagtcagaagataaggtgaaagcaatcgcgaacctttacggtcctttgatggcgttgaatcacatggtgcagcaagactattttcccaaggcactggcacccttgctgttggcatttgtgacaaaacccaactccgccctcgaaagctgctcatttgcgcgacacagccttcttcagaccctgtacaaggtgtag

SEQ ID NO: 29734 - DNA, 1383 bp, synthetic construct
  source 1..1383: mol_type = other DNA; note = Synthetic coding sequence
atggacagtgagctgatgcactcgatagtcggcagttatcacaagcccccagaaagagtttttgtgccttcgtttactcaaaatgagccttcccagaactgtcaccccgcaaatcttgaggtaacgagtccaaagattttacacagccccaattcccaggcactgatattagccttgaaaactctgcaggaaaaaatccacagactagagctggagcggacccaagcggaggacaacctgaacatccttagccgcgaggctgctcagtacaagaaagcccttgaaaatgagacaaatgaaaggaacttggcacaccaggaactgattaagcaaaagaaagacatttcaattcagctctcctcggcacagagtagatgtacactcctggagaaacaactggaatacacaaagcgaatggtcctgaatgtagagcgcgagaaaaatatgattctggagcagcaagctcaactccagcgagaaaaagagcaggaccaaatgaagctctacgccaaacttgaaaaactagacgtcctggaaaaggagtgtttccgactgactaccacacagaaaactgccgaggataagattaaacacctcgaggagaaactcaaggaggaagaacatcagcgcaagctttttcaagacaaggccagtgagctgcagactggcttagagatatctaaaattattatgtcatctgtctccaacctcaaacactcaaaggaaaaaaagaaatcctccaagaagaccaaatgtataaaacgtaggcctccgtggcagatctgcagcaagtttggggctctgccgttcgttgccgaaaagatgaggcagcacagagacccacacattttgcaaaagcccttcaacgtgacggagacccgttgcctgcccaagccatctagaacaacatcctggtgtaaagcaattccacccgactctgagaaatcaatctctatatgtgataacctgtccgagctgctgatggccatgcaggatgaattggaccagatgtccatggagcatcaggaattgcttaaacaaatgaaggaaactgagtcacactcggtgtgtgatgatattgaatgtgaactcgaatgtctactcaagaagatggagattaagggagaacaaatctccaaactgaagaagcatcaggactccgtgtgtaaattgcagcagaaggtacagaactcgaaaatgagtgaagcctcggggattcaacaggaggacagctatccgaagggcagcaagaatatcaagaatagccctcggaaatgtctgacagacacaaacctgttccagaaaaactcatcttttcatcccattagggtgcataatttgcagatgaagctccgtcgggatgacatcatgtgggagcaatag

SEQ ID NO: 29735 - DNA, 567 bp, synthetic construct
  source 1..567: mol_type = other DNA; note = Synthetic coding sequence
atgacagcgccatcctgtgccttccccgtgcagtttagacaacctagtgtctccggcctttctcagattactaagagtctgtacatttctaatggagttgccgctaataacaagcttatgttgagctccaaccagattaccatggtgattaatgtttctgttgaggttgtgaacacactctatgaagacatccagtacatgcaagtccctgtggccgattcacctaattcacgtctgtgcgacttctttgatccaatcgctgaccacatccatagcgtggagatgaaacaggggaggaccctgctgcactgcgctgctggggtgtcaaggagcgcagccttgtgcctggcctatctcatgaagtatcacgcaatgagcttgctggacgcacatacctggaccaaatcttgtcggccaattatccgcccaaacagtggattctgggagcagttaatacactatgagttccagttgttcgggaagaacaccgtgcacatggtatcctcgcccgtgggaatgattcctgatatctatgaaaaggaagttcgactcatgatacctctgtag

SEQ ID NO: 29736 - DNA, 1596 bp, synthetic construct
  source 1..1596: mol_type = other DNA; note = Synthetic coding sequence
atgaataaaaccaatcaagtctacgccgctaatgaagaccacaacagccagttcattgatgattactcatcgtcagacgagtccctgtctgtgagtcatttttcattctcaaaacaaagtcacaggcccaggacaatccgcgatcggacgagtttttccagcaaattgccatcccacaacaagaagaattccaccttcattccaagaaaacccatgaagtgtagtaacgaaaaagtggtcaatcaggagcagtcatatgaaagtatggataaatttctggacggcgttcaggaagtggcctacatccattccaaccagaatgtcatcggaagctccaaggctgaaaatcacatgagccgatgggcagcccacgacgtcttcgaattaaagcagtttagccagttacctgcaaacatagctgtctgttctagtaaaacatacaaggaaaaagtcgacgctgataccctgcctcatacaaaaaaaggtcaacagccgtcagagggtagcatctctcttccattgtacatttctaaccccgtcaaccagaagaagaagaaggtttatcacacaaatcagacaacgtttattatcggcgaaacacccaaggggatccgcaggaagcaattcgaagagatggcctcctacttcaactcttcaagcgtgaacgaattcgccaaacacattacaaacgccacttctgaagaacgacagaagatgctccgggacttctacgccagccagtatccggaggtgaaagagttctttgttgactcggtcagccagttcaacaacagttctttcgagaaaggcgagcaacgcacgaggaagaaatcagacaaacgtgaatcacttattaaacctcgactgtcggactccgagactctctcctttaaggacagcacgaataagatctcccaagtgtgctcccttaaaacttacaagcggaagagcgtcaagttccaaaatcatatatcgtatcgggaagaggtctttttcaacgacgccgaaacaaagaaatccccagtgtcgtccactcaggaaattgattccgggaagaactctcaggcaagtgaagacacagtgacttctagatccctgaatagcgagagcgagacacgtgagcgccgactggagaataccatgaaggatcagcaggacctgacccgcacgggaatatcacgaaaggagcccctgctgaagttagagaacaagaaaatagaaaatcctgtgttagagaacacttcggttattagtcttctgggcgataccagtatcctggatgacctgttcaagtcacacggaaattcacctacccaactccctaagaaggtgttgtcaggacctatggaaaaagctaagcagagacctaaagatttttgggacatactaaatgagcagaatgatgagagcctgtctaaactgaccgatctggccgtcattgagaccctgtgtgaaaaagcaccgttggcggctcccttcaagcgccgagaggaacccgctacatcattatggaagtccaacgagaagtttttgtggaaaaaattttcgccctctgacactgatgagaatgctactaatacccagagcacaacctag

SEQ ID NO: 29737 - DNA, 1089 bp, synthetic construct
  source 1..1089: mol_type = other DNA; note = Synthetic coding sequence
atgaccggacacactcgctcttctctgcccaggtgcaccggtattgtgttgctgattaaactgaggtttagcgaaagactaacaggacaccttcatgcacagggcaccccgccttatgtgatcaatctggaccccgctgtccacgaagttccattccccgcaaatattgacatccgggatacggttaagtacaaggaggttatgaagcagtacggcctggggccaaatggaggcatcgtaacctccctgaatctgtttgcgacccggttcgatcaggtcatgaaattcatcgagaaggcgcagaacatgagcaagtatgtgctgatcgacacacccggacagattgaagtgtttacatggtccgccagtggcactataattacggaggcattggcttcatcttttccgaccgtcgtgatctatgtcatggatacctccaggtcaaccaaccccgttacctttatgagcaatatgctctacgcttgttctatcctatataaaacaaagttgccctttatagtcgttatgaacaaaacagacatcatcgatcattcctttgctgtggaatggatgcaggatttcgaagcctttcaggatgcactcaatcaggagactacatacgttagcaacctgacccgctccatgagcctggtgctagatgagttctacagcagtctcagggttgttggtgtgtcagctgtgctagggactggccttgacgagttattcgttcaggtgacatctgccgcagaagaatatgagcgagaatacaggcctgagtacgagcgcctgaagaagagcctcgcaaacgcagagtcccagcaacagcgggagcagctagagcgactcagaaaagatatggggagcgtcgcgttggacgcaggcacagccaaagacagtttgtctcctgtgctacacccatccgatttgattcttacccgcggaacactcgatgaggaggatgaggaagcagatagtgacaccgacgacatcgaccaccgcgtcactgaggagtcccatgaggagccagccttccagaactttatgcaagaaagtatggcccagtattggaagcgaaataataaatag

SEQ ID NO: 29738 - DNA, 1338 bp, synthetic construct
  source 1..1338: mol_type = other DNA; note = Synthetic coding sequence
atgagcgtgacatacgacgactcagtgggggttgaagtttcgtcagacagtttttgggaggttggaaactacaagcgcacagtgaagcgaatagatgacgggcaccggttatgttccgatttaatgaactgcctgcacgagcgcgctaggatcgagaaagcctacgcccagcagttgacggagtgggcacgccgttggagacaactggttgagaaagggcctcaatatggcactgtcgagaaagcatggatggcatttatgtcagaggccgagcgagtgtcagagctgcacctcgaagtgaaagcaagtcttatgaatgatgatttcgagaaaatcaaaaactggcagaaggaggccttccataaacagatgatgggaggattcaaggaaacaaaggaggccgaggatgggtttagaaaagctcagaaaccttgggccaaaaaacttaaagaggttgaggcggctaagaaggcacaccatgctgcctgcaaagaggagaagctagcgatctcgagggaggcaaattctaaggcagatccttctctgaaccctgagcagttaaagaagttgcaagacaagattgaaaagtgcaaacaggatgtgttgaagaccaaagaaaagtatgaaaaaagcctaaaagagcttgaccagggcacaccacagtacatggagaacatggaacaagtcttcgaacagtgtcaacagttcgaggaaaagcggctgaggttttttagagaggtgctcctggaggtgcagaagcacttagacctttctaatgtcgccggatataaggccatctatcatgatctcgaacagtctatcagggccgctgacgccgtggaggacctccggtggtttcgcgctaatcacgggccaggtatggccatgaactggccacagtttgaggagtggtccgctgatctgaatcgtaccttgtccagacgagaaaaaaaaaaggctactgatggcgtaacattaactgggattaatcagaccggtgatcaaagtttgccatcgaagccttcctctgtgtcatcttatgaaaaaactcagagttatcccacggattggtccgacgatgaatcaaataaccctttttccagcaccgatgctaatggagattcgaacccgttcgacgacgacgctacttccggcaccgaagtgagagtgcgcgcactatacgactacgagggccaggaacatgacgagctgtctttcaaagccggagatgaactgaccaagatggaggacgaggacgaacagggctggtgtaagggtcggctggacaacgggcaggtgggtctctatcctgccaattacgttgaggctatacagtag

SEQ ID NO: 29739 - DNA, 405 bp, synthetic construct
  source 1..405: mol_type = other DNA; note = Synthetic coding sequence
atgtctgagaatgccgctccagggctcatttctgagcttcttctccaaagaggtaccactaaagtggccactggccttgttctgaacagagatcagagattggcctgggcagagaatagtatcgacttcatcagtcgcgagctgtgtgcacatagcatcaggaagcttcaagcccacgtattattgattaaagctgtacacggatattttgacagtagacagaattattctgagaaggagtcccttagctttatgatcgatacaatgaaatcaacattaaaagagcagtttcaattcgtggaagtcccgggaaaccattgtgtgcatatgagtgagccccagcacgtggccagcataatcagctcatttctgcagtgtacacacatgctccccgctcagctgtag

SEQ ID NO: 29740 - DNA, 321 bp, synthetic construct
  source 1..321: mol_type = other DNA; note = Synthetic coding sequence
atgtcttccaagggaagttccacagacggccgtactgatttggctaatggctctctgtcatcttcccctgaggagatgagcggggcagaagagggccgtgagacgagttctgggatcgaagtggaagccagcgacctcagcctcagcctcaccggcgatgatgggggacctaaccgcacgagcactgaaagcaggggcacagacactgagtcttccggcgaggataaggatagtgactctatggaagatactggacactattccatcaacgacgaaaatcgggtacacgaccgatcagaggaggaggaggaggaggaatag

SEQ ID NO: 29741 - DNA, 990 bp, synthetic construct
  source 1..990: mol_type = other DNA; note = Synthetic coding sequence
atggttcgcaccaagacttggacgctcaaaaagcactttgttggttatccgaccaatagtgactttgagttgaagactgcagagctacccccactgaagaacggcgaggtactgttggaagccctctttctgaccgtcgacccttacatgagggtagccgctaaacgcctgaaggaaggcgacacaatgatgggccagcaggtagccaaagttgttgagtcgaagaacgtggccctgcctaagggtacaatcgtactcgccagcccaggctggacaacacattcgatttccgacgggaaagatcttgagaagctgctgaccgagtggcccgatactattccgctgtctctggccctaggaacagtcggcatgccgggactgactgcctattttggcctacttgagatctgtggggtgaagggaggcgagactgttatggtgaatgctgccgctggtgccgtggggagtgtggtgggccaaatcgcaaagctcaaaggttgcaaggtcgtgggagcggtggggtccgatgaaaaagtggcttatctgcaaaagttaggatttgacgtggtgtttaactataagactgtggagagtctagaggagacgctaaagaaagcctccccagacggatatgattgctatttcgacaacgtaggaggagaattcagcaatacagttattggccagatgaagaagttcggacgaatagcaatctgcggggcaatatcaacctacaatcgtacaggccctttgccgccaggccctccgcctgaaattgtcatttaccaagaactgcgaatggaggcctttgtggtgtatcgatggcagggcgacgctcgccagaaggctctcaaggacctcctgaagtgggtcctggagggcaagatccagtataaggaatacatcatcgaaggatttgagaacatgcccgcagcctttatgggtatgctaaaaggggataatctgggaaagacaattgtgaaggcgtag

SEQ ID NO: 29742 - DNA, 2235 bp, synthetic construct
  source 1..2235: mol_type = other DNA; note = Synthetic coding sequence
atggctaccgccaatttcggaaaaatccaaatcggtatttacgttgaaatcaagcggtctgatggcaggattcatcaggcgatggtgactagtctaaacgaggataatgagtctgtgaccgttgaatggatcgagaatggggacacaaaaggaaaggaaattgatttagagagcatattctccctgaaccccgacctggtgccagacgaggagatagagccaagcccagagaccccccctccacctgcgagtagcgcaaaagtcaacaaaatcgtcaaaaatagaaggaccgtggcctctatcaagaatgacccaccaagtcgcgataatcgcgtggtgggtagcgccagagcaaggccctcccagtttccagagcagtccagctccgcacagcagaatggtagtgtctccgatatctctcccgtgcaagctgccaaaaaagaattcggccctccttctaggcgcaagtcaaattgtgttaaagaggttgaaaaactgcaggagaagcgagaaaagcggaggttgcagcagcaagaactgcgggaaaaacgggctcaggatgtggacgctacaaacccaaattacgaaattatgtgtatgatccgggactttagagggtcgctggactacaggcctctgacgacggccgacccaatcgacgagcaccgtatttgcgtatgcgtgcgcaaacgccctctgaacaaaaaagagactcaaatgaaagatctggacgtgataacaataccaagcaaggacgtggttatggtccacgagccgaaacagaaggtggacctcactcgttatctggaaaaccaaacattccgtttcgattatgcgttcgatgacagtgcgccaaatgagatggtatataggttcaccgctcgacctctggtggaaactatttttgaacgcggaatggccacctgttttgcctatggacagacagggtccggcaaaactcataccatggggggtgactttagtgggaaaaaccaggactgcagtaaagggatttacgctctggcagccagagacgtttttctgatgcttaaaaaaccgaactacaaaaagcttgaactacaggtgtatgcaacatttttcgaaatctatagcgggaaagtgttcgatttgttgaatagaaagaccaagctgcgggttctcgaagatggaaaacagcaggtgcaagtggttgggctccaggagcgagaggtgaagtgcgttgaagacgtgttgaaattaattgacattggaaactcctgccgaactagtggtcagacgagcgcaaacgcccactcttcccgatcccacgcggtcttccagatcatattgaggcggaaaggtaaacttcatggtaagttctcccttatagaccttgctggaaacgaacgaggcgctgatacaagcagcgccgatcgtcagaccagactcgagggggcagagataaataagtcactcttagcactaaaagagtgcatacgcgcactggggagaaataaaccccataccccgtttcgggcttccaaacttactcaggttctcagggactcctttataggggaaaattcaaggacatgcatgattgccaccatctctcctggaatggcctcctgcgaaaataccctcaatactctgagatacgccaaccgcgtgaaggaattcggcatctccccgagcgacattccgttcagtcagggatctgggtcaagacctgatctgtctccctcatacgagtacgatgactttagcccctcagtcactcgggtgaaggagctgactgtggatccaacagccgctggcgatgttaggccaattatgcatcatccccctaatcagatcgacgacctggaaacacagtggggcgtgggtagctcccctcaacgagatgatctcaagctcctgtgcgaacaaaatgaagaggaagtgtcaccgcagctgtttacattccatgaggctgtgtctcagatggtggagatggaggagcaggtggttgaagatcatagggccgtgtttcaggagtctattcgctggctagaggatgaaaaggccttactcgaaatgaccgaggaagtagactacgatgtcgactcgtatgctacacagctggaggctatcctcgagcagaagatcgatattctcaccgaactccgagacaaggtcaagtcctttagagctgcccttcaggaagaagagcaggcaagcaaacagattaatccgaagagaccccgtgccctgtag

SEQ ID NO: 29743 - DNA, 1701 bp, synthetic construct
  source 1..1701: mol_type = other DNA; note = Synthetic coding sequence
atgttcgtctccgactttcggaaggaattttatgaagtggtgcagagccagcgcgtgcttctcttcgtggcctctgatgtcgacgccctgtgcgcatgtaagatcctgcaggcactgttccagtgtgaccacgtacagtacacacttgtgcccgtgagcggatggcaagaattagagaccgccttcttggaacacaaagaacagttccactactttattctgatcaactgtggggcaaacgtggatctccttgatatcttgcaacctgatgaggatactatctttttcgtgtgcgacacccacaggcctgttaatgtcgtgaacgtgtacaatgatacccagatcaagctgctgatcaaacaagatgatgatttagaagtacctgcatacgaggatatcttccgcgatgaggaggaggacgaggagcacagtgggaacgacagtgacggcagtgagccatctgaaaaacgcaccaggctggaggaagaaatcgtagagcaaacaatgagaagaagacagcggcgagagtgggaagccaggcgtcgggacattctgtttgactatgagcagtatgagtatcatggaacatccagcgctatggtgatgttcgagctcgcatggatgctgagcaaggacctcaacgatatgctgtggtgggccattgtgggactgaccgaccagtgggtgcaggataagattacccagatgaaatatgtaacagacgtgggagtgctgcaacgccatgtgagcaggcacaaccatagaaatgaagatgaggaaaataccttatctgtggattgtacccgcatttcattcgagtacgatttgcgcctggtgctgtaccagcactggtcacttcatgactccctgtgtaacacctcttataccgccgctcgcttcaaactgtggagcgtgcacggacagaaaaggctgcaggagttcctcgccgatatgggactgcccttgaaacaggttaagcagaaattccaggctatggatatcagcctgaaagagaatttacgcgaaatgattgaggagagcgcaaacaaattcggcatgaaggacatgcgggtgcagactttttctatccatttcgggtttaaacacaagtttctggccagcgacgtggtctttgctactatgtcattgatggaatctccggaaaaagatggttccggcaccgatcacttcattcaggcacttgatagtttatcccgctcaaacctagataaactataccacggattggagctggcgaagaaacagctgagggccactcagcagaccatcgcgtcttgtctctgtaccaatctggttatatcccagggcccatttctctactgttcgctgatggagggaaccccagacgtgatgcttttctcacgcccagcctccttatccctgctgtcgaagcacctgttgaagagttttgtctgttctaccaaaaatcgacgctgcaagctcctcccacttgtaatggctgcgcctttatccatggaacatggaacggtgacggtcgttggtatcccacctgaaaccgactcaagtgaccgcaaaaacttcttcggacgagcgttcgagaaggccgctgagtcgacttctagccgaatgctgcacaaccactttgacctgtccgtgatcgaactgaaagcagaagatcggtccaagtttctagatgccctgatcagcttgttgagctag

SEQ ID NO: 29744 - DNA, 798 bp, synthetic construct
  source 1..798: mol_type = other DNA; note = Synthetic coding sequence
atgtgcacatcagagactttccaagcacttgacacgttcgaggccagacacgacgatatcgtactcgcgagctatcccaagtgcggatccaactggatacttcatatcgtatctgaactgatctacgcagtttctaaaaaaaaatacaaatatcctgagttccccgtgttggagtgtggcgactcagagaaatatcagcgcatgaagggctttcctagtccaagaatactggcaacccacctgcattacgataaactgccaggatctatattcgaaaataaggccaaaatcctggtcatctttagaaatccaaaggatacagctgtgagcttcttacacttccataacgacgtccccgatattccctcctacgggtcttgggacgagttctttcgccaatttatgaaaggacaggtgtcatgggggagatattttgactttgccatcaattggaacaagcatctggacggcgacaatgttaaatttatactctacgaggacttaaaggaaaacctcgctgcaggcatcaaacagattgctgaattcctgggctttttcctgactggtgaacagatccagactattagtgtacagagcacattccaggctatgcgcgctaaatctcaagacacacacggggcagtcggcccttttctgttcagaaaaggcgaggtgggagactggaagaatttattcagcgaaatccaaaatcaggagatggatgagaagtttaaggagtgcctggcaggtacgtcgctaggagctaagctcaagtatgaaagctattgccaagggtag

SEQ ID NO: 29745 - DNA, 2808 bp, synthetic construct
  source 1..2808: mol_type = other DNA; note = Synthetic coding sequence
atgaacgaggccatggctacggactcacctaggagaccctccaggtgtacaggaggggtcgtagtgcgtccccaggccgtaacagagcagagctacatggaatcggtagtgaccttcttgcaagatgttgtgccccaggcctactctggcactccgttgacggaagagaaagagaaaattgtgtgggtacggttcgagaatgccgacctcaatgatacatctcgcaacttggagtttcacgaaatccattccactgggaacgaacccccactgttaatcatgattgggtactctgatggtatgcaggtctggagcattcccatctcaggagaagctcaagagctcttttcagtacgccatggtcccatccgcgctgccagaatcctccctgcaccccagtttggcgcacagaaatgcgataatttcgcggagaagcgtcctctgctgggagtgtgtaagagtatcggaagctcaggaacttcccctccttactgctgcgtagatctgtacagcctgagaacaggagagatggtgaagtcaatacagtttaaaacacccatctatgatctgcattgtaataagcgcatcctggtcgtggtcctccaagaaaaaatagccgctttcgactcttgcactttcacaaagaaattttttgtgacaagctgttacccatgccccggtcctaatatgaatccgatcgctctgggaagccggtggctcgcttatgctgaaaacaaactcattcgatgccaccaaagcaggggtggggcatgcggcgacaatatccagagctacaccgccacagtcataagcgcagctaagactttgaagtccggtctgaccatggtgggtaaagtggtgacacaattgaccggcacccttccgtcaggtgtaaccgaggatgatgtagcaatccattccaactcccggaggtctccactagtgccaggcattattaccgtcatcgacactgagaccgtgggtgaaggccaggtcctggtgtcagaggattccgactccgacgggattgtggcccactttccagcgcatgagaaacccgtctgttgtatggcattcaatacttctggaatgctgctcgtgactaccgataccttgggtcacgactttcatgtgttccaaatcctgactcacccttggagctcatcccagtgcgcagtgcaccatctttacactctgcatcgcggagagacggaggcgaaggtccaggatatctgcttcagccacgattgtcgttgggtcgttgtctctacgcttcgaggtacctctcacgtgtttcctataaacccttatggaggtcagccatgtgttcgcacacacatgtccccgagagtggtcaataggatgtcccgcttccagaagagcgccggtttagaggaaattgagcaggaactcacctctaagcaaggcggtaggtgctctcccgtgccaggtctctccagttctccctcagggagtcctctccacggcaagctcaattctcaagatagctacaataattttacaaacaacaatccaggtaatcccaggctgagtcccctgcctagccttatggttgttatgcccctagcccagattaagcaaccaatgactctggggacgataactaagcggaccggaaaggtgaaacctcccccacagatcagtcccagcaagtcgatgggaggagagttctgcgttgcggcaatttttggtacaagcagatcttggtttgctaataatgcagggttaaagcgggagaaagaccagtccaagcaagtggtcgtggaatctctgtacatcatttcatgttacggtaccctggtggagcacatgatggagcctcgtcccttatccaccgcaccgaaaatatcagacgatacccccctggagatgatgacttcacccagggcttcttggaccctggtgagaactcctcagtggaatgagttgcagccaccatttaacgctaaccatcctttgctcctggccgctgatgcagtgcagtattaccagtttctgctggctggcctggttcctcctggttcacctggaccgatcacaaggcacggttcgtatgacagtctggccagcgatcacagcggacaggaggacgaggagtggctttcacaggtcgagatcgtcacccatacaggtccccataggcggctctggatggggccacagtttcagtttaagaccatccacccatccggacagactaccgtcatttctagcagtagctctgtactccagagccatggccctagtgatactccacagcctttgttagactttgacactgatgacctcgacctaaatagtttaagaatccaaccagtcaggtcagatccagtttctatgcctggaagcagcaggcctgttagcgaccgtaggggtgtctcgaccgttatcgatgctgcctctggtacctttgataggtccgtcactctgcttgaggtgtgcgggtcatggcctgagggcttcgggctaaggcatatgagcagcatggagcacacggaagaaggtctgcgggagaggctggctgacgccatggcagaaagtccttctagagatgtagtgggttccgggactgacaccgccttagatgtcgcagtgaagacttttccccctgaaagacacgtggccgttaagtgcttcgagctgcagcgcgagggcagcatagagaccctttctaattctagtggctctacctccggttctatcccacgaaattttgacggctatcgcagtccgctgcccactaatgagagccaaccactctcactattcccaacaggttttccctag

SEQ ID NO: 29746 - DNA, 615 bp, synthetic construct
  source 1..615: mol_type = other DNA; note = Synthetic coding sequence
atggaagccgctggatctcctgcagctactgaaacagggaaatacatcgccagtactcaacgtcctgatggtacctggaggaagcagcgcagggtcaaagagggctacgtgcctcaggaagaggtgccagtgtatgagaataagtacgtgaagttctttaaaagcaaacctgaactgccccctgggctgtcgcccgaagccactgccccagtgacccccagccgtcccgaaggtggggaacccggtttgagcaagacagctaaacggaatctgaagagaaaggagaagcgaaggcaacagcaagaaaagggcgaagccgaggcactaagccggacactggacaaggtctctttggaagagaccgcacagctgccaagtgcccctcaggggtcacgcgcagcccctacagcagcatctgaccagcccgatagcgccgcaacgactgaaaaggcaaaaaaaatcaaaaatctcaagaagaagctgcggcaagtggaggaattacagcaacgaattcaggcgggtgaggtatcccagccttctaaggagcagttggaaaagctggcgcgaagacgggctctcgaggaagagctggaagatctggagctgggactatag

SEQ ID NO: 29747 - DNA, 663 bp, synthetic construct
  source 1..663: mol_type = other DNA; note = Synthetic coding sequence
atgtccagcggaaattaccagcagtccgaggccctctccaagcctactttctccgaagaacaggcaagtgcactggtggagtcggtctttggacttaaagtctctaaagtgaggccgctacccagttatgacgatcagaattttcacgtttacgtgagtaagaccaaagacgggcctactgagtacgtcttgaagattagcaacaccaaggcctctaagaatcctgatctgatcgaggtccaaaatcatattattatgtttctaaaagccgctgggtttcctacggcatcagtgtgccatactaaaggggacaacactgcctccctggtgagcgtggatagcggctccgaaataaaaagttacctcgtgcgccttctcacatatctccccggacgacctatagcagagctacccgtgagtccgcaactgctgtacgagataggaaagctggctgctaagctggataaaaccttgcagagattccatcacccaaaactgtctagtttgcacagagaaaactttatttggaatctcaaaaacgttcctctccttgaaaaatatctgtatgcattaggacaaaacaggaatcgcgagatcgtggaacacgtcattcatctctttaaagaggaagtcatgaccaagttaagccacttccgagagtag

SEQ ID NO: 29748 - DNA, 603 bp, synthetic construct
  source 1..603: mol_type = other DNA; note = Synthetic coding sequence
atgtcttcagactctatggatcagccacggaatccctgcgagaacgaacctctgacaccaggataccatggattcccagcccgagatagccagggtaatcaggaaccaaccacaaccccagacgctatggtgcagccgttcacaaccattccgttccctcctccaccccagaacggtatccccactgagtacggcgtgccacatacacaggattacgccggtcagacaggcgagcacaatcttaccttgtatggctctacgcaggctcatggcgagcagtcttccaactcaccatctacgcaaaacggcagcttgactcagacagagggcggagctcagacagacgggcagcagtcccagacccagtcgtccgaaaattcagaatcaaaatccacccccaaaaggctgcatgtgtctaacattccttttagattcagagatcccgatttgaggcagatgttcgggcaattcgggaagatcctggatgttgaaataatctttaatgagcgagggtcgaaaggcttcggtttcgtcacatttgagaactcagccgatgctgatcgggcacgcgaaaagctccatggaaccgtcgttgaggggtag

SEQ ID NO: 29749 - DNA, 387 bp, synthetic construct
  source 1..387: mol_type = other DNA; note = Synthetic coding sequence
atggcgcctgccaaaaaaggaggtgagaaaaaaaaaggacggagcgctataaatgaggtggtcacacgggagtacaccatcaatattcacaaacggatccacggtgtgggtttcaaaaagcgggcaccccgtgctttaaaagaaatccgcaaatttgcaatgaaggagatgggaaccccagatgttcgcattgatacaaggcttaataaggcagtctgggcaaagggcataaggaacgtgccctacaggattcgggtcaggttgagtcgtaaacgcaatgaggatgaagactctccaaataagctttacacactggtcacttatgttcccgtgactactttcaagattagcgtgctgaacagcgtgaccgtggcaaaaagcccttag

SEQ ID NO: 29750 - DNA, 393 bp, synthetic construct
  source 1..393: mol_type = other DNA; note = Synthetic coding sequence
atggcgcctgctaagaaaggcggagagaagaaaaagggcagatccgccatcaacgaggttgtcactagagaatacaccatcaatatacacaagagaattcacggcgtagggtttaaaaaacgcgcaccacgcgctctgaaggagatcagaaaatttgccatgaaagagatgggcaccccggacgtacgcattgatactaggctgaacaaggctgtgtgggcaaaggggattagaaacgtgccataccggatccgcgtgagattgtcacggaagaggaatgaggatgaagatagtccaaataaattatatacactagtgacatacgttcctgtgacaacgtttaaaagcttacagaacgatgacctgtttaaaactgattgccaccaccagtag

SEQ ID NO: 29751 - DNA, 1524 bp, synthetic construct
  source 1..1524: mol_type = other DNA; note = Synthetic coding sequence
atgtggttaacgtcgtaccctagcccgaacttcccggtgtctgtgcttcagaacggagttaagatgacaaacgaggctcctaagggactgcgggctaacattatcagaagttacctgatggaccccatttccgatcctgaattcttcggtagctgcaaaaagcccgaggaattcaaaaaactattgtacggcctgtgcttctttcatgcccttgttcaggaaagacggaagttcggcccactggggtggaatatcccgtacgagttcaatgagactgatcttcggatatcggttcagcagctccatatgtttctgaaccagtatgaggagctcccttatgaagccctacggtacatgaccggggaatgcaattacggcggacgcgtgaccgatgactgggacaggcgtactctccggtccatactgaacaaattctttaacccagagttagtggaaaactccgattataagttcgattcatcaggcatctacttcgtgcctccatctggagaccataagtcttatattgagtatacgaagaccctccctttgacacctgcccctgaaattttcgggatgaatgctaacgccgacatcactaaggatcagagcgaaacccagctacttttcgataatatattgctgacccaatccagaagtgcgggagctggagctaaaagcagcgatgaagttgtaaatgaggtggcttcagacattctgggcaagttacccaacaattttgatatagaagcagccatgaggcgctaccctaccacgtatacacaaagcatgaatactgtgctggttcaggaaatggggcgtttcaataaactcctcaaaactatacgcgattcatgtgttaatatacagaaggccattaaggggctggcagtgatgtccaccgacctcgaggaagtcgtgtccagcatcttgaacgtgaagatccccgagatgtggatgggcaaatcttatccctcactgaagcccctcggttcatatgtcaatgacttcctggcacgcctgaaattccttcaacagtggtacgaagtgggcccaccacccgtattttggttatcgggatttttcttcacacaagccttcctcaccggtgcccagcagaattatgccagaaaatatacgatccctatcgacctgcttggatttgactacgaggtcatggaggataaggagtataagcatccccctgaggatggggtgttcatacatgggctgtttctcgacggcgcatcctggaatcggaaaattaagaagctggccgagagccatcccaagatcttatatgatacagtgccggtaatgtggttgaagccatgcaaacgcgcagatattcccaaacgaccttcttacgtcgccccactctataaaacctctgaacgccgaggcgtgctctctacgactggccactccaccaactttgtcatcgccatgaccctgcccagcgatcagcctaaggagcactggatcgggaggggcgtagcattattatgccagttgaattcatag

SEQ ID NO: 29752 - DNA, 1683 bp, synthetic construct
  source 1..1683: mol_type = other DNA; note = Synthetic coding sequence
atggcagcctccgcaaagcggaaacaagaggaaaaacatctgaagatgttgcgcgacatgacaggcctacctcacaaccggaagtgctttgattgcgatcagaggggaccaacttacgtgaacatgacagtcggctcatttgtctgtacgtcatgttctggaagccttagaggccttaacccacctcatcgagttaagagcatctccatgacaaccttcacccagcaggagattgaatttctgcaaaagcacggaaacgaggtgtgcaaacagatctggctgggactgttcgacgatagaagttctgcaatacccgacttccgggacccacagaaggttaaggagttcctccaggagaaatacgaaaagaaacgttggtacgtccctcctgagcaagccaaagtagtggcttccgttcacgcaagcatctcaggtagttccgcaagctcaacctcttctaccccagaagtgaaaccgttgaagtcgctcttgggagattctgcgccaactctccacctgaataaaggtacacccagccagagccccgttgtcggacggtcccaaggacaacagcaagaaaaaaaacagttcgacctgctctctgacctgggttccgatatctttgcagccccagcccctcagtcaaccgccaccgctaattttgcaaactttgcccatttcaactctcatgcagctcagaactccgcaaacgccgactttgcgaattttgacgcgttcggtcagtcttctggcagcagtaattttggaggttttcccacggcgagccattctcctttccagccacagactactggaggttctgcggctagcgtgaatgccaacttcgctcacttcgataattttccaaagtcgagctcagccgacttcgggaccttcaatacgagtcaatcacatcagactgcatccgccgttagcaaagtgtccaccaataaggccggtttgcagactgctgataagtacgccgcattggccaatctagacaacatcttctctgccggtcaggggggagatcaaggatctggtttcggtactaccggaaaggctcccgtgggctccgttgtgagcgtgccatcacagagcagtgcaagttcagacaagtacgctgcccttgctgagcttgacagcgtcttcagttccgcagccacctcaagcaatgcatacacctccacctcaaatgcctcgtctaacgtgttcggaacagttccagtggtggcaagcgcccagacacaaccggcttctagcagcgtacccgctccctttggcgctacaccatctacaaatccctttgttgccgctgcgggtcccagcgtcgcttcctcaaccaaccctttccaaacgaatgcccgaggcgctactgcagccacattcggaaccgcaagcatgtccatgcctacggggtttggtacacccgctccttactcacttcccacaagctttagcggcagttttcaacagccggcattcccagcccaggccgcttttccgcagcagactgctttttctcagcagcctaatgggtttgcagcctttgggcagactaagcctgttgtgacaccttttggccaggtggcagctgcaggagtttcatcaaatccctttatgaccggggcacccacgggccagtttcctacagggtcttcctccaccaacccctttctgtag

SEQ ID NO: 29753 - DNA, 2403 bp, synthetic construct
  source 1..2403: mol_type = other DNA; note = Synthetic coding sequence
atgtcttccctgggagcctccttcgtacaaataaaatttgacgacctgcaattttttgaaaactgcgggggaggcagtttcggcagcgtgtacagggccaaatggatttcacaggacaaagaggtcgcggtgaagaaactgctgaagattgaaaaagaagcggagatccttagcgtccttagtcataggaatatcattcagttctacggagtgattctcgagccacccaattatggaatagtgacagaatacgcctcattaggtagcctctatgattacatcaactctaacaggtcagaggagatggatatggaccacatcatgacttgggctaccgatgtggctaagggcatgcattatctgcacatggaagctccggtaaaggtgatccaccgcgatctcaaatcgcggaatgtggtaatcgcggcagacggtgttctgaaaatttgcgatttcggcgctagcaggttccacaaccataccacacatatgtctttagtggggacattcccatggatggctcccgaggtcatccagtccctgccagtgtctgaaacctgtgatacctattcatacggtgtggtgttatgggaaatgttgacccgcgaggttccatttaagggactcgaggggttgcaggtggcatggctcgtggtagaaaagaacgagagattgactattccttccagttgccccaggagtttcgcagagcttttacaccagtgttgggaagccgacgcaaagaagcggccatcattcaagcaaatcatctccattctggaatccatgagtaatgacaccagcctcccagacaagtgcaattcatttctccacaacaaagccgagtggcggtgtgaaatcgaggctaccctagagagactcaagaagttggagcgggatctatcgtttaaagagcaggaactgaaagaaagggaaaggcgactcaagatgtgggagcagaaacttacagagcagtcaaatacaccactactgcccagcttcgagattggggcatggacggaagatgacgtctactgctgggtccagcagttagtcaggaagggcgactccagtgcagaaatgtcggtttacgcgagtctgttcaaggaaaataatattacagggaagagactgctgctcttggaagaagaagatttgaaagacatgggcatcgtgtctaaagggcacatcattcactttaagagcgctatcgagaagctaacccatgattatatcaatttattccacttccctccactgatcaaggatagcggaggagaaccagaggagaatgaggagaagattgtgaatttggagctggtgtttgggttccatctgaaaccaggtactggaccacaggactgtaaatggaagatgtacatggagatggacggggacgaaatcgctataacctatataaaagacgttacattcaatacaaacctgccggatgccgaaatcctgaaaatgacgaagcccccattcgtgatggaaaaatggattgtgggtatcgccaagagccagaccgtggagtgtactgtcacctatgagagcgacgttcgaacccccaagagcacaaaacatgttcacagtattcagtggagccggaccaaaccccaggacgaggtcaaggcggtgcagctagccatccagacactctttaccaactcagatgggaatccagggtcccgatcagatagctccgctgactgtcaatggttagacaccctccggatgaggcagatagcctccaatacgagtcttcaacgaagtcagagcaacccgatcttaggctccccattcttcagtcactttgacggccaggactcttacgctgccgcagtgcgcaggccccaggtacctattaagtatcagcagattacccccgtgaaccagtcccgatcttcaagcccaacacaatacggcttgaccaaaaacttctctagcctccacctgaacagccgcgatagcggcttttctagcggaaatacagacacaagttctgagaggggtaggtattctgatagatccagaaacaagtacggccgtgggagcatcagcctgaattctagccctaggggacgttatagcggaaagtctcagcacagcactccatcccggggtcgttaccctggcaaattttaccgggtgagtcagtccgcccttaacccacaccaatcaccagactttaagagatcaccaagagatctgcaccaacctaacaccatcccgggtatgcccctgcatcctgagaccgatagtagagcttctgaggaggactcaaaagtctcggaggggggttggacaaaagtggaatatcggaaaaagccccacagaccttcaccggctaagacaaacaaagagagagctagaggcgatcaccgaggctggcgtaacttttag

SEQ ID NO: 29754 - DNA, 144 bp, synthetic construct
  source 1..144: mol_type = other DNA; note = Synthetic coding sequence
atggatgatcaacaggccctgaactcaatcatgcaagatctcgccgtgctccataaagcctcgcgccctgccctatctctccaagaaactcggaaagctaaaagctctagtcctaagaaacagaatgacgtgcgcgttaagtag

SEQ ID NO: 29755 - DNA, 1272 bp, synthetic construct
  source 1..1272: mol_type = other DNA; note = Synthetic coding sequence
atggtgagcttcatgaataatcaaaagcagcagaagcctacactgtctggacagcgttttaaaacccggaaacgtgatgaaaaggaacgatttgacccgacccagtttcaggactgtattattcagggcctgacagagaccggaactgatttagaagccgtggccaagtttctggacgcaagtggagcaaagctcgactaccgaagatacgccgaaactcttttcgatatcttagttgccggaggcatgctcgcacctggtggcactttagccgacgacatgatgaggaccgatgtgtgcgtgttcgcggcacaggaggatctggaaactatgcaagctttcgctcaagtgtttaataagcttatccgaagatacaaatatctggaaaaaggctttgaagacgaagtcaagaagctactcctattcctgaagggcttcagcgagtccgagcgcaacaagttggcaatgttgaccggggttcttttggccaacggtacattaaacgcctcaatcttgaactccctctacaatgagaatttagtcaaagagggggtcagcgccgcttttgctgttaaactcttcaaatcttggatcaatgagaaagatataaacgcagtagcagccagccttcgcaaggttagcatggacaataggctaatggaactcttcccagctaacaaacagtctgtggagcactttaccaaatacttcacagaggcagggcttaaggagctatccgagtacgtgcgtaatcagcaaactatcggggcaaggaaggagttacaaaaagagctccaagagcaaatgtctaggggagatcccttcaaggatattatactctatgtcaaggaagaaatgaaaaaaaataatattccagaaccagttgtgatcgggatcgtttggtcctcagtcatgagtaccgttgagtggaacaagaaggaagagctggtggccgaacaggctattaagcacctcaaacagtacagccccttactcgccgctttcaccacccaagggcaatccgaacttacactgctgctgaaaatccaggaatactgttacgacaatatccattttatgaaggcatttcaaaagatcgtggtactgttctataaggccgaggtcctgtcggaagaaccaattctcaagtggtacaaggatgctcacgtcgctaaaggtaagtcggtttttttggaacagatgaaaaagtttgtcgagtggttgaagaacgcagaagaggagagtgaatccgaagccgaagagggagattag

SEQ ID NO: 29756 - DNA, 1119 bp, synthetic construct
  source 1..1119: mol_type = other DNA; note = Synthetic coding sequence
atgtcccggagaaggttcgactgtcggtccatttcgggactgctgacaacaacgcctcaaattcctatcaaaatggaaaattttaacaatttctacatccttaccagcaaggagctgggcagaggaaagttcgccgtcgtcaggcagtgtatctctaaatccaccggccaggagtatgctgcgaaatttctgaagaaaagaaggcggggtcaggactgccgtgccgagatactgcatgagatcgccgttctggagctggccaagagttgtccgcgtgtcataaatcttcatgaagtatatgagaatacttccgaaatcattttgatacttgagtacgcggctggcggagagatctttagtttgtgtctccccgagttagccgaaatggtgtctgagaacgatgtaatcagattaattaaacaaatactcgagggcgtgtattatttgcatcaaaacaacatagtgcaccttgacctgaagcctcagaacattctcctgtcatcaatttatccactgggggacataaagatcgtcgattttgggatgtcacgcaaaatcggtcacgcctgtgagctcagggaaatcatgggtactcctgagtacctggccccagagatcctcaactatgacccaatcaccacagcaaccgatatgtggaatatcgggatcatcgcttatatgttgctgacacatacctctccttttgtaggtgaggataaccaggaaacctatctcaatattagtcaggtaaacgtggattactccgaggaaactttttctagtgtatctcaactggcaacagactttatccagtcgctgcttgtcaaaaacccagagaagagacccaccgcagagatttgcctctcacattcatggctgcagcagtgggatttcgagaacctctttcaccctgaggaaacgtcgagctccagtcagacccaagaccatagcgttagatctagcgaggataagactagcaagtcctcctgtaatggcacttgtggtgatagggaggataaggagaacattcccgaggattcatccatggtcagcaaaagattcagattcgacgacagcctgcctaatccccacgaactggtaagcgacttactgtgttag

SEQ ID NO: 29757 - DNA, 912 bp, synthetic construct
  source 1..912: mol_type = other DNA; note = Synthetic coding sequence
atgatggacgtctctggcgttggctttccgtcaaaagttccctggaagaaaatgagcgctgaggaactggagaaccagtattgtccctcccgctgggtagtacggctgggggcagaggaggcccttcgtacatactctcagatcgggattgaggctacaacccgggcacgcgcaacaaggaagtcactattgcatgtaccgtacggagatggcgagggagagaaagttgacatctactttccggacgagtcatcagaagccctgccgttctttcttttcttccatggtggctattggcagtccggctcaaaggatgagagcgccttcatggtacatcctttaaccgcccaaggggttgctgtagtcatcgtggcctacggaatcgcacccaagggaacattagatcacatggtcgatcaggtgacgagatctgtggctttcgtgcagaagagatacccaagtaataagggtatctatctctgtggccactcagccggtgcccacctggccgctatgatgctgttagcggactggacgaagcacggtgtaacccctaatttaagaggcttctttttggtgtctggcgtgtttgatttggaaccaatagtttatacctcacagaacgtggctctacagctaacgttagaggacgcccagcgtaatagccctcagcttaaagtggcccaggcacagccagtggatcccacctgtcgcgtgttggtagtggtcgggcagttcgattctcccgagttccaccggcagagttgggaattctaccagaccctctgtcagggggaatggaaagctagctttgaagaactccatgacgtggaccacttcgagattgtggagaacctaacccagaaagacaatgttcttacgcagattatcctcaagacaatctttcagtag

SEQ ID NO: 29758 - DNA, 684 bp, synthetic construct
  source 1..684: mol_type = other DNA; note = Synthetic coding sequence
atggctctccacgacatggaggattttacctttgatggtacaaaaaggttatcggttaactatgtgaaagggatcctacagcccactgacacctgtgacatctgggacaaaatctggaacttccaagcgaagccggatgacctccttatttccacttaccctaaggctggcaccacttggacccaagagattgtagagctgatccagaatgagggcgatgtcgagaaatcaaagcgggcacccacgcaccagcgtttcccctttctggagatgaagattccctctctcggctctgtctgctggggtagttggcatgagcacgtcaaaggctggtgggaggccaaggacaaacatcgcattctgtacctgttctacgaagacatgaagaagaacccaaagcacgagatccagaaactggctgagttcatcggcaaaaagttagacgacaaggtactcgataagatcgtccactacacctcatttgatgtgatgaaacagaacccaatggcaaactatagttccatcccagccgaaatcatggatcacagcatctcccctttcatgcgcaagggagccgtcggcgactggaaaaaacattttaccgtagcccaaaatgagcggttcgatgaggactacaaaaagaagatgacagacacgcgcttaacctttcacttccagttctag

SEQ ID NO: 29759 - DNA, 366 bp, synthetic construct
  source 1..366: mol_type = other DNA; note = Synthetic coding sequence
atggcacccgctaagaaaggcggagagaagaagaaaggcagatctgccattaacgaggtggtaacgcgggaatacacaataaatattcataagcgaattcacggagtcggttttaagaaacgagctcccagggctctgaaagagatcagaaaatttgcaatgaaagagatggggactcctgacgttcgaatagatacaagactgaataaagccgtgtgggccaagggaattcggaacgtaccgtacaggatccgagtgagactgtcaagaaaaaggaatgaggacgaggactctcccaacaagctatatactctcgtgacctacgtgccagttactacatttaagtccaagttttccattccttag

SEQ ID NO: 29760 - DNA, 267 bp, synthetic construct
  source 1..267: mol_type = other DNA; note = Synthetic coding sequence
ctgagctttcgggctgattccgcacacgccagcatggtcaacgtgcccaagacaaggcgaacgttctgcaaaaaatgcggcaaacaccagccgcacaaagttacacagtacaaaaaaggtaaagatagtctgtacgcacaagggaagagaaggtacgatagaaaacagtccggctacgggggacagaccaagcccatcttccggaagaagcttcatcaaaattgcattgaaccgaaccttccgcctagagcccagcaatctccctag

SEQ ID NO: 29761 - DNA, 582 bp, synthetic construct
  source 1..582: mol_type = other DNA; note = Synthetic coding sequence
atggattcgaccttggcagtgcagcaatatatccagcagaacatcagagcagattgctcgaatattgataagatcctcgagcccccagagggccaagacgaaggagtatggaagtatgagcatctcaggcaattctgcctcgaacttaacggacttgcagtgaagctccagtctgagtgtcaccctgacacgtgcacgcagatgaccgctactgagcagtggatattcctgtgtgccgctcataagactccgaaggagtgccccgctatcgactacacccgacacactctggatggagccgcttgcctgctcaactctaataagtacttcccctccagagttagcatcaaagaaagttctgtggctaagctgggctcagtttgtagaagaatttatcgaatcttctcccacgcatactttcaccacagacagatctttgatgagtatgagaacgaaacattcttatgccacaggtttaccaagttcgtcatgaagtacaacctgatgagtaaggataatctgattgtcccaattctggaagaggaggttcagaactctgtctcgggcgagtctgaggcctag

SEQ ID NO: 29762 - DNA, 4137 bp, synthetic construct
  source 1..4137: mol_type = other DNA; note = Synthetic coding sequence
atgtctctggaacgggagctgcgccagctcagcaaggcgaaagccaaggcccagagagctggacaaagacgcgaagaggcggcactctgtcaccaactcggagagctgttggctgggcatggacgttacgcggaagctctcgagcaacactggcaggaactccaacttcgcgagagagctgacgaccctctggggtgtgccgtggcacatagaaaaattggggaaaggttagctgaaatggaggactacccagccgctctgcaacaccaacatcagtatctggaactggcccactccctgagaaaccacaccgagctacagcgtgcttgggcaacgattggacgcactcacttggatatatatgaccactgtcagtcgcgcgacgcactcctgcaagcccaggccgcttttgaaaagtctctggccattgtagacgaagagcttgaagggaccctggcacaaggagagctgaatgaaatgaggacacggctttacctcaatctgggacttacattcgaaagccttcaacaaaccgctctttgcaacgattacttccggaagtctatattcctggcagagcagaatcatctctacgaagacctttttcgggctaggtacaacctcggtaccattcactggagggccggacagcacagtcaagccatgcgatgcctcgagggtgcacgggaatgtgcacatactatgaggaagcgattcatggagagtgagtgctgcgtggttattgcacaagtcctacaggacctgggcgacttcttggccgcaaagcgggcactgaagaaagcataccgcttggggagtcagaagcccgtccaaagggcagccatatgccaaaacctacagcacgtcctcgcagtcgtccgcctccagcaacaactcgaggaggcagaaggccgagatccccagggcgctatggtcatttgtgagcagctgggggacctgttttccaaggcaggtgacttcccaagggctgccgaggcttaccaaaaacaactgaggtttgctgagttactcgacaggcctggggctgagcgagctatcatccatgtgagtctggccaccacgcttggcgatatgaaggatcatcatggagccgtccggcattatgaggaagaactgagattaaggtctggtaacgttttggaagaggcgaaaacatggctgaacatcgcacttagtcgcgaggaagcaggagacgcttatgaactgttagccccttgttttcagaaggcgctgagctgtgcgcaacaggcgcaaaggccacagctacagcgtcaggtcctccaacacttgcacaccgtacagctgagactccaaccccaggaggcaccagaaaccgagactcggctccgggagttatccgtcgctgaagatgaggacgaggaggaagaagcagaggaagctgctgctactgctgagtcggaagctttagaggcaggggaggtcgagttgagtgagggggaggatgataccgacgggcttacaccccagttagaggaggacgaagagctacagggacacctcgggaggaggaagggatccaaatggaaccgcaggaacgacatgggcgaaactctgctgcaccgagcctgtatcgaaggacagttgaggcgtgtccaggacctggttagacagggtcatcctctgaacccccgtgactactgcgggtggactcccctgcacgaggcgtgtaactatggccacctggagatcgtgagattcttactggatcacggtgccgcagtggacgatcctggaggtcagggctgtgaaggaatcactcctctccatgatgcattgaactgcgggcacttcgaggtggccgaactgctattggagcgaggtgcgtccgtgacactgcggaccaggaaaggcctgtccccactggaaactttgcagcagtgggtcaagctttatcgcagggatctggatttggaaacccgtcaaaaagcaagagcaatggaaatgctcctgcaggccgctgccagtggccaggaccctcacagcagtcaagcatttcacacacccagcagcctcctttttgacccagaaacaagtcctcctctgagcccatgtcccgagccgcctagcaactcaactcgcctgcctgaggcttcgcaggcccatgttagagtgagtccaggacaggccgctcccgctatggcacgtcctcgtcgctcccggcatggacccgcatcttccagcagcagcagtgagggggaggatagtgctggacccgcacgaccctcccagaagcggccacgctgctccgccacagcacagagagttgcagcttggaccccaggtccagctagtaaccgcgaggccgcaacagcatcgacaagccgggctgcttaccaagccgctatcagaggggttggtagcgctcagagccggctcggaccaggtccgcctagaggtcactccaaagccctggccccacaggctgcccttatacccgaggaggaatgcctagctggggactggcttgaactggacatgccgctgactaggtctcgaagaccacggcctcggggaacaggcgacaatagaaggccgtccagcacaagcggatctgactccgaagagtctcgcccacgcgcacgggcaaagcaggttcgtctcacttgcatgcagtcctgttccgcacccgtcaacgctgggccatcttcattggctagcgagccgccaggcagcccaagcacccctagagtgtcggagccctctggtgacagttccgcagctggccaacctctgggacctgccccacctccccctatccgtgtgagagtgcaagtgcaggaccatctgttcttaatccccgtgcctcactcttctgacacacatagtgtggcctggctggctgagcaggcggcacagagatactatcagacatgcggcttactccctcgactgacactccgcaaggagggggcactgctggccccacaagatctgattcccgacgtgctgcagtcgaatgatgaggtcctggcagaggtgacttcctgggatctgccacccctgacagaccggtatcggcgagcctgtcagtccctgggtcagggcgagcatcagcaggtgctacaagctgtcgagctgcaggggttaggcctctcattcagcgcttgctccttggctttagatcaggcacagctgacacccctgttgcgagctctgaaactccataccgccctgagggaactgaggctagccggtaaccggctcggcgataaatgcgtggccgagctcgtggctgcacttggcacaatgccttccctggctcttctagacctcagctccaaccatttaggcccagagggattacgacagctagccatggggcttcccggacaagctacgttgcagtccctcgaggaactcgatctatccatgaacccacttggggacgggtgcggacagtcactcgcctccctcctccatgcatgccccctgctttccacattgagattacaggcttgtggctttggtccaagcttttttctcagccaccagactgccctggggtctgccttccaggatgctgagcacttaaaaaccctttctcttagctacaatgccctcggcgcaccggctctggctcggacactccagagcttgccggcaggcacattgctgcacttggagctgagtagtgtggctgccggaaaaggggacagcgacttgatggagccagtgtttagatacctcgcaaaggaaggttgcgcccttgcgcacctcactcttagcgcaaatcacctgggcgacaaagccgtgcgcgacctctgtagatgcttaagcttgtgtccttctctgataagtctcgatttatcagccaatcctgagatctcatgcgccagcctggaagagttgctaagcactttgcaaaaacggccacaaggcctgagtttcctgggcctcagtgggtgtgcagtgcaaggccctttaggtctgggcctatgggataaaattgccgcacagttacgggaattgcaactctgtagtaggaggctatgcgctgaggatagagacgccctgcgacagctccaaccttctagacctggtcctggcgagtgtacacttgatcacggctctaaactgttcttcaggaggctctag

SEQ ID NO: 29763 - DNA, 1218 bp, synthetic construct
  source 1..1218: mol_type = other DNA; note = Synthetic coding sequence
atgaattaccaacaacaactcgcgaacagtgctgccattagggccgagatacagcgttttgagtctgttcaccccaatatttactccatatacgaactgttagaaagggtcgaggagccagttctgcagaaccagattagagagcatgtcatcgccatagaagacgccttcgtgaacagccaggagtggacgctctccagatcagtgcccgaactgaaggtagggattgtaggaaacctagcctcgggtaagtccgccctggtccaccggtatctgaccggcacatacgtgcaggaggaatctccagaaggtgggcgattcaagaaagaaattgtcgttgacggacaaagttatctactgctgataagggatgaaggaggaccgccagaagctcagtttgcgatgtgggtggatgcagtcatattcgtattctctctagaagatgaaatctcctttcagactgtgtaccactattactctcggatggctaactaccgaaataccagcgagatccctctcgtacttgtgggcactcaggacgctatttcatccgctaacccgagagttattgacgatgctagagctcgcaagctgtcaaacgacttgaaaagatgcacctattacgaaacatgcgcaacttatggtctcaatgtggaacgcgtgttccaggatgtcgcccagaaaattgtggctacccggaaaaagcagcagctgtcaataggcccatgtaagtctttgcccaattctccctctcacagctccgtgtgcagcgcgcaggtgtctgccgtgcatatctcccagacctctaacggcggagggtcactgtctgattatagttcttccgtgcctagcaccccatcaacttctcaaaaggaattgaggatcgatgtcccccctaccgcaaatacacccacccccgtgagaaaacagagtaaacgcagatccaacctcttcacctctcggaaaggatcagaccccgacaaggagaagaaaggcctggaaagccgggctgactctatcggatcaggccgagctattcccatcaagcagggcctgccattctttgttctcgccttaactgcttcaacttacttgcgccctgcaggagccagggccagacagtcctctccctggcctggtccgaggggaggccaaactagcccacactgtgcggagggccctcagagcgcacagctgagtggagcaatgatgaactag

SEQ ID NO: 29764 - DNA, 1245 bp, synthetic construct
  source 1..1245: mol_type = other DNA; note = Synthetic coding sequence
atggctgccgctcctccctcctattgttttgtcgcctttcctcctagggccaaggatgggctcgtggtcttcgggaaaaattccgccaggcctcgggatgaagtgcaggaggtagtttacttttccgcagcagatcacgaacccgaaagcaaagtggagtgtacatacatatctattgaccaggttcctaggacctatgcaataatgatttctcggccagcatggttatggggcgctgagatgggagccaatgagcatggcgtgtgtatagccaatgaggccataaacactcgagagcctgcggcagagatcgaggccctactgggaatggatttggtccgcctgggcctggaacgtggcgaaacagccaaagaggccttagatgtaattgtgtcactgttggaagagcatggacagggcggaaattatttcgaggatgccaattcctgtcacagctttcaaagtgcatatctaatcgtggatcgcgatgaggcttgggtgcttgagacgataggcaagtattgggcggctgaaaaagtaactgaaggagtgcggtgcatctgttctcaactgtcactaaccactaagatggacgccgagcaccccgagttgcgatcttatgcacaatcccaaggatggtggaccggcgagggcgagttcaacttctccgaggtgttcagccctgtggaggatcacctggattgtggtgctggaaaagactcccttgagaagcaggaagaatcgatcactgttcaaacaatgatgaataccttgcgcgacaaagctagcggggtgtgcatagacagcgaattctttcttactactgcctccggagtgtccgtgctacctcagaaccggtcctccccttgcattcactacttcacagggacacctgatccctccaggagcattttcaaacctttcatctttgtagatgatgttaagttggtgcctaaaactcagagcccgtgttttggtgacgacgatcccgctaaaaaagagcctcggtttcaggagaagcccgaccgcaggcacgaactttacaaagctcacgaatgggccagagccatcattgagagtgatcaagaacaagggcgaaagctgcgatcaaccatgttggagttggagaagcagggcctagaggctatggaggaaattcttactagcagcgaacctcttgatcctgcagaggtcggcgacctgttttatgattgtgtcgatacagaaatcaaattcttcaagtag

SEQ ID NO: 29765 - DNA, 645 bp, synthetic construct
  source 1..645: mol_type = other DNA; note = Synthetic coding sequence
atgggacccttgccaaggactgtcgaactattctatgacgtcctttccccatactcttggttgggattcgagattctgtgccggtaccaaaatatttggaacataaacctgcaactgcggccttccctgatcacgggcatcatgaaagattcagggaataagccccctgggctgctgcctagaaagggactgtacatggcaaacgatctcaagctcctgcgccaccacctccagatccctattcatttccccaaggacttcctgtccgtgatgttggagaaggggtcactgagcgctatgcgatttctgactgctgtaaatctggagcacccagaaatgctggaaaaggctagtcgagaactgtggatgagggtgtggtcccgggcagcagaaaaagcagggatgtctgcagagcaggcgcagggattgctggagaaaatagcgacgcctaaggtgaagaaccagctgaaagagaccactgaggcggcatgccgatacggtgcatttggcctcccaattactgtcgcgcacgttgacgggcagacgcacatgctgttcggaagtgacaggatggagcttctagcacacctcctcggggagaaatggatgggcccaattcctcccgctgtgaatgccaggctttag

SEQ ID NO: 29766 - DNA, 4206 bp, synthetic construct
  source 1..4206: mol_type = other DNA; note = Synthetic coding sequence
atggccgataccgatcttttcatggagtgtgaggaggaagaactggagccttggcagaagatctccgacgtcatagaggattcagtcgtggaggattataattccgtagacaaaacgaccacggtttcagtctctcagcaaccagtttccgcacctgtgcctattgccgcacatgcatctgtggctggccatctgtccacgtcaaccactgtcagctccagcggcgctcagaattccgatagtactaagaaaaccctggtgacccttattgccaacaataacgctgggaacccactcgtacagcagggcggacaacccttgattctaacccaaaacccggcacctggtctgggcaccatggtgacacaaccagtgcttagaccagtacaggtgatgcagaacgccaatcatgtaacctctagcccggttgcctcgcagccaatattcatcacaacacaaggattccccgtgcggaacgtccgtccagtgcagaacgctatgaaccaagtgggtatcgtgctgaatgtccagcagggccagacagtgaggcctattacactcgtgcccgcacctgggactcagtttgtaaagccgactgttggagttccacaagttttttcacagatgactccagtaaggcccggatctacgatgcccgttagacctactacaaatacctttacaactgtcatccccgcaactcttaccatccgatctacggtgccccaaagccagtcccagcagacaaaatcaaccccctccactagcacaacccccaccgcgacccagcctacctctctggggcagctggccgtccagagccccggtcagtctaaccaaacaactaatcctaaacttgtctctatagcctccttcgtgaccgtcaagcgtccaggagtcacgggagaaaattccaacgaggtcgccaaattggttaataccctcaatacaattcccagcctgggccaatctccagggcctgtggtcgtgagcaataactcctccgcccatggatctcagagaacttctggtcccgaatcatccatgaaggttaccagttcaatcccagtgtttgacttgcaagacggcggaagaaagatctgcccccgatgtaatgcccaattccgagtgacggaggccctgcggggacatatgtgctactgctgtcccgagatggtcgagtaccaaaagaagggaaaatctctggactcagagccttccgtgccctccgccgctaagccaccctctcccgagaagacggcgcctgtcgccagcactccctcttctactccaatcccagcattgtctcctcccaccaaagtgccagagccaaacgaaaatgtcggggatgccgtccagacaaagcttataatgctggtagatgatttttattacggcagagatggaggaaaggttgcccagctcaccaactttcccaaggtggccactagctttcggtgccctcactgtaccaagcgactgaaaaacaacattcgcttcatgaaccacatgaagcatcacgtcgaactagatcaacaaaacggcgaggtcgacggtcacaccatctgtcaacactgctatagacagttctcgacccctttccagctccagtgccatcttgagaatgttcactcaccctatgagtccacgactaagtgcaagatatgcgagtgggcttttgaatctgagcccctcttcctccagcatatgaaggatacacacaaacctggtgaaatgccctacgtctgccaggtttgccagtataggtcatccctgtattcggaggtagatgtccactttcggatgatccacgaggatacgcggcacctcctctgtccctactgcctcaaggtgttcaagaatggcaacgctttccagcagcattacatgagacatcagaagcgcaacgtctatcactgcaataagtgccggctgcagttcctgtttgccaaggacaaaattgaacataagctccagcaccacaagactttcagaaagcccaagcagctggaggggctaaaaccaggtaccaaggtgactatcagagcctctcgcggacagccccgaacagttccagtgagctcaaatgacactcctccctcagctctgcaagaggctgcccctctcactagcagtatggatccactacccgtgtttttgtatcctcctgtgcagcggtccattcagaaaagggccgtgcgaaaaatgagcgtgatgggcaggcagacctgtttggaatgctctttcgagatacccgattttcctaaccacttccctacatatgtccattgcagtctgtgcagatacagcacatgctgctctagagcttacgcaaatcacatgatcaacaatcacgtgcccaggaagtccccgaaatatctggcgttgttcaagaactccgtgtcgggcataaagttggcttgtaccagctgcactttcgtcacaagcgtgggagatgccatggcaaagcatcttgtctttaacccaagccatcgctcctcctctatcttaccccgtggattaacttggatcgctcactctagacatgggcagacccgcgaccgcgtccatgaccgaaacgtcaagaatatgtaccctccacccagcttccccaccaacaaggccgcaacagtgaaatctgccggagccacgccagccgagcccgaagagttgctgacaccgttagcacctgctcttccgtctcccgctagcaccgccactcccccacccactcccacccacccccaagcactggccctccccccactcgcaaccgaaggggctgaatgtctcaatgtagatgaccaggacgagggtagcccagttacccaggagcccgagctggcatctgggggtggaggaagcggaggtgttggaaagaaggaacagctcagcgtgaaaaaactgagagtcgtcctgttcgccctctgctgcaatacagagcaagccgctgagcattttaggaacccacaacgtcgcatacgccgttggctacgacgcttccaggccagccagggcgaaaatctggaaggtaaatacctttcctttgaggctgaggaaaagctggcagagtgggtgttgactcagcgggagcaacaattgcctgtgaacgaggaaactcttttccagaaggccaccaagatcggtcgttctctagagggcggtttcaaaattagctatgagtgggccgtgcgctttatgctgcgccaccacttgactccacatgctcggagagccgttgcacacacgctgcccaaggacgtggccgaaaacgctggcctgttcatagatttcgtgcaaagacagatacataatcaggatttaccgcttagtatgatagtcgcaattgacgaaatttctctgttcctggacaccgaggttctgagctctgatgatcggaaggagaacgcccttcagaccgtgggcacaggagagccctggtgcgacgtggtgctcgccatcctcgccgatgggacagtgcttccgactctggtgttctaccggggtcagatggaccagcccgctaatatgcccgatagcatccttctggaagcaaaggagagcggatatagtgatgatgagatcatggagctttggtctaccagggtctggcaaaagcataccgcgtgccaacggtctaagggtatgctggtcatggattgccatcggacgcacctttctgaggaagttctggccatgctgagtgcgtccagcacactgcccgcagttgttcccgctggatgttcgagtaaaattcagcctttagatgtgtgtataaaacggacggtgaagaactttctccacaagaaatggaaagaacaggccagggagatggccgataccgcctgcgatagcgacgtgctcctccaacttgtgctggtgtggttaggggaagttctgggggtgatcggcgattgccccgagttggtacagagatcctttctcgttgcctccgtactacccggacctgatggtaatatcaattcaccaacgagaaatgcagatatgcaggaagagttgatcgcaagtctggaagagcaactgaagctaagcggtgagcatagtgaatcctccactccacggccacgaagcagtcccgaggaaacaattgaacctgagagtctccatcaactgtttgagggagagtctgaaactgagtccttttacggatttgaagaagccgacctcgacctgatggagatttag

SEQ ID NO: 29767 - DNA, 1398 bp, synthetic construct
  source 1..1398: mol_type = other DNA; note = Synthetic coding sequence
atggaaccttccagtctggagctcccagcagacaccgtgcagcgcatcgctgctgaattgaaatgtcaccccacagacgagagagtggcccttcatctggacgaggaggacaaactgagacacttccgcgagtgtttttatataccgaaaattcaggatttacctccagtggatctgagcctagttaataaggacgagaacgccatatactttttaggcaattccctaggcctgcaaccaaagatggttaagacttacctcgaagaagagcttgacaaatgggcaaaaatagcagcatatggtcacgaggtcggtaaacgcccttggattacaggtgacgaatcaatcgtgggactcatgaaagatattgtcggagccaatgagaaagaaatcgctctgatgaatgctctcacggtcaacttgcatttgctcatgctgtcattctttaagcccacacctaagagatataagattctgctggaggccaaggccttcccctccgaccattatgcaatcgaaagtcagcttcagttgcacggacttaacattgaagaatccatgcgcatgatcaaaccgagagagggagaagagactcttcgaattgaggatatcctagaagtaatagaaaaagagggcgactcaatcgctgtgatactgttctcgggcgttcatttttacacgggacagcacttcaacattcctgccataactaaagccggacaagcaaagggttgctatgttggtttcgacctggcccatgccgtgggaaatgtcgagctctatctgcatgattggggcgtcgactttgcgtgctggtgttcatacaagtatcttaacgcaggggctggagggattgcgggtgcatttatacacgagaaacatgctcataccatcaagcccgctctagtcggctggtttgggcatgaactttcaacccgatttaaaatggataataaattgcagctgattcccggtgtgtgcgggtttcgaatctcgaatccacctattctgttggtctgctccctccacgcatcactagagatttttaagcaagccactatgaaggcactgagaaagaaatctgtcttactaacaggatacctggaatatctcatcaagcacaactacggaaaggataaagctgctaccaagaaacctgtcgtgaatattatcacaccaagccatgtggaagagcgaggatgccaacttacaatcacgtttagtgttccgaacaaggatgtctttcaggaattagaaaagagaggggtggtgtgtgacaagaggaatcctaacggcatacgggtcgcacccgttccactttataatagctttcatgacgtctataagttcacaaacctcctgacatccatccttgatagtgctgaaacaaagaattag

SEQ ID NO: 29768 - DNA, 3210 bp, synthetic construct
  source 1..3210: mol_type = other DNA; note = Synthetic coding sequence
atgtacctccttgatgggagcggtgagcccgcttcgcccccagcggacgccatgccacgcggaactcccccaaggaaaacagtatatcgcatcagcgtcaccatggtgcggaaagagcagttagctgctcccggaagtgggggacccgacccccgacccgtcaggagacctaggcccgctcggtctccagatgcaccaggcagactagaggaagaggctgaagaggcagagggtgctgaggaacccgaagggccacggcctcgagcatgggactttagaacctttcggacccggagtacagggcagctcgaactcggaagattacggccttgtgccaggggtctggagccagccgacctggccggttctgccccagccgaagaggaaggcagaggatctccggcaagtggatcccctgatgtggaaggagcgagagctgctcctcttaggcgatctctcagtttccgacactggtccggccctgaggccccacaaggacgcactctgggtggaggcaggaggcattccagctctggctcactggcttgggctccttgcgatgaagccgcagccggtacaacactggaacctgccactgcaacccagccagctagcgaaaagagaaataccttggatgtgggcgaggtgctttcgaagaatgatgcactgagcgatctggaaagatgggagcgctctaagagcaaaaatcgcacgctggataattcggatttacagcggcttgaacgcgctcgggcagcggctggagccggagctgcttctgaacacaggttgctgcgatttttctcaggtatatttgccaggcgggacgggggtcccggtggtgggcctagccccagatcaggtgcctcacggccacgtggttatttctctctgaggagggctccagccgaggcgcacagcagttctgcggaaagcattgacggttctcctaggagagacgcgttcgtgaattctcaagaatggacgctttctcgctccgtgcctgagttgaaagtcggaattgtgggcaaccttgcctcagggaagagcgctcttgtgcataggtatctcaccggtacatatgtgcaggaagagtctccagaaggtgggcgattcaaaaaggaaattgtagttgatgggcaatcatatttgcttctaattcgagatgaggggggtcctccagaggctcagttcgctatgtgggtcgatgcggtaatttttgtgtttagcctggaggatgagatctcatttcagaccgtatatcattactacagtcgaatggcgaattacaggaacacctccgagatcccgcttgtgctggtcgggacacaggatgcaattagcagtgcgaatccacgggttatcgacgatgcgagggcacgcaagctttctaatgacctgaaaaggtgcacatattatgagacctgcgccacttacggtctgaacgtggagagagtcttccaggacgttgcccagaagatcgttgctactcgaaaaaaacagcagttgtcaattggcccttgcaagagcctgcccaacagtccgtcgcacagctctgtttgtagtgctcaggtctcagcggttcacattagccaaaccagtaacggaggcggaagtctgagcgattactcatcatcagtgccgtctacccctagcacgtctcaaaaagaactccgcatcgacgtccctccgactgcaaacaccccaaccccagtgaggaagcaatccaagcgtcgcagcaatctctttacaagcagaaaagggtcagatcctgataaagaaaaaaagggcctagagtcacgggctgactccatcggcagcggtagggctatccctatcaagcagggcatgctgcttaagaggagcggaaaatcccttaacaaggagtggaagaagaaatatgttacattgtgtgataatggagtcctgacctatcatcctagcttacatgactatatgcagaacgtacacgggaaagagattgatctgctccggaccactgtgaaggtgcctgggaaacgcccaccacgagccacctccgcctgcgctccgatttcttccccgaaaactaatgggctgagcaaagatatgagctcccttcacattagccccaactcggatactggactaggagattccgtatgcagctcaccatcaatcagcagcaccacatccccaaaactcgacccccctccgtcacctcacgccaatcgcaaaaaacaccgacggaagaagtctacttcaaactttaaggcagatggactgagcggcactgctgaggaacaggaagaaaatttcgagtttattatcgtctctctgacaggccaaacttggcattttgaagcaaccacatatgaggagagagacgcttgggttcaggccatcgagtcacagattctggcatcccttcagtcctgtgaatccagcaaaaacaaatctcgacttacctctcaaagtgaggcgatggcgttacagagtatcaggaacatgagagggaactctcactgcgtggactgtgagacacagaatccaaactgggcaagtctgaatctgggcgctctgatgtgtatagaatgtagcggaattcatcgcaatttaggcacccatctgagcagagttaggagtctggatctggacgactggccggtcgagctgatcaaggtcatgtctagtatcggtaatgagcttgcaaacagtgtctgggaggaatcaagccaggggaggacaaagccttccgtggattccacacgggaggagaaagagcgctggatccgtgctaaatatgagcagaagcttttcctggccccactgccctgtactgaattatccctcggacagcacttgctccgagcaacagccgatgaggacttgagaactgcaattttactgctcgctcacggctctcgcgacgaggtgaacgagacatgcggtgagggtgacggccgaaccgcactgcacttggcctgcaggaaaggcaatgtggtgctagcgcagttgctgatctggtatggcgtggatgtcactgcgagggacgctcatggtaacacggctctcgcatacgcacgacaggcatctagccaggaatgtattgacgtgttgctgcagtacggctgcccagacgaacgatttgttctgatggcaactcctaatctgtctcgacgtaataacaatcgcaacaacagttcaggccgagtgccaaccataatatag

SEQ ID NO: 29769 - DNA, 1260 bp, synthetic construct
  source 1..1260: mol_type = other DNA; note = Synthetic coding sequence
atgaacaatcagaaacagcagaaaccgacactgtcagggcagagatttaagaccaggaagagggatgagaaggaacgtttcgaccctactcagtttcaggactgtataattcagggtctgacagaaaccggcactgacttggaagctgtggctaaattcctggatgccagtggagcaaagttagattataggagatatgctgagacgctgtttgatattctcgtggccggagggatgctggccccaggtggcactctggctgacgacatgatgcggacagatgtttgtgttttcgcggctcaggaagatctggaaactatgcaggcgttcgcacaagtatttaacaagcttattcgccgttacaaatacttggagaagggattcgaggacgaagtgaagaagttattattatttcttaagggctttagcgaaagtgagaggaacaagctggccatgctcaccggagtgctactcgccaatggcactctgaacgccagcatcctcaacagcctgtacaacgagaacctcgttaaggagggggtcagtgctgcgttcgccgtcaagttatttaagagttggatcaacgagaaggatatcaacgcggtggccgcaagtctgaggaaggtctctatggacaaccggcttatggagctctttccggcaaacaaacagtctgtagagcacttcaccaaatacttcaccgaggctggtctcaaggaactgtccgagtatgtgcgcaatcagcaaactatcggtgctcgaaaagaactacagaaagaacttcaagagcaaatgtcccggggtgaccctttcaaagacataatcctctacgtgaaggaagagatgaagaaaaataacatccctgagccggttgtcatcggaattgtgtggtcgagcgtaatgtccacagtggagtggaacaagaaggaggagttggtggcagagcaggcaatcaaacacctaaagcagtacagccccctcttggcggcattcactactcagggccagagcgagttgaccttgttgctgaagattcaggagtattgctatgataatattcactttatgaaagcattccaaaagatcgtcgttcttttctacaaggccgaagtgctgtctgaagagcctattttgaagtggtataaagatgcccatgtggccaagggcaagtctgtttttctggagcagatgaaaaaatttgtggagtggctgaaaaatgccgaagaggaaagcgaatccgaggctgaagaaggtgattag

SEQ ID NO: 29770 - DNA, 2769 bp, synthetic construct
  source 1..2769: mol_type = other DNA; note = Synthetic coding sequence
atgatcacttcagcagccggaataatctcattgttagatgaagatgagccccagttgaaagaattcgcgctccacaagctgaatgcagttgtgaacgatttctgggcagaaatatccgagagcgttgataagattgaggtgctttacgaggatgaggggttccgaagcagacagttcgccgctttggttgcctcaaaggtgttctaccatctcggagctttcgaggagtcgctgaactacgcccttggtgctggcgatttgttcaacgtgaacgataactccgagtatgtggaaaccatcatcgctaagtgtatcgatcattataccaagcagtgcgtggaaaatgcagacttgcctgaaggcgagaagaaacccattgatcagcgattggaaggaatcgtgaacaaaatgttccagcggtgcctggacgatcataagtataagcaggccattgggatcgccttggaaacacgtagactggatgtattcgagaagaccatattagagtcaaatgacgtccctggaatgcttgcatactcccttaaactttgtatgtctctcatgcaaaataaacagttccggaacaaagtcttgcgtgttctggtcaaaatctatatgaacctggaaaaacctgatttcataaacgtatgccaatgccttattttcctcgacgatccacaggctgtgtctgacattctggaaaagctggtcaaggaggataacctcttgatggcataccagatttgcttcgacttgtatgagtccgccagccaacagtttctgtctagcgtgatccagaatcttaggacagtgggcacccccatcgcatccgtgcccggatccacaaacaccggaaccgtacctggatcagagaaagactctgattccatggagacggaagagaagacgagctctgccttcgtcggcaagacccctgaggccagcccagaacccaaagaccaaacactgaagatgattaaaatacttagcggtgaaatggccatcgaactccatcttcagtttctaatccgcaacaataacactgatctcatgatcctgaagaacactaaggacgcagtgaggaacagtgtatgccacacagctacagttatagcgaattcttttatgcactgcggcaccacatccgaccagttcctccgcgacaacctggaatggctggccagggcgaccaactgggcgaagtttaccgctactgccagcctgggagttattcacaaaggccacgaaaaggaagccctgcagctgatggccacgtacctgcctaaagatacgtcacctgggagtgcttaccaagaaggcggaggcttgtacgcgctggggctaatccacgcgaaccatggaggcgacatcattgattatctgctcaaccagctgaagaatgccagtaatgacatcgtgcgacatggcggttctttggggttgggcttggctgctatgggcacggcccgacaggatgtctatgacttgctaaagacaaacctctaccaggatgatgccgtgaccggcgaagctgctggactcgcactaggcttagtcatgctggggagcaagaatgctcaggcaatcgaggatatggttggctatgcacaagagacgcagcacgaaaagattttacgtgggcttgccgtcggcatcgccctcgtcatgtatgggcgtatggaagaggccgatgccctgattgaatccctgtgtagagacaaggatccaatcctgcggcgttcaggaatgtatacagtagcaatggcctactgcgggtctgggaataacaaggccataagacggctgttgcatgtggccgtctcagacgtgaatgatgacgtgcgccgagccgcagtggaatccctcggctttattttatttcgaacaccagaacagtgcccaagtgttgtgagcctactatcagaatcttataatccacacgtgcggtatggtgcagccatggcgctcgggatctgttgcgcgggaacaggcaacaaagaagctataaatctcctggagcccatgacaaatgaccccgtgaattacgtgagacagggtgctctgattgccagtgcgctgatcatgatccagcagaccgagattacatgccctaaggttaatcagttccgccagctgtactcaaaagtcatcaacgataagcatgatgacgtcatggcaaaattcggcgcaatcttggcgcagggcatccttgacgccggtgggcataacgttacaatttccctacaatctcgtactggacatacccacatgccctccgtcgttggcgtacttgtctttacacagttctggttctggtttcccctctctcacttcctgtcattggcctataccccaacctgcgtgatcggtctgaataaagacttaaaagtgtctactgcagtcctgtccatcaccgctaaggcgaaaaagaaggaaaaggagaaagagaagaaggaagaggagaaaatggaggtggacgaggccgagaaaaaggaagaaaaagaaaaaaagaaagagcccgaacctaactttcagctgttagataatcccgctagagttatgcctgcacagctcaaggttctgacgatgcctgagacctgccgttatcagccttttaagcccctctccatagggggaatcattattctgaaagatacatcggaggatattgaagaactggtggagccagtggccgcacatggccctaaaatcgaagaggaggaacaggaacctgagccgccagaaccattcgaatatatagatgactag

SEQ ID NO: 29771 - DNA, 363 bp, synthetic construct
  source 1..363: mol_type = other DNA; note = Synthetic coding sequence
atggcccctgccaaaaagggaggggaaaaaaagaaaggacgcagcgccatcaatgaggtagtgacgcgggagtatactataaacatacacaagcgtattcatggcgtggggtttaagaaaagagcccctcgcgctttaaaagagatcaggaagttcgcaatgaaagaaatgggcaccccagacgttagaatcgataccagactaaacaaagcagtgtgggccaaaggcatccggaatgtgccttataggattcgtgtgcgcctgagtagaaagcggaatgaggatgaagattcccctaacaaactctataccttagtgacctatgtgccagtgaccacttttaaaaattgccaccatcagtag

SEQ ID NO: 29772 - DNA, 378 bp, synthetic construct
  source 1..378: mol_type = other DNA; note = Synthetic coding sequence
atgagttctacccttgggaagctttctaaccaggtggaggaaacacttcccctattaaagaaggtgccagccaattatttccacatctgtagtgccatcttgatgggtttcagcctgagtaagtccgccacccaagtcagcgctattcacatggactcaaaagtggacgatcacttgatacgaggtactgaaaaatccagactggaaccagccacacagttgttccagaatacaaaaaagatcaggcttgaagatacaaatcaggagaatttcaccaggatcgaaggaactgggaccggatcgctgagcggcaaagccttgggatcagttgtgtatgtaaaggagtccgacgggttggagatgacagacgtcgagtag

SEQ ID NO: 29773 - DNA, 1500 bp, synthetic construct
  source 1..1500: mol_type = other DNA; note = Synthetic coding sequence
atgagcaccccgagcgggatttccacatggctgtctctgccagtgtcaacccccgctagtatcactagcatcagagtaacccaaaagagttctgggccttgggccttttcctcatgcacctacgtttccggacctggagtgtgtatttcttcgctgtcctgttcacgagtaggctcctcatcttttagagggggtttagggggtgggtacggcggagcgagtggcatgggcggaataatcgccatcatggtgaatcagagcctactgagtcccctgaacctggaagtggacccaaatatccaggctgtctgcactcaagaaaaagaacagattaaaacactgaataacaagttcgcctcgtttatcgacaaggtttggtttctggaacagcagaacaaggttctggagacaaagtggagcctacttcaacagcagaaaatggcacgctctaacatggataatatgctggagtcctatattaacaatttgaggcgtcagctggagaccttaggccaggaaaaattgaaactggaagcagagttaggaaacatgcaaggtctgggtgaagacttcaagaataagtacgaagatgagattaataaacatacggaggtggaaaacgaattcgtgctgatcaaaaaggacgtggacgaggcctatatgaacaaagccgaactggagtctcttctggaagggctgacagatgagattaatttcctaagacagctctatgaagaggaaattcgggaactgcagagtcagatctctgacatgagtatggtcctttccatggactattcctgttctagggacatggactccattattcccgaggtgaaagtccaatacgaggagattgcaaactgctccagggccgaggcggagtcgatgtaccagattaagtatgaagagttgcagactctggctgggaagtacggggatgatctctcaaggacaaaaactgaaatcagcgaaatgaatagaaacatcagttggctccaggccgaaactgagggtttgaaagggcagagggccagcctggaagcagccattaccgacgctgagcagcggggtgagttagccgtcaaagatgctaatgccaagttaagtgagctggaggctgcccttcagcgagccaaacaggacatgatgggccagcttcgggaataccaagaactgatgaacgtcggactgacactggacatcgagatagcaacctatcgcaagctattagagggagaagagagcaggctggagtcaggcatgcagaacgtgtcaatccataccaaaactactagctcctacgcaggagggctctcatctgcatacggcggattgaccagtccgggaattatttacagattaggcagcagctttgggtcagccgctggttctagtagcttctccaggacctcatctacgagggccgtagtagtgcgcaaaatcgaaacacatgatggaaaacttgagtccgaatccagcgatgtcctgagcaagtag

SEQ ID NO: 29774 - DNA, 504 bp, synthetic construct
  source 1..504: mol_type = other DNA; note = Synthetic coding sequence
atgtacatgggaatgatgtgcaccgcaaagaagtgcgggatccggtttcaaccccctgcaatcatcctgatctatgagagtgagatcaagggcaagattaggcagcggataatgcctgtccgcaacttttccaaattctcagactgtaccagggcggcagaacaactgaagaataacccgaggcacaaaagctatttagaacaggtaagcctaaggcagctggaaaagctgttctcatttctgagagggtacctttcaggacagtccttggctgaaacgatggaacagatccaaagggagactacgatcgaccctgaggaggacttgaacaagctcgacgataaggaacttgccaaacgcaaatccatcatggacgagctgttcgaaaagaatcagaagaagaaggatgaccccaactttgtatacgacatcgaagtggagtttccacaagatgatcagctgcagagctgtgggtgggacacagagagtgccgatgaattctag

SEQ ID NO: 29775 - DNA, 378 bp, synthetic construct
  source 1..378: mol_type = other DNA; note = Synthetic coding sequence
atggcccctgcaaagaagggaggggagaagaagaagggccgtagcgccattaacgaggtagtgacgcgggagtacaccattaacattcacaagcgcatacacggggtcggctttaaaaaacgagctccccgagcccttaaggagatccgcaaatttgcaatgaaggagatgggcacaccggacgtgaggatcgacactaggctgaataaagccgtctgggccaaaggtattcggaatgtgccatatcgcatcagggtgcggctgtcccgaaaaaggaacgaggatgaggatagtccaaataagttatatactctcgtgacttatgtgcctgttacgacatttaaaaatctgcaaacagtgaacgttgatgagaactag

SEQ ID NO: 29776 - DNA, 1005 bp, synthetic construct
  source 1..1005: mol_type = other DNA; note = Synthetic coding sequence
atgacacgaagtcttttcaaaggtaatttctggtccgcggatattctcagcaccatcggttatgataacatcattcaacacctcaacaacgggaggaagaattgcaaggaatttgaagatttcttgaaagagcgcgctgccatcgaagaaagatatggaaaggatcttctgaatctgagtcgaaaaaagccgtgcgggcagtcagagatcaataccttgaaaagagctctggaagtctttaagcagcaggttgataacgtggcccagtgtcatatccagctggctcagtctctccgcgaagaagccagaaaaatggaagagttccgggagaaacaaaagctgcagaggaaaaaaacagagctaatcatggatgcaattcacaaacagaagtccctacagttcaaaaagacgatggacgctaagaaaaattatgagcagaagtgtcgcgacaaggatgaggctgagcaagcagtctctcgaagcgcaaacctggttaatccgaaacagcaagagaagttgtttgtcaaactggctacatccaagacagcagtggaagactcagacaaagcctatatgcttcatatcggtaccctcgacaaggtgcgcgaggagtggcagagcgagcacatcaaggcctgtgaggctttcgaagctcaggagtgtgaaagaattaatttttttagaaatgccctgtggctgcacgtaaatcagctgtctcagcagtgtgtgacttctgacgagatgtatgagcaggttcgtaagtctctggagatgtgctccattcagagagacatagaatactttgtgaatcagcggaagactggccagataccacctgcgcctatcatgtacgagaatttttattcaagccagaagaacgccgttcctgctgggaaggccacagggccaaatctggcccgacgcggacctctgcctattcccaaatcctcccccgacgatcccaattactctttagtcgacgattattccttgctgtaccaatag

SEQ ID NO: 29777 - DNA, 597 bp, synthetic construct
  source 1..597: mol_type = other DNA; note = Synthetic coding sequence
atgaagaaggtccggctgaaagagcttgagtcccgactgcagcaagttgatgggttcgagaaacctaaacttcttctggaacagtacccgacccgtcctcatatcgcagcctgtatgctatacacaatccataatacatatgacgatattgaaaacaaagtcgtggccgacctcgggtgcgggtgcggagttctgtcaatcgggactgccatgttgggagccggactgtgtgtaggatttgatattgatgaggacgctctagagatttttaatcgaaatgcagaggagtttgaactgaccaacattgacatggtccagtgcgacgtttgcttactgagcaatcggatgtccaaaagcttcgacaccgtgattatgaacccccctttcgggaccaagaacaataaaggcactgacatggccttcctcaagaccgcgctggagatggcacgaacggccgtgtatagcctacacaagagtagcacccgggagcacgtgcagaaaaaggcggctgaatggaagattaagatcgacattatcgccgaactgcggtacgacttgcctgcatcctacaagttccacaaaaagaaaagcgtgtag

SEQ ID NO: 29778 - DNA, 1125 bp, synthetic construct
  source 1..1125: mol_type = other DNA; note = Synthetic coding sequence
atgttggccccagggtgtgaactcgacccagatcaagaggtcgtcagaacccgccctgaggatgttcctgcgtcaccttcaacatcgaccatgattgtgtccgttctgcgtccgccttctcacgctagttgcacagcatgtggaaccgtaactttccacattgtcgagcgcatggcaagcgtgattcccgcaagcaatcggagtatgaggagtgaccgcaatacttacgtggggaagagatttgttcacgtcaagaacccttatctggatctcatggacgaagatatcctttatcacctggatcttgggacaaaaacacataacctgcccgcaatgtttggggatgtcaagtttgtttgtgtggggggtagtccaaatagaatgaaagcattcgctttgttcatgcacaaagagcttggttttgaagaggcggaggaggacatcaaagatatatgtgccggtaccgatcggtattgcatgtataaaactggcccagtgctggcaatctcccacggcatgggaattccttctatctccattatgctgcacgagttaattaagctgctccaccatgcgcgttgctgtgacgtgacaatcatccgtatcggcactagcggaggaatcggtatcgctccgggaacagtcgtaattacagatattgcagtagatagtttctttaagccaagatttgagcaggtgattcttgataacatagtgacgagaagcactgagttagataaggagctttccgaagagctgttcaactgttctaaggaaattcctaattttcccacactcgtcggccacacaatgtgcacctatgacttttacgagggtcaaggacgtttggatggggcactctgctccttcagtcgcgagaagaagctcgattacctgaaacgagcgttcaaggcgggtgtaagaaacattgagatggaatcgacagtgttcgctgctatgtgcggcctatgtggtctcaaggcagcagtcgtgtgcgtgaccctcctcgataggttggattgtgaccagatcaatctgccgcatgacgtactcgtggagtaccaacagagaccccagctcctgataagcaattttattcggcgacggctggggctgtgcgactag

SEQ ID NO: 29779 - DNA, 4149 bp, synthetic construct
  source 1..4149: mol_type = other DNA; note = Synthetic coding sequence
atgctgcgcaagctgacaatcgagcagatcaacgattggtttacaatcgggaagacggtgactaacgtcgaactcctcggagctccgccagctttccccgcaggagctgcgagggaagaagtgcagagacaggacgttgctcctggagcaggccctgctgcacaggctcccgctcttgctcaggcccctgcaaggcccgctgccgcatttgagcggagtctcagtcagaggtctagcgaagtggaatacataaataagtacaggcagttggaagcccaggaattagatgtctgtcgaagcgtgcagccaacttcaggcccagggcctcgcccatccctcgctaaactctctagtgtcacctgcattccgggtaccacttataaatatccagacctgccaatatccaggtataaagaggaggtagtgtccttgatagaatctaattccgtggttataatccacggagctaccggttcaggcaaatcaacccagctgcctcagtatattctcgaccactatgtccaaagatctgcatactgcagcattgtcgtgacccagccacggaagattggggctagctcaattgccaggtggatcagcaaagagagagcttggactctgggcggagtggtgggttatcaagttggcttggaaaaaatagccacagaagacactcggctgatttacatgaccacaggcgtgctactccaaaaaattgtgtctgccaaaagcttgatggagttcacccatattatcatcgatgaagtccacgaacgcactgaggagatggactttctgctgcttgtggttagaaagctgctcagaactaactcccgttttgtcaaggtggtgctaatgtcggcaactatttcttgcaaggagtttgcagactatttcgcagttccggtccagaacaaaatgaatccggcatacattttcgaagtggagggcaagccacactccgtcgaagaatactatctgaatgacttggaacacatccatcattccaagctgtcaccccatctgcttgaagaaccagtgattacaaaagacatttacgaggtcgccgttagtctgatccagatgtttgacgatctggatatgaaggagagcgggaacaaggcttggtctggtgcacagttcgtcctcgagcggtcctccgtcctagtctttttacctggcttaggcgaaattaattacatgcacgagctgctcacatcgctggtgcataagaggctccaggtgtatcctctacactctagtgtggcactcgaggaacaaaacaatgtctttctgtcccccgtgcccggttaccgcaagattattctgtctactaacatcgccgaaagctcagtgaccgtcccagatgtaaaatatgttatagatttctgccttactagaactttggtctgcgacgaggatacaaactatcaatcgctgcggctgtcttgggcaagtaaaacatcctgcaaccagcggaaggggcgtgcaggtagagtgtcgaggggctattgttatcgactggtgcataaagatttctgggataactctatcccagatcatgtagtgccagagatgttacgttgtcccttgggctccacaattctgaaggttaagctcttggacatgggagaacctcgagcattactggcgactgcactgagcccgccaggtttatccgatatagagcgtactatcttactgctcaaggaagttggcgctctggctgtctcaggccagcgagaagacgaaaatccccacgacggcgagctgacttttttgggcagggttctagcacagctgccagtgaaccagcaactaggaaaactcatcgtgctcggacacgtgtttggctgtctggacgagtgcctgattatcgctgccgcactgagccttaagaatttttttgcgatgccttttcgccagcaccttgatggttaccgaaacaaggtgaacttttccggcagcagcaagtctgattgcatagctttagtagaagcctttaaaacttggaaggcttgtcgccagaccggtgaactgcgttatcctaaagacgagttaaactggggcaggcttaactatatccagattaagagaattcgagaggttgctgaactgtacgaggaattgaaaacccggatatctcagtttaacatgcatgttgacagtagaagaccggtgatggatcaggagtatatttacaaacagcggttcattttacaggtcgtgttggctggcgctttctacccaaattatttcacctttggccagcctgatgaggaaatggccgtgagagaattggccggaaaagaccccaagaccacagtggtgctgaaacacattccaccttacgggttcctgtactataaacagctgcagagcctgttcagacagtgcgggcaggtcaagtcaattgttttcgatggtgccaaagcttttgtcgaattttctagaaatccaactgagagattcaaaaccctgcccgctgtatacatggctatcaagatgtctcagctgaaggtgagtctggagctgtcagtacattccgccgaggagatagaagggaaggttcaaggaatgaatgtgtccaaactaagaaacactcgcgttaatgtagacttccagaagcagaccgtcgacccaatgcaagtgtcgtttaacacatccgatcgaagccagaccgtaactgatcttttactgacaattgacgtaacagaggttgtggaggttggacacttttggggttaccgtatagatgagaacaacagcgagatactgaagaagttgacagctgaaataaatcagctgacgcttgtcccgctcccaacgcatccacatcccgatctggtctgccttgcccctttcgctgactttgataaacagagatattttagggcacaggttctctatgtgtcgggcaattctgccgaagtgttttttgtggactatgggaataagtcgcacgtggacctccatctcttaatggaaatcccatgtcagtttttggaactgccttttcaagctctagaatttaaaatctgtaagatgcgcccaagtgctaagtcattggtttgtggcaagcactggtcagatggcgcaagccaatggtttgcttccctcgtttccgggtgcacacttctggtcaaagtcttcagcgttgtgcactcagttctacacgtagatgtttatcagtacagcggagttcaggatgccattaacatcagggacgttctcatccagcagggctatgctgaactcaccgaggaaagctacgagagtaagcagtctcacgaggtgctgaagggtctatttagcaaaagcgttgaaaatatgactgacggctccgtgccatttcccatgaaagacgatgagaagtatttgatcaggattctgttagagtctttttctaccaataaactgggtacgccgaactgcaaggctgagctgcatggtcccttcaacccttatgagctgaagtgtcatagcttaactcgcatttccaaatttaggtgcgtgtggattgagaaggagtctatcaattccgtgattatatctgacgccccagaagatctccaccagaggatgctagtcgctgcctctcttagcattaacgctactggtagcaccatgctgcttagggagacctccctcatgccccatatccccggactcccagccctactctcaatgctctttgcccctgtgatagaactgaggattgatcagaatggaaaatattacaccggggtcctgtgtggattgggatggaatcccgctaccggcgcttcgatcctccccgagcacgacatggagctggcattcgatgtccaattcagcgtagaagatgtggtcgaggtgaacattctgcgcgcagccattaacaaactcgtctgtgacgggcctaatgggtgtaagtgtttgggccctgaaagggttgcccagctgcaggatatcgccaggcaaaaattattggggctgttctgtcagagtaagcctagggagaagatcgttcccaaatggcatgaaaaaccatatgagtggaaccaggttgatcctaagttagttatggaacaggcagaccgggagagtagcagagggaagaatacgttcctgtaccagttgcacaagttagtcgtgctgggcacctag

SEQ ID NO: 29780 - DNA, 357 bp, synthetic construct
  source 1..357: mol_type = other DNA; note = Synthetic coding sequence
atggatgtgttcttgatgatcaggagacacaagactaccatatttacagatgccaaagagagttccacagtgttcgagctgaagcgaattgtggagggaatcctcaaaaggcctcccgacgagcagcgactgtacaaagacgaccagttacttgacgacggcaagactctgggagaatgtggcttcaccagtcaaacagcccgacctcaggcacctgcgacagtagggttggctttcagagccgatgacacatttgaagccttgtgcattgagcccttctcttccccacctgagctcccagacgttatgaagccacaggattcggggagcagtgctaacgaacaggccgtccagtag

SEQ ID NO: 29781 - DNA, 3228 bp, synthetic construct
  source 1..3228: mol_type = other DNA; note = Synthetic coding sequence
atggtcgtagaggttgactcgatgcctgccgcttcctccgtaaaaaaaccattcggccttcgatcgaaaatgggtaaatggtgttgtcgctgtttcccttgctgcagggagtccggaaagtcaaatgtggggacgtccggggatcacgatgatagcgccatgaagacgttaaggtcgaagatgggtaaatggtgtcgccactgcttcccttgttgccggggtagtggaaaatctaatgttggggcatctggggaccatgatgattccgcaatgaagacactgcgcaataaaatgggcaagtggtgctgtcactgctttccatgctgcagaggctcatccaaaagtaaggtaggcgcttggggcgattacgacgactccgctttcatggagcccaggtatcacgtcagaggggaggacctcgataaacttcaccgcgcagcttggtggggtaaggtgccgaggaaggacttgattgtgatgctgcgcgatactgacgttaacaagcaggacaagcagaaaaggacagcccttcaccttgctagtgccaacgggaatagtgaggtggtgaaattattgctggacaggcggtgccagcttaacgtcctagacaacaagaaaagaactgcattgattaaggccgtccagtgtcaggaagacgaatgtgctcttatgctgctagagcacggtacagatccgaatattccagacgaatacggcaacaccactctccactatgcaatatacaacgaagacaaactgatggctaaagctcttctgctgtatggcgctgacatcgagtcaaagaataaacacggtctgacaccattgctgttgggggtccatgagcagaaacagcaggtcgtgaaattcctgattaaaaaaaaagctaatcttaacgcgctggaccggtacggccgtaccgctcttatcctggccgtttgttgcggcagtgcttccatagtctctctgctcttagagcagaatattgatgtctcttctcaggacctgtctggacagacggccagagagtacgccgtgtcaagtcaccaccatgtcatctgccaacttctcagtgattataaggagaagcaaatgttaaagattagcagcgagaatagcaatcccgagcaggatctgaagttgactagcgaagaagagtcccagaggttcaaggggagtgagaactcacagcccgagaagatgagccaggaacctgaaataaataaggacggcgatcgggaggtggaggaagagatgaaaaaacacgagagtaacaatgtcggacttctcgaaaacctgaccaatggggttacagctgggaacggggacaacggtcttatccctcagcgcaagtcacgtactccagaaaaccagcaatttcccgacaacgagtcagaggagtatcacagaatctgtgaactgttatccgactataaggagaagcagatgccaaaatacagcagtgagaactctaacccagagcaggacctcaagcttacctccgaggaagaaagccaaaggttaaagggctccgaaaacggccagcccgaaaagagatctcaagagcctgagattaacaaggatggggatcgcgaacttgaaaacttcatggctatagaggaaatgaaaaagcatcgcagcacccatgtcggctttcctgagaacctgactaacggggctaccgctggcaacggcgatgatggtctcattccacctaggaagagcaggacacctgagtctcaacagttccctgatacagaaaacgaggagtaccactctgacgagcagaacgatacacaaaagcagttttgtgaggaacaaaacaccggcatcctgcatgacgagattctgattcacgaagaaaagcagatagaggttgttgagaaaatgaactcggagctaagtttgtcatgcaaaaaggagaaggacatcttgcacgagaacagcacacttagagaggaaatagctatgttaaggctggaattggacaccatgaagcaccagagtcagttacgcgagaagaagtacctggaggatattgagagtgtgaaaaagagaaacgataacctgctcaaagccctgcagttgaacgagcttactatggatgatgacactgccgtgctggtgattgacaacggttccggcatgtgcaaggccggttttgccggagacgacgccccacgagccgtgtttccgagcattgtgggacggcctaggcaacaaggcatgatggggggaatgcaccaaaaggagtcctatgtggggaaggaagctcagtctaaaaggggcattttaacgctcaagtaccccatggagcacggtattattaccaattgggatgacatggaaaaaatctggcaccacacgttttataacgagctcagggtggcgcctgaggagcaccctgtgctcctcacagaggctacacttaatccgaaggcaaatcgtgaaaagatgacacagatcatgtttgagacattcaatacgcctgcgatgtatgtcgccatccaggctgttctgtcgttgtacacctccggcagaactacaggcatcgtgatggattccggcgacggagtgacgcacactgtgccaatttacgagggtaacgccctgccccatgccactcttcgactggacctggcaggacgagagctgcctgattacttaatgaagatacttactgagcatggctatagatttactactatggcagaacgcgagattgtgagagatattaaggagaagttgtgctacgtagctttggactttgagcaggagatggccacagtggctagtagctccagcctcgaaaagtcctacgaactgccagacggacaagtcataaccattggaaacgagaggtttcggtgtccggaggccctgtttcagccgtgcttcctaggcatggaatcttgtggcatccacgagaccacatttaattccattatgaaatccgacgtggatataaggaaagacttgtacaccaacacagtgctgagcggcggtaccacaatgtaccctggaatggcccatcgcatgcagaaggagatcgctgccctcgccccttccatgatgaaaattcgcataatcgccccacctaagcgcaaatattccgtttgggtggggggatccatactcgcctctctgtcaaccttccagcagatgtggatctcaaaacaggaatatgatgagagtggcccttccatcgtgcatcggaaatgcctgtag

SEQ ID NO: 29782 - DNA, 381 bp, synthetic construct
  source 1..381: mol_type = other DNA; note = Synthetic coding sequence
atgacagcaaccgagcagtggatattcctttgtgccgctcataaaaccccaaaggaatgccctgctatcgattacacaaggcacaccctggatggcgctgcatgcctattaaatagcaacaagtattttcctagtcgagtgtcaatcaaagaaagttcagtggcaaaattaggtagcgtgtgcaggagaatttatagaattttttcgcacgcatatttccaccataggcagatatttgacgagtacgaaaatgagacattcctttgccaccgctttactaagtttgtgatgaagtacaatctgatgagtaaggataatctaattgtcccaatcctggaggaagaagtccagaattcagtctcgggagaaagcgaagcctag

SEQ ID NO: 29783 - DNA, 2811 bp, synthetic construct
  source 1..2811: mol_type = other DNA; note = Synthetic coding sequence
atggagcccgacatcatcaggatgtatagcagtagcccaccaccactggacaacggagcggaggacgacgacgatgacgagttcggggagtttggcggattctctgaggtttcgccttccggggtggggtttgtcgactttgacacccccgattacacgcgtcctaaggaggagtttgtaccaagcaaccactttatgcctatacacgaattctctgaaaacgtagatagcctgacgagttttaagtccattaagaatggcaatgacaaggacattaccgccgaactgtctgccccagtgaagggtcaatccgatgtcctcttatccaccacttctaaagagatcatctccagcgagatgctggccacaagcattgacggaatggaacgaccagggaacctcaataaggtagtcgagcaaagacagaatgtcggtacacttgagtcttttagtcctggcgactttaggactaacatgaatgtggtgcaccagaacaagcagctggaaagttgcaatggcgaaaaaccaccctgcctggagattctgactaacgggtttgcagtgctggaaaccgtgaatccacagggcaccgatgacctcgacaacgtggccgacagcaaaggaaggaagccgctcagcacacacagtacagagtacaacttagacagtgtgccaagccctgcagaggagtttgcagacttcgcaacattcagtaagaaggagagaattcagctggaagaaattgaatgtgccgttctgaacgaccgagaggcccttaccatccgcgaaaacaacaaaatcaacagagttaacgagttgaacagcgtaaaggaggtggctctggggcgtagtttggataataagggggacaccgatggggaagaccaggtttgcgtgtcggagatctctattgtgacaaatcgcggattttccgtggagaaacaggggttgcccacacttcaacaggatgagttcctgcagtccggagttcagagcaaggcctggagcctggtggatagcgcagataactctgaagccatcaggcgggaacagtgtaaaacagaggaaaagctcgatctgctgacgagcaaatgcgcccatttatgcatggacagcgttaaaacaagcgatgatgaggttggatctccgaaggaggagtctcgcaagtttaccaactttcaaagtccaaacattgatccaacggaagagaacgatctagatgatagcctgtctgtaaagaacggcgacagttccaacgacttcgtgacatgcaatgacatcaacgaagacgattttggcgatttcggggatttcggcagtgctagcggctccaccccaccattcgtcactggaactcaagactccatgagcgacgccaccttcgaggaaagttctgaacacttcccacactttagtgagccaggagatgactttggcgaattcggggatattaacgccgtctcatgccaggaggaaacgatcctgaccaaaagcgatttaaagcaaacatccgataacttgtcagaggagtgccagctggcgaggaaaagctcgggcacgggcaccgagcccgtagctaagctcaagaatggtcaagaaggagaaataggacacttcgattccgtgccaaacatacaggatgactgcaatggttttcaggattccgatgatttcgccgatttctcatcggcaggccctagccaagtggtggactggaatgccttcgaagacgagcagaaggactcctgcagttgggcggcatttggagaccagcaggcgacagaaagtcatcaccggaaagaggcatggcaatcgcatcgcacggatgaaaacatagacaccccaggtacacctaagactcatagtgtacctagcgccaccagtaaaggggctgtcgccagcgggcatctacaagagtctgctacgtcagtgcagacggctctgctgaaccggctggaacgcatctttgaagcctgctttccgtccatcctggtaccagatgccgaagaagaggtgacgtcattaaaacacttgctggagacctcaacattgcctattaagactcgcgaggcacttccagaaagcggggaattgctggacgtttggacagaacttcaggacatacatgacgcgcatgggcttcgctatcagtggggcggatcacactccaataagaaattgctgagttccttgggaatcgacacgaggaatattcttttcacaggtaacaaaaagcaacctgtgattgtacctatgtatgctgccggtctggggatgctggaacctaccaaagaaccgttgaaacccctaagcgccgctgagaagatcgccagcatcgggcagactgctacgatgtcccctgacatgaacacctgcacatcagaccagtttcaggaaagtctgcctcccgtccagttcgattggagctccagcggcctgaccaacccattggacgccagtggaggctccaccctgttgaatctggactttttcggaccagtggacgactccagcagtagcagctcaaccaccatccccggagtcgaccccgaactgtatgagttgacaacatccaaactagaaatctctacttcctcgctgaaagtgaccgacgcattcgctcgcttgatgagcaccgttgaaaagacctccacttccacacgcaagcctaaaagggaagagcatctgtcagaagaagccatcaaggtgatcgctgggctccccgacctcacattcatgcatgctaaggtgttaatgtttccagcaactctgactccttcgacatcatcacaagagaaagcggacgggtag

SEQ ID NO: 29784 - DNA, 1860 bp, synthetic construct
  source 1..1860: mol_type = other DNA; note = Synthetic coding sequence
atggacgatcagcaggccctgaatagtatcatgcaagatttggccgttttgcataaagcctcccggcctgctctgtcgcttcaggaaaccaggaaggccaagtctagcagcccaaaaaagcagaatgacgtaagagtcaagtttgagcacaggggggagaaacgcatcctgcagttccctagacccgtgaagctcgaagatctccgcagtaaagccaagattgcatttggccagtctatggatctacactacacgaataatgaactagtgattccattaaccactcaagacgatctagacaaagccgtggaattgctagatagatccattcacatgaagagcctgaagattctcctcgttataaacggcagtacccaggccacaaatctggagcctctgccttcacttgaggacctggacaacaccgtgttcggggcagagcgcaaaaaacggctgagcattatcggtccaacatcccgcgaccgatcctctcctccccctggttatattcccgacgagctgcatcaggtggcacgtaatggctctttcacatcaataaacagtgaaggtgagttcatccctgagtccatggaccagatgctggaccccttgtccttgagttcaccggagaactctggaagcgggagctgtcctagtctggactccccattggatggtgagagttaccctaagtccagaatgccgagagcacagtcttacccagataatcaccaggagttttccgactatgataacccaatcttcgagaagtttgggaaaggcggaacctaccccagaagataccacgtgagctaccaccaccaggagtacaacgacgggagaaagacattcccaagagcgcgaagaacacagggtaccagcctgcggtctcccgtgtctttctcacccacggaccattctttgagcacatcgagcggttcttccattttcaccccagagtatgacgattcacgaattagacggcgagggagcgacatagacaaccccacgctgaccgtgatggatatttctcccccatccagaagtccacgcgctcccaccaattggagactcggtaagcttcttgggcaaggagctttcgggagagtttatctgtgttacgatgtggatacaggcagagaacttgccgtcaaacaggtgcaattcgacccagattcacccgagacttctaaggaggtgaacgcattggaatgtgaaatccagcttctgaagaatttgctgcatgagcggattgtccaatactatggttgcctgagggatcctcaagaaaaaaccctatcaatctttatggaatacatgcccggtgggagcatcaaggaccaacttaaagcttacggtgccctgaccgaaaatgtaacaagaaagtatacccgacagattcttgagggtgtgcattacctccattccaacatgattgtgcaccgagacataaagggcgctaatatcttgcgcgacagcactggaaatgtgaagttgggggacttcggagccagcaaacgactgcagacgatctgtctgtcaggcacaggtatgaagtctgtcaccggaacaccatactggatgagtcctgaggtgatttcaggcgaaggatatggcagaaaggccgatatttggagcgtggcctgtaccgtcgtcgagatgctgactgagaaacccccatgggccgaattcgaggccatggccgctattttcaagattgccacccaacccacgaatccgaaacttcccccacatgtgagcgattacactcgtgattttttgaagagaatatttgtggaggccaaactccgcccatccgcagatgaactgctgcgccatatgtttgtccactaccattag

SEQ ID NO: 29785 - DNA, 513 bp, synthetic construct
  source 1..513: mol_type = other DNA; note = Synthetic coding sequence
atgacccgcggtaaccaacgagaactcgcgaggcagaagaacatgaaaaaacaaagcgattccgtaaaaggcaagcgaagggacgacggactgtcagctgccgctaggaaacagagggtaggtgtgcagcagccgaacgccgaactgtcgcccattcacttccacctgatcctatgcgcgcttcatccccctgcatcatgtcctttctgtcctcttgtacccccaagcgctccctccagcctcccgcctggtacacgcaggtcttgtagccggtcccgcaagcgccagactagacgcaggagaaatccctctagcttcgtggcctcatgcccaactttgctacctttcgcctgcgtcccaggcgcatctcccacaaccctggccttccccccagtggttttgaccggccctagcacagacggaatcccgttcgctctgtctttgcagagagttcccttcgtattgccgtcaccccaagtggccagtctcccgctcggacattcccggggttag

SEQ ID NO: 29786 - DNA, 630 bp, synthetic construct
  source 1..630: mol_type = other DNA; note = Synthetic coding sequence
atgaagaaggtccggctaaaagagctggagagccggttgcagcaggtcgatggtttcgagaagcccaagctcctgcttgagcagtaccccaccagaccacacatcgctgcctgtatgctctacaccatacacaacacttatgatgatatcgaaaacaaggtggtagccgatctggggtgtggttgtggtgtcctgagtattgggaccgccatgctcggagccggtctctgtgttggctttgacatagatgaagatgccctcgagattttcaatagaaacgctgaagagttcgaactcacaaatattgacatggtgcaatgtgacgtctgcctgctcagtaaccgtatgagcaaatcatttgacaccgtaattatgaatccgcctttcggaaccaaaaataacaagggtacagacatggcatttctcaagacggcccttgagatggccaggacagccgtttactccctccataaatcctccacaagggaacacgttcaaaagaaagcagccgagtggaagatcaagatcgatattatagcagagctcaggtacgacctccccgcttcatataagttccacaagaaaaagagtgtggatatcgaggtggaccttattaggtttagcttctag

SEQ ID NO: 29787 - DNA, 1755 bp, synthetic construct
  source 1..1755: mol_type = other DNA; note = Synthetic coding sequence
atggctgccagtgcaaagaggaaacaggaggagaaacacctgaagatgctcagagacatgaccggtctcccccacaaccgcaagtgtttcgattgtgaccagcgaggacctacatacgtgaatatgaccgtggggagtttcgtgtgcacatcctgcagtggatcattgcgaggattgaatcccccacatagagttaagagtattagcatgactacgttcacccagcaggaaatcgagttcctccagaagcatggtaatgaagtgtgcaaacagatttggctgggtctttttgatgatcgaagttctgccataccagacttccgtgatccacaaaaagtgaaggaattcctccaggagaaatatgaaaagaaaaggtggtatgttccgcctgagcaggccaaggtggtggctagcgtgcacgcatcgatcagcggcagctccgcttcgtccacatcaagcacccctgaggtgaaaccactgaaatcattgttgggggattccgcaccaaccctgcacctcaataagggaactccaagccagtcgcccgtggtgggccgttctcagggccagcagcaggagaaaaagcagtttgacctgttatctgatcttggatcggacattttcgccgctcccgctccccagtctacggccacagccaacttcgccaatttcgcgcactttaacagtcatgcggctcagaactccgccaacgcagattttgccaacttcgatgcttttggccagagtagcggatctagcaatttcggtggcttccctacagcgtctcactcaccctttcaacctcagactacagcattccggatgttatcaagctcctgcagcttcggggagtttacatctgcctttcctctgcaggcaacccactccggatcagccgcaagtgtgaatgctaatttcgcccacttcgacaatttccctaaaagcagtagcgcggattttggtactttcaacacttcccagagccatcagaccgcgtcagccgtgtcaaaagttagtaccaacaaggctggcctgcagactgccgataaatatgccgcactcgctaatctggataatatatttagtgccggacagggcggagaccagggatccgggttcggcacaacagggaaggcccctgtgggttctgtggtgagcgtcccctctcagtcctccgcctcttctgacaagtacgccgcactggctgagctggatagtgtgttttcatccgccgctaccagctctaacgcctacacttcaacctctaatgctagctcaaacgtctttgggaccgtgcccgtggtggccagtgcacaaacgcagcctgcatcatctagcgtgccggctcccttcggcgctaccccaagtaccaatccatttgttgctgccgctgggccatccgtggcatcctctaccaatccttttcagaccaacgctcggggagctacagcagcaaccttcggaacagcctcaatgagtatgcccactggattcggcacacctgcgccatactcactgccgacatctttctctggctctttccagcagcccgcattccccgcacaggctgccttcccccaacagactgccttctctcagcagcctaacggattcgctgcattcgggcagacaaaaccagtggtaacaccatttgggcaggtcgctgccgcaggcgtctcctccaatccctttatgactggagctcctaccggtcagtttcccactggttcctcctctaccaatcccttcctctag

SEQ ID NO: 29788 - DNA, 795 bp, synthetic construct
  source 1..795: mol_type = other DNA; note = Synthetic coding sequence
atggctggcgagcagaaaccatctagtaaccttctagagcaatttatcctcttagcgaaaggaacaagtgggtccgcgctgactgctctgatttcgcaggtgctggaagctcccggtgtttatgtgtttggggaactgctcgaattagccaacgtccaggaattagctgaaggagcgaacgctgcatacctccaactcttgaacctcttcgcatatggaacatatccagactatatcgccaataaagaatcactgcccgagctgtcaactgcacaacagaacaaactgaagcatctgactatcgtctctttggcgtctagaatgaagtgcataccctactccgtgttgctgaaggacctggagatgagaaacctgcgggaactcgaggatctcatcatcgaggcggtgtataccgatatcatccagggcaagctggaccaaagaaatcagctgctcgaggtggatttttgcataggacgtgacatccggaagaaggacattaacaacatcgtcaagaccctccatgagtggtgtgacggctgtgaggctgtattgctgggaattgagcagcaggtcctacgtgccaaccagtataaagaaaaccacaaccggacccagcagcaggtcgaggccgaggtgaccaatattaagaagacacttaaggctaccgcctcatcttccgcccaagaaatggaacagcagctggccgaaagggaatgtccccctcacgctgagcagaggcagcccactaaaaagatgagcaaggtaaagggattggtctctagccggcattag

SEQ ID NO: 29789 - DNA, 1506 bp, synthetic construct
  source 1..1506: mol_type = other DNA; note = Synthetic coding sequence
atgtccagcgagcaggataagagcgcttcaaaagaaaagagcaaaaaacctgttagatttcttccccagctaagtatggagaaacttgccagcaaggagaaattcaaagcaccggcaagagcgcttcctcaactctctatggtctccacaaagccccattggcagcaggcagccccatcttttcatctgtccgtcaagcaggatgacgagagtcccgagccattttccgtcaaaaacgaacagtctcatgctgagtatatggagcgcttcggaaaaaaggggaagttgccccatcaagtcgatgactcttacgtgggccctagcacgagtaagtctaagggaaaatccccgcacaaggagcgtgaaaacttccggtccacactggtcaacgtaattatgcagcaagacgctgatctcgacagcgctgtgccagacggatctacaatccctaagccaaccgcttccgccatcgagaaagacatccttcgctattactattatatccatcatggcattgacactgaccacgtagcccctatggaggactcttggctcgaacatgtgctagacctagtaccccagcatctgaaggttttcaccgactccatcgtgaccctgtcagacgaaatgcgagaagattacctgcttagtgtcagaaagtcaatcgtggattttgtcttaaaagaccctagagagaaaggcgatgataaaaagaccgacgaattgcctgctcaccgagctgagatggaaattcttcccaagccctggcgaaaatcgttcctggcagcgagtagctacatacgggaccacctgaacgccatgaaccctacgatgcttgccgtcctggatctgtggcacacaaatttcaagaagttgcgattggttgacataaaggaattccacaactgccaggatgcgctagaactcagctcattccaaaatattataatgcggcacatggactcggccaaagagacactgttgaaaatgtggttccctgaggtccaaaacatctactaccagggaaataagaaaaaacaactgccgacaggcgactcttctgccaagctcgagagcttcttcaattgcgccgcagctctgatgacattgcaactgcaggacctgacgctggtgtctatgcaggacttcaccgatctgatcgcgcagcctcccgacagcgtgcgtgctttcgagcaccctgggtttattatgcgcctcatactggacaatgacaccattaagttcgagccagagctcagcgactacatagatattttcctcaacgtgtatgacgtgatgatcaaagctgtttcctttgtccccagggtcgagaccaaattgtattcaaaatggcgaaataaggccaaacctggacacttttactttagtcatattcagcgcagtgttacttttcaacactccgaagtgagctcgccgcaaaattcgcactttaagatcgtcagcccattctcggttttagggtttacttggagatgccagctgtag

SEQ ID NO: 29790 - DNA, 855 bp, synthetic construct
  source 1..855: mol_type = other DNA; note = Synthetic coding sequence
atgactgatgttccagccacgttcactcaggccgaatgtaatggcgacaaacccccagaaaatggacagcagacaatcacaaaaatcagtgaagagcttactgatgttgactcaccgctgccacattacagagtagagccctctctggaaggggcactgacaaaaggatcacaggaggaaagacgcaagctccagggaaacatgctgttgaattcatccatggaggacaagatgctaaaggagaacccggaggagaagctgttcatagttcacaaagctataaccgacctgtccctacaggaaacatctgctgacgaaatgactttcagagagggacatcagtgggaaaaaatccccctatcaggcagcaaccaggaaattcgcagacagaaggagcggatcactgagcagcctcttaaggaggaggaggacgaggaccgcaaaaataagggccaccaggccgctgaaatcgagtggctgggattcagaaagccatcacaggctgacatgctccattcaaagcacgacgaagaacaaaaggtgtgggacgaagagatcgatgacgatgatgatgataattgcaacaacgatgaagacgaggtccgggttatcgaatttaaaaagaaacacgaggaagtttcccagtttaaagaagaaggggacgcttcagaggactctccgctatctagcgcaagctcccaggcagtaacccctgatgagcagcccacgctgggcaagaaatctgatataagtcgcaatgcgtactcccggtacaacacaatctcctacagaaaaatacggaagggcaataccaagcagagaattgatgaatttgagtccatgatgcacctatag

SEQ ID NO: 29791 - DNA, 735 bp, synthetic construct
  source 1..735: mol_type = other DNA; note = Synthetic coding sequence
atgaaaaaagtgcggctgaaggagcttgagtcgaggctgcaacaggttgacggttttgagaagcccaaactcctcctggagcagtatcccaccaggcctcatatcgccgcttgcatgttgtacaccatccataatacatatgatgacattgagaataaggttgtcgcagacctggggtgtggttgcggagtcttatccattgggacagccatgctgggcgctggcctgtgcgtgggatttgacatcgacgaagacgccctggaaatattcaacaggaatgccgaggaatttgaattgactaatatcgacatggtgcagtgtgacgtgtgcctgctaagtaaccggatgagcaagtcttttgatactgtaatcatgaatcctccctttggaacgaagaacaacaaggggacagatatggctttcttgaaaacagccctcgagatggcgagaaccgcagtttacagccttcacaagtcctctacgagagagcatgtccagaaaaaggccgctgagtggaagatcaaaatcgatatcattgcagagctccgctacgatctgcccgctagctacaagttccacaagaagaaaagcgtgagccttttgattctggctgggctccactccgtgctgaagagctttctcggcaggatgtggtggtttatgccagtcatccccgcaaccagagaggctgaagctagggagtccctggaactccgacgccaacgcttacagtag

SEQ ID NO: 29792 - DNA, 885 bp, synthetic construct
  source 1..885: mol_type = other DNA; note = Synthetic coding sequence
atgaataatcagaagcaacaaaaaccaacattgagtggccaacgtttcaaaacccgcaaacgcgacgaaaaggagaggttcgatcccacccagtttcaggactgcatcatacagggtcttacggagactgggacagatcttgaagcggtcgccaagttcttagatgcttccggggctaaattagattataggagatatgctgagacccttttcgacattctcgttgcgggaggcatgcttgccccagggggtaccctggctgacgacatgatgcgcacagatgtatgcgtgttcgcagctcaagaggaccttgagacaatgcaagccttcgctcaggtgtttaacaagctcattcgacgctacaagtacttggagaaaggttttgaggatgaggttaagaagctgcttctgtttctcaagggattctctgagtccgaaaggaacaaattggcgatgctgactggcgtcctgctcgcaaatgggacgctaaatgcgagcatcctgaactctctttacaatgaaaacctggttaaagagggagtttctgccgcatttgcagtaaaattatttaaaagctggattaatgagaaagacatcaatgccgtggcagcttccctgcggaaggtatcaatggacaatcgtctcatggagctcttcccggcaaacaagcagtctgtggaacatttcactaagtacttcacagaagcagggctaaaagagctgagcgagtatgtgcgcaaccagcaaacgattggggctcggaaggaactgcaaaaggagctgcaggaacagatgagtagaggcgatcccttcaaggacataattttatatgttaaggaagaaatgaaaaaaaataatatccccgaacctgtggtgatcggctag

SEQ ID NO: 29793 - DNA, 1374 bp, synthetic construct
  source 1..1374: mol_type = other DNA; note = Synthetic coding sequence
atgaatcaaccgtgtaattcaatggaacctcgggttatggatgatgatatgctgaagctggctgtcggcgaccagggccctcaggaagaggcaggacagcttgcaaagcaggagggtatcctgtttaaagacgtactgtccctgcagctggactttaggaatattctaagaatagacaacctgtggcaattcgaaaacctgaggaagctgcagctggataataacattatagaaaaaatagagggactcgaaaacctggcgcatttggtgtggctcgacctctcttttaacaacattgagacaatcgaaggcttggacacacttgtgaatcttgaagatctctcgctctttaataacagaataagtaaaatagattccttagatgcattagtcaagctgcaggtgctgtcactcggaaacaaccggatcgataacatgatgaatattatttatctccggcgatttaaatgcctgagaacactttcactgagcagaaaccccatttctgaggcagaagattacaaaatgtttatttgcgcctatttgcccgatctgatgtacttggactacagaaggatcgacgatcacaccaagaagctggccgaagctaagcaccagtattctatcgacgagctgaaacaccaagagaacctgatgcaggcgcagctcgaagatgaacaggcacagcgggaggagctggaaaagcacaagacggcttttgtggaacacctgaatgggtccttcctgtttgactctatgtacgccgaggactctgagggtaataatctgtcctacttgccgggtgtgggggagctgcttgaaacatataaggataaattcgtgattatttgcgtcaacattttcgaatacggtctgaagcagcaggagaagagaaagactgagctggatacattcagtgagtgtgtgagggaggctatccaggagaatcaagaacaagggaaaaggaaaatcgccaaatttgaagagaagcatctttcgagtttaagcgcaataagggaagagctggagttacccaatattgagaaaatgatcctcgagtgtagtgccgatatctctgagttgttcgacgctcttatgacacttgagatgcagttagtagaacagctcgaggaaaccatcaacatgtttgaaagaaatattgttgatatggtcggactgttcattgaaaatgtgcagtcactcatggctcaatgtcgcgatctggaaaatcatcatcatgaaaaactgctggaaatttctatcagtactttagagaaaattgtagaaggagacctcgatgaggaccttccaaacgacctgcgagcgggacgcttccagaagttcaactatgtggaagctagcggaaccttctag

SEQ ID NO: 29794 - DNA, 1638 bp, synthetic construct
  source 1..1638: mol_type = other DNA; note = Synthetic coding sequence
atgtccagtagtgggtatccgcctaatcaaggcgctttcagcacagagcaatcccgctaccctccccactccgtgcagtacactttccccaacacccgccatcaacaggagtttgcggtgcccgactacagatcatctcacctggaggtgagtcaggcctctcaactcctgcagcagcagcaacagcagcagctccggcgtcggccaagcctgctgagcgagtttcatcctggctcagatcgccctcaagagagaagaacaagttacgagccattccatcctgggccatcaccagttgatcatgatagtttggagagtaaacggcctcggctggagcaggtgtctgacagccacttccaaagagtctctgctgccgtgcttccgctggtgcaccccctgcccgaggggcttagggcctcagctgatgctaagaaggatcccgcttttggaggaaaacacgaggcaccttctagtcccatctctgggcaaccctgtggggatgaccagaatgctagtccttctaagcttagcaaggaggagctgatccaatcaatggaccgcgtagaccgcgaaattgctaaagtggaacagcagatccttaagctgaaaaagaaacagcagcagctggaggaagaagcggctaagccacccgaacccgagaaacctgtcagcccaccgcctgtggaacagaaacaccggtctatcgtgcagattatatacgatgaaaaccgtaagaaagccgaagaagcccataaaattttcgaggggttaggacctaaggtggaattgccactgtacaatcaaccctccgacaccaaggtgtaccacgagaatattaaaactaaccaagtgatgagaaagaagttaattctgttctttaagagacgcaatcacgcccgtaaacaaagggagcagaagatctgccagcgatatgaccagctgatggaggcgtgggagaaaaaagtagacagaattgagaacaatccgagacgaaaggctaaagagtcaaagacacgagagtactacgaaaagcaattccccgaaatccggaagcagcgagaacagcaggaaagattccaacgggtgggtcaacggggagccggactgtcggccactattgcacggagtgaacacgagatctccgagataatcgacgggctgtccgagcaggaaaacaacgagaagcagatgagacaattgtctgtcatcccacctatgatgttcgatgccgaacagcgaagggtcaagtttatcaatatgaacggactcatggaggatccaatgaaggtttataaagacaggcaatttatgaacgtgtggacagatcacgaaaaggagatctttaaagacaaattcatccagcatccgaaaaattttggcttgattgcgagttatctggagagaaagtctgtacctgactgtgtgttatattattacctgaccaagaagaatgagaactataaagccttggtccggcgtaactacggaaagagacgcggtaggaaccagcagcaaatcgccaggccctctcaggaagagaaagttgaggaaaaagaagaggacaaggctgagaagactgagaagaaagaggaagagaaaaaagacgaagaagaaaaagacgagaaggaggatagttag

SEQ ID NO: 29795 - DNA, 480 bp, synthetic construct
  source 1..480: mol_type = other DNA; note = Synthetic coding sequence
atgacccattgctgcagcccgtgttgccagccaacttgctgcagaacaacatgttggcagccaactaccgtgactacctgctcaagcacaccttgttgtcagcctagctgttgtgtatccagctgctgccagccttgctgtcaccccacctgctgccagaatacttgctgcagaaccacttgttgtcagccaatttgtgttacgtcttgctgccagccaagttgttgttccacaccctgctgccagccaacttgctgtgggtcctcttgtggccagagcagctcgtgcgcccctgtctactgcagacgcacctgttaccatccaactagcgtttgcctgccgggatgtctgaaccaatcttgtggctcgaattgttgccaaccatgttgccggccagcctgctgcgaaactacgtgttgcaggacaacctgctttcagccaacctgcgtgtactcctgttgtcagcccagctgttgctag

SEQ ID NO: 29796 - DNA, 1071 bp, synthetic construct
  source 1..1071: mol_type = other DNA; note = Synthetic coding sequence
atggagggccacgacccaaaagaacccgagcagttacgaaagctatttatcggaggtctgtccttcgagacaactgatgactcactgcgggagcattttgaaaagtggggcaccctgactgactgcgtggttatgcgtgatcctcagaccaagcggtcaaggggtttcggctttgttacatatagctgcgttgaagaggtagacgccgcaatgtgtgcccgtccacacaaggtggatgggagggtggtggaaccaaagagggccgtgtcgcgggaagactccgtgaagcctggggcacaccttaccgtaaagaagattttcgtggggggaatcaaagaggacactgaagaatataacctgcgggattatttcgagaagtatggcaagatcgaaactatcgaggtaatggaggaccgacagtccgggaaaaaacgaggctttgcgtttgtgactttcgacgatcatgacaccgtcgacaagattgtcgtgcagaagtatcacactataaacgggcacaattgtgaagtcaagaaggctctgagcaaacaggagatgcaaagcgccggttcacagcgcggtcgcggtggtgggtctggcaactttatgggcagagggggaaatttcggcggtggaggcggaaactttggaagggggggaaactttggcggtaggggcggttatgggggagggggtggcggttcccgcggatcttacgggggtggtgatggcggatacaatggatttggaggtgacggcggaaattatggtggcggaccgggttattccagcaggggcggttacggaggtggaggacctggctacgggaaccagggtggcggatacggcggaggcggaggatatgacggctataatgaaggtggtaattttggcggtggcaattacggtgggggtggtaattataacgattttggcaactattctggccagcagcagtccaactatggccctatgaagggcggatcttttggcggacggagctcaggaagcccatatggaggagggtacggctctggcggaggctctggcggttatgggtctagacgtttctag

SEQ ID NO: 29797 - DNA, 186 bp, synthetic construct
  source 1..186: mol_type = other DNA; note = Synthetic coding sequence
atgccctttttcggcaatactttttccccaaagaaaactcccccacgcaaatctgccagcctgtccaacctacattccctggacaggagcaccagagaggttgaactggggttggaatatgggtctcccaccatgaacctggccggtcagtctcttaagtttgagaatggacagtggattgcctag

SEQ ID NO: 29798 - DNA, 981 bp, synthetic construct
  source 1..981: mol_type = other DNA; note = Synthetic coding sequence
atgccgcaccttcctcttgcttcattccggcctcccttctggggcctacgacactcgcgcggactgcccagattccactcagtttctacccagtctgagcctcatggatcacctatttcacggagaaacagggaagctaagcaaaaaagactgagagaaaagcaggctacccttgaggcggagattgcaggagaatcgaagagcccagccgaatctattaaggcgtggaggcctaaagagctcgtgctgtatgaaatccccaccaaaccgggtgagaagaaggacgtctctggcccacttcctcccgcatatagccccagatatgtggaagcagcatggtatccatggtgggtaagggaaggcttcttcaaacctgaatatcaggctagactacctcaagcaactggagagacattttcgatgtgcattcctcccccaaacgtaaccgggtctcttcacatagggcatgcactgaccgtcgcaatccaggacgcgctggttcgttggcatcggatgaggggtgatcaggtgctctgggtccctgggtcggatcatgctggaatcgctacacaagccgtcgtggagaagcagctatggaaagagcgcggagtacgccgacacgagctcagccgcgaagccttcttacgggaagtgtggcaatggaaagaggctaagggtggtgaaatttgcgagcagcttcgggcactcggcgctagtctggactgggaccgcgagtgtttcaccatggatgtcggtagtagcgtggctgtcacagaagcctttgtgagactttacaaagctggcctgctttaccgtaaccaccagctcgttaattggtcttgtgccctgaggtcagcgatctctgacatcgaggtggagaaccgacccttgccaggccacacccagctgaggttacctgggtgccccacccctgtgagttttggcctcctgttttccgtggcttttcctgtcgacgggtag

SEQ ID NO: 29799 - DNA, 2031 bp, synthetic construct
  source 1..2031: mol_type = other DNA; note = Synthetic coding sequence
atgatcccccctcaagaggcttctgctagacgcagggaaatcgaggacaagttaaagcaggaagaggagaccctaagttttatacgcgattccctcgaaaagtctgaccagctcaccaaaaacatggtgtcgatcttgtcaagctttgagtcaaggctgatgaaactcgaaaactcaattatccctgtgcataaacagaccgagaatctgcagagactgcaggaaaatgtggaaaaaacattgtcatgtctggaccacgtgatctcctactatcatgttgccagtgacacagaaaaaatcatcagggagggacctacagggcgactcgaggaatacttggggtctatggccaagatccagaaagccgtggagtacttccaagataacagcccagacagcccagagttaaacaaagttaaactgctgtttgaaagaggcaaagaggcactggagagtgaattccgatccctgatgactagacactccaaggtcgtttcacccgtcctgatcctggacttgatttcgggcgacgatgatttagaggcgcaagaggacgtgacccttgaacacctaccagagagtgtgcttcaagatgtgatccgcattagccgctggttggtagagtatggcagaaatcaggactttatgaatgtgtactaccagatcaggtcctcacaactggaccgcagcataaaaggactgaaggaacatttccacaagagctcctctagtagcggcgttccatattcacctgctatcccgaacaagcggaaggacacaccaactaaaaagccagtgaagcgccctggccacgagcatgatttcagagtgaagcatctgtccgaggctctaaacgacaaacacgggcctttggccggtcgggatgatatgcttgacgtggagaccgacgcatatattcactgtgtctctgctttcgtcaagttggctcagtccgagtaccagcttctagctgatattattcccgagcaccatcagaaaaaaacctttgattcattgatccaagacgctttggacgggctgatgttagagggcgaaaatattgtgtctgctgccagaaaggccatcgtaaggcacgatttctcgaccgtattgactgtgtttccaatactcagacacttgaagcagaccaaacctgagttcgaccaggtactgcagggtacagcagcctcgaccaagaacaagttgcctggtttgatcacttctatggagaccatcggagctaaagcactcgaagatttcgcggacaatatcaaaaacgacccagacaaagagtataatatgcccaaagacggcactgttcacgaactgaccagcaatgcgattctgttcttgcagcagctgctcgatttccaggaaactgcaggagcaatgctcgcctcccaggagacttcctcttctgctacgagctatagttccgagttctctaagagactgctgagcacatacatttgcaaggtactgggtaatctgcaacttaacttattgtccaaatccaaagtgtacgaggacccagcactcagtgccatcttcctgcacaataattacaattacatattgaaatccctcgagaaatctgaactcatccaactagtggccgttactcaaaagaccgcagagcgctcgtaccgggaacatatcgagcagcagattcaaacgtatcaacgatcctggcttaaagttacggattacatcgctgagaagaaccttccagtgttccaacctggagtcaaactgcgggacaaagagaggcagatcatcaaagaacggtttaaaggctttaacgacgggcttgaagagctatgcaaaattcagaaggcttgggcaattcctgatactgaacaacgggacagaattcggcaggctcagaaaacaattgtaaaagagacttacggagccttcttgcaaaagttcggttcagtcccattcacaaaaaatccagagaagtacattaagtacggcgttgagcaggtcggggacatgatcgatcggctattcgatacatcggcttag

SEQ ID NO: 29800 - DNA, 459 bp, synthetic construct
  source 1..459: mol_type = other DNA; note = Synthetic coding sequence
atgacagacgttcccgctacattcacccaggccgaatgtaatggagacaaacccccagaaaatggacagcagacgattacaaaaataagcgaagagcttaccgacgtggactcccccttaccgcattatagagtggagccaagcctggagggggctctcaccaagggcagccaagaggagcgccgtaaactgcagggcaacatgttattgaacagtagcatggaggataagatgctgaaagaaaatcccgaggagaagctgtttattgtacacaaagcaattactgatctgagcctgcaggagacaagtgccgacgagatgacatttagggagggacaccagtgggagaagattcctctgtcagggagtaaccaggaaattaggcggcagaaagaacggattacagagcagcctctcaaggaagaggaagacgaggaccggaagaacaagggccattag

SEQ ID NO: 29801 - DNA, 768 bp, synthetic construct
  source 1..768: mol_type = other DNA; note = Synthetic coding sequence
atgtggcctttccccagcaggtcactcttccctccacccacacaggcctggctccagactgtcagctccgacccggaggcacaaggttggggcgcatggaacgagactaaggagatccttggaccagagggtggcgagggcaaagaagagaaggaggaagaggaagacgctgaagaggaccaggacggcgacgcaggcttcctcctgtctctgttagaacaagaaaacctcgcggagtgccctctgcctgatcaagagctggaggcaataaaaatgaaggtctgtgctatggagcaagccgagggaacgccacgcccaccaggagtccagcagcaggctgaggaggaggagggaaccgccgcaggtcagcttcttagtcccgagaccgtggggtgtccgctgagcggaacgcccgaggaaaaggttgaagctgatcacagaagcgtgtatgtcgggaacgtcgattatgggggatcagcggaagaactggaggctcactttagcagatgcggtgaagtgcatcgggtgactattctttgcgacaagtttagtgggcaccccaaaggatgctgccgtaaggagcccacctccctcggctcagccccacagaccgctggggcattcgaagatacacaggccccaggcggacacccatcacccacggccgcttcccgagccggaccgggttctgaccacaaagggaggaccggccctgtagagaacagccaccatggatttcacagaatcaaaggtaagactaggttctag

SEQ ID NO: 29802 - DNA, 3561 bp, synthetic construct
  source 1..3561: mol_type = other DNA; note = Synthetic coding sequence
atggaaaaggctaccgtccccgtagctgcggcaaccgctgccgagggtgagggatcgcctccagctgttgccgcagtggccggtcctcccgcagcagcagaagttggcggaggtgtgggcggttccagtcgtgcgaggtccgctagctcaccgagaggcatggtccgcgtctgcgacctgcttctgaagaaaaagcccccacaacagcagcatcacaaagctaagaggaaccgcacctgcagacccccatcaagctccgagtctagcagcgactccgacaactccggtggcggaggcggaggtggcggagggggaggcggaggcggtggcacaagttccaacaactccgaggaggaggaggacgatgatgatgaggaggaggaagtaagcgaggtggaaagcttcattctggatcaggacgacctggagaaccccatgttggaaaccgcatctaagctgttgctgtcaggcaccgccgatggtgctgacctcagaactgtcgatcctgagactcaggccagactggaggccttgctcgaggctgcaggaattgggaaattatccacggcagatgggaaagccttcgctgacccggaggtgctgcgcaggctcacctcatccgttagttgtgcacttgatgaagctgccgcagccctcacaagaatgcgcgctgaatcaacggctaatgccggacaatctgataacaggagcctggcggaagcatgcagtgagggggatgtaaatgcggtccgcaagctgttgatagaagggcgttctgttaacgaacacactgaagagggtgagtctctgctttgcctcgcatgcagcgccggatactatgagctggcccaggtgctcctggctatgcacgctaatgtggaggacaggggaataaagggcgacatcactcctctgatggccgcagcaaatggtggacacgtgaaaatcgtgaagctactgctggcccacaaggctgatgtgaacgcacagagctcaacaggcaacacagccttgacatacgcatgtgccggaggctatgtcgacgtggtaaaggttcttttagaatccggtgcttcaatagaggaccacaacgagaacgggcacacacccttaatggaagcaggcagcgctggccatgtggaggtggctcggctcctgttggaaaacggtgccggaatcaacactcactcgaatgagttcaaggagtccgcccttacactcgcctgctacaaaggacatctggagatggtgcgcttcttgctggaggcgggagcagatcaggagcacaaaactgacgaaatgcataccgcgctcatggaggcctgcatggatggccatgtggaagtggccaggttgctgctggactcaggggcacaagtgaacatgcccgcagattccttcgagtcccccctcactttggcagcttgtggaggacacgtggagcttgcagccctgctcatcgagagaggggcatccttggaagaagtgaacgatgagggatacacacccctgatggaagcggctagagaagggcatgaagaaatggtggccctcctgttgggtcagggggctaacatcaatgctcagacagaggaaacacaagagacagccctgaccctggcttgttgcggagggtttctcgaggtggccgacttcttaatcaaagccggagcagacatagagctggggtgttctacacctttgatggaagccgcacaagaagggcacctggagttggtcaagtaccttctggcagccggagctaacgtgcatgctactaccgctacaggagacactgccttaacctatgcctgtgagaatggacatactgatgtggcagatgtgctgctccaggcaggcgctgatctggagcacgagtccgagggtgggaggacccccctgatgaaggccgcaagagcaggtcatgtgtgtacagttcagttcctgatcagcaaaggtgccaacgttaaccgaacgactgcaaataatgaccacaccgtgctctctcttgcatgcgccggtgggcacctcgcagtggtggaactgcttctggctcacggggcagacccaacgcaccgcttgaaggacggtagtaccatgcttatcgaagctgccaaaggaggacatacaagtgtcgtatgttacctgctggattatccgaataatctcctctccgcccctccacccgatgttacacagctcactcccccaagtcacgatctgaatagagctccgcgagtcccggtgcaggcactgccaatggttgtaccccctcaggagccagataagcctccagctaacgtggcaaccacactacccatacgcaacaaggccgcatccaaacagaaatcctcttctcacttacctgccaactcacaggatgtgcagggttacattacaaatcagtcaccggagtccattgtggaagaggcccaagggaagttaaccgaactggagcagcggattaaggaagctatagagaaaaacgctcagctgcagtccctcgagttggctcatgccgatcagctgaccaaagagaagatcgaagaactgaacaagactcgagaagaacagatccagaagaagcagaagatactagaggagctgcagaaagtggagagagaactgcagttgaaaacccagcagcagctgaagaagcaatacctggaagtgaaagcgcagcgtattcagcttcagcaacaacagcaacagtcatgtcagcatctgggtttactgacaccggtgggtgtcggcgagcaactaagtgagggagactatgcacgtctgcagcaggtagatccagtgttgcttaaggacgagccccagcagaccgcggcacagatgggcttcgccccaatccaacctcttgccatgccccaggctctgccactggcagccggtcccctgccccctggctcaatagcaaacttaaccgaactgcaaggagtaattgttggacagccggtcttgggtcaggctcagttggccggtcttggccagggtatcctgactgagacacagcagggattaatggtcgctagtccagcccagacactcaacgatacacttgacgacattatggctgctgttagcggcagggcctcagctatgtcaaacactcccacacactccattgccgctagcatctcccagccacagacccccactccttctcccatcattagcccttcggcaatgctgcctatctatcctgctatcgatattgatgcgcagaccgagagcaatcacgataccgctctgaccctggcctgcgccggaggccacgaggagttagtacagactttgctggagaggggcgcatccattgaacatcgagataagaagggtttcacgccactgattctagctgcaaccgccggacacgtaggagtggtagaaatccttctcgataatggtgccgacattgaagcccagtccgagagaaccaaggacaccccgctgtcactcgcctgttccgggggtcgtcaggaggtggtggaacttctgctggctagaggcgctaataaaagcacgggcatgtttctcattacccatctgtag

SEQ ID NO: 29803 - DNA, 2682 bp, synthetic construct
  source 1..2682: mol_type = other DNA; note = Synthetic coding sequence
atggctgcaaccgtggagggtcccgaacttgaagccgcagccgctgccggagatgcctccgaagattcagatgcagggagccgtgctctaccttttctcgggggtaacagactatccttagacttatatccaggtggatgtcagcagctccttcatttatgcgtacagcagcctctccagctgcttcaagtcgagttcttgcgcctcagcactcacgaagaccctcagctactggaagccactctggcccaactaccccagtctctaagctgcctcagaagcctagtgctgaaaggtggccaaaggagagataccctaggagcatgtctgaggggagcactgacaaatttgccggctggactgagcgggctcgctcacctggctcacctcgatctaagcttcaactcacttgaaaccctccctgcctgtgtgctacaaatgcggggactgggtgcacttctgctgtcccataactgcctaagtgagttgccggaagctctcggagccctgccagccctaacctttcttactgtcacacataatagactccagaccctccctccggctctgggcgcattatcaacactgcagcggctggacctgtcccaaaatctcctggacaccttgcctccagaaatcggagggctcggatccctgctggagctcaaccttgcctcaaatagactgcagagtttgccggcatccttggcaggcttacgatcacttaggctcctcgttctgcattcaaatttgctagcctctgtgcctgctgatttggcgagactgcctctgctgacaagactcgatttgcgggacaatcagctgcgcgacttgccccctgaactgctcgacgccccatttgtgaggctccagggtaaccccttgggagaagcaagcccagacgcaccatccagcccagtggcagccctgattccggaaatgccgagactgttcctaacctccgatctcgacagctttccagtgacccctcaaggctgttcagtgacccttgcctgcggcgttcgactgcaatttccggcaggcgctaccgccactccgatcactataagataccgacttcttctccccgaacccggactagtaccactcggtccacacgacgcgctactgtcccacgtcctggaactgcagccacacggggtggcattccagcaagacgtcggactatggttactttttacaccccctcaggctcgcagatgtcgtgaagtggtcgtacgcacccgaaacgataacagttggggcgatctcgagacgtatctggaggaggaggccccacagagactgtgggcccactgccaggtcccccatttctcttggtttctggtcgtctctcgcccagtgtctaacgcatgcctcgtgcctcctgagggtacattactgtgctcctcggggcacccgggtgttaaggtaatcttccctccaggagctactgaggaaccacgtagagtaagcatgcaagtagttcggatggctggaagagaattgcaagcccttttgggtgagcccgaagccgctgtcagcccactcctctgtttgtctcaaagcgggccaccctccttccttcagcccgtgaccgtgcagcttcccctgccaagcgggatcaccggccttagcctcgaccggagtcgcctgcaccttctttattgggctcccccagccgctacctgggacgacatcactgcacaggtggttttagagttaacgcacttatacgctaggtttcaagtcacgcattttagttggtactggctgtggtatacaaccaaaaactgtgtcggcggtttagctaggaaggcgtgggaacgactgcgtttgcacagggtgaatctcatcgcgcttcaacggcgtagagatccagaacaagtgctcctgcaatgtttacccaggaacaaagtcgatgccactctccgaaggctgctggagaggtacaggggccctgaacccagtgatactgtagaaatgtttgagggcgaagaatttttcgccgcattcgaacggggaattgatgtggacgccgacaggcccgattgcgttgaaggaaggatctgtttcgtgttctactcccacctgaaaaacgtgaaggaggtttcattttacagaggcgctgtcccggtgcgggtccctgaggaggctgaagccgctagacagagaaagggggcagatgccctttggatggccacccttcctattaagctacctcgtttgcgaggatccgaaggtccacggagaggcgctggcctgagcctcgcgcctctcaaccttggagatgcagagactggttttcttactcagtcaaatttgttaagtgtggctggcaggttgggattggattggcctgcagtggccctccacctgggtgtctcctaccgcgaagtgcaaagaattaggcacgaattcagggacgatttggacgagcaaatacgccatatgctgttttcctgggcagaaagacaagcgggacagcctggcgcagttgggcttttggtacaagcactggagcagagcgatagacaggacgtggccgaggaggttcgggctgtgttggaactcggccgtaggaaatatcaggactcaattagacgtatggggctagcgccaaaggaccccgctttacccggttccagcgccccacagcctccagagcccgcacaagcgtag

SEQ ID NO: 29804 - DNA, 1482 bp, synthetic construct
  source 1..1482: mol_type = other DNA; note = Synthetic coding sequence
atggattttctgcttggaaatcccttttcatcccctgtgggccagcgcattgaaaaggccactgacggatctctgcagagcgaagattgggccctcaatatggaaatatgcgatatcattaacgagacagaagagggccctaaggacgctctgcgggcagtgaaaaagcggatcgtgggcaataaaaactttcacgaggtgatgctggccttaaccgtgttggaaacgtgtgtgaagaactgcgggcaccgttttcacgtcttggtcgcctcccaggactttgttgagagtgtgctggtgcggacgatcctccccaaaaacaacccgccaaccatagtgcacgacaaagttctgaacctaatacagtcatgggccgacgcattcagatcctctccggacttaaccggcgtggtgacgatttatgaggatctgcgtagaaagggcctggagttcccaatgacagatctcgatatgcttagtccgattcacacgcctcaacgaactgtctttaacagtgaaacgcagtccggccaggattccgttggaaccgacagttcgcagcaggaggactcggggcagcacgctgctcccctaccagcccctcctattctgtcaggggacacaccgatcgcaccaacgccagagcaaataggcaaactgcgatctgagttagagatggtgagcggtaacgtccgggtcatgtcggaaatgctcaccgagcttgtgcctactcaagctgagccggcagatcttgagttactgcaggagttaaatagaacatgtcgggctatgcaacagagagtgctggagctgatcccccaaatagccaacgaacagctcacggaagagctgcttatcgttaacgacaatctgaataacgttttcctgcgccatgagaggtttgaacgattccggaccggacagacaaccaaggcaccatccgaggccgaacccgctgcggatctcattgatatgggaccagatcccgcagctacgggcaatctgtcctctcaactggcgggaatgaatctgggctcctcgtctgttcgagccggactccaaagcctcgaggcctcaggacgcttggaagacgagttcgatatgtttgcgttgacccgcggtagctcacttgccgaccaacgcaaggaggttaaatatgaagccccacaagccactgacggcctagccggtgccctggacgccaggcagcaatccactggggctatccccgttactcaagcctgcctgatggaagacatagagcagtggctgagtactgacgtcgggaacgacgcagaagagccaaaaggcgtcacatcagagggcaagtttgataagtttctggaagaacgggctaaggccgctgacaggttgccgaatctgtcctctccaagcgctgaaggtccaccgggacctccatcaggcccagcaccacgaaagaagactcaggaaaaagatgatgacatgttattcgcactatag

SEQ ID NO: 29805 - DNA, 663 bp, synthetic construct
  source 1..663: mol_type = other DNA; note = Synthetic coding sequence
atgaactctcaacctcagaccaggtcccccccaagcaggacagttccaattcactgtaccgacaattggaagcggcgaaaggtgctggagcagacccccgtatacaggagccttgccggacgaggttggatcaagtactgtatttttttccagcggccacagatacaacccccaagggctacaatacccaacagctcaccaagcattcgccctggcgctcagacccctacggccgtctaccaggcgaaccagcacatcatgatggtgaatcatctccccatgccctacccagtgccccaggggcctcaatactgcataccccagtatcgacactcaggtcccccatacgtaggcccacctcagcagtacccagtgcaacccccaggacctggcccattctatccagggcctggacccggtgacttcccaaatgcttacggcactccattctacccatcacagcccgtctaccagagtgcaccgattatagtgccaacacagcaacagcctcctccagcaaagcgggagaagaagaccattcgtattagggaccctaatcagggcggaaaagatattacggaggaaattatgtctggcggtggaagtcggaatcctacccctcctattgggagacccaccagcacgccaacaccaccgcagtag

SEQ ID NO: 29806 - DNA, 414 bp, synthetic construct
  source 1..414: mol_type = other DNA; note = Synthetic coding sequence
atgagtctctttgggaccacttcaggcttcggcacttctggtacttcgatgttcggttccgcaaccacagataaccataaccctatgaaggacatagaagttactagctcccccgacgatagtattgggtgcctatcattttcacctcccactctccctggaaactttctcatcgcaggatcctgggccaatgacgtgcgctgctgggaggtgcaggacagtggacagacgatcccgaaagcccaacaaatgcataccggcccagtcttggatgtgtgttggtccgacgatgggagcaaggtgtttaccgcttcttgcgataaaaccgcaaaaatgtgggacctatctagtaaccaggcgatccagatcgcccagcacgacgcaccagtaaagaccattcactggatcaagtag

SEQ ID NO: 29807 - DNA, 7808 bp, synthetic construct
  source 1..7808: mol_type = other DNA; note = Synthetic coding sequence
atgaagaggaaagttgtcaatactcacaagctccggctttcgcccaacgaggaggcctttatccttaaggaggattacgagcgaagacgtaagctgcggttgctgcaggtgcgagagcaggagagggacatcgccctacaaatccgcgaggatattaagcagaggcgcaaccagcagttcacccgcctggcggaagagcttagggccgagtgggaggaaagccagacgcagaaaatccagaacctggagaagctttacctagcatcattgcggagtatgggagagggccatagacaggcgaaggagaatgaacctgatttggacgcattggcccaacgagccgcagagagaaaaagaaaggcagacctacggcataaagaggcattaaaggttcagaagaaccagaaggagatccttctaaaacagaagacctggcacatcaaggctcggaaagaagccttgttggtcgaaaaggaaagatccgcaaaaatcacgtccttgcccccacctcctccgactctgttcgaaaatattgaggtcaagaggatttccgcagtcaagactaattcttctacttatcatcacctgcacacctttgttaaccgagagaccgacactaagcggccagatgccaggctcgctgcagaagaagaagcaaaaagactggaggagctccagaaacaggccgcacaggaaaggatggaacgctttgagaaggctcatgtgagaggattccaggccatgaaaaagatccatctggcgcagaatcaggagaaattaatgaaagagttgaagcagctgcagcaggaagacctcgctcggcgaagacaaacggttgcccagatgcctccgcaattggtggagttgccctataagagatcagagatgaaggaagactggcagcgcgagctggagttcgcgttcgaggatatgtacaatgctgatagaaaagtgaagggcaacctgattttacatctggaacctgagccccttcctaccgtgacaaatcaaattcaagacgaggagctggatctatccatggaacaagaaaatctcggagcggctgaggacctgccagttactgaagcagagatctgctcatcggaaacagatgtgcccctcgtgatgaagactcaacaaatacctagtaaagtgctgttcaaaaagcttctgaataaaatacgatcacaaaagtctctctggaccatcaaatctatgtctgaggacgagagcgagatgattaccacagtcagcgagatcgaatctaaggcgccaacggtggaatcaggtacaatcgcttccaaagagcgcaccttgagcagcggccaggagcaagtggtcgagtcagatacacttacaattgagagcggtccactggccagtgaagacaagccgctgtcatgtgggacgaactccgggaaagaacaggagataaacgaaaccttgcccatcacaactgtcgcccaatctagcgtgttgttacatccgcaggaagcagctgccagaattcgaatgtcggccagacagaagcagatcatggagattgaggaacaaaagcagaagcagcttgaattgctggagcaaatcgagcagcagaagttgcggttagagactgactgtttcagagcccagttggaggaggaaaagagaaaaaagacgcagcccacaggcgtcggaattgcacctgcgtcctgtccagtgatctcggacgaagacagccatagacagatgatcagaaattaccaacaccagctgctgcaacaaaatagactacaccggcaatcggtagaaaccgcccgaaaacaactgctcgaatatcagactatgctcaagggtcggtgcccatctgtgagtgccccaagcctgattacagattcagtgattagcgttccctcgtggaagtctgagaggcccacagccatctccgagcactgggaccaagggcagaggctgaagctcagcccgaacaagtaccagcccatccaaccgatccagactagcaaattagaacaggatcatttccaggttgctagacagaatcattttcctcagcgacaggtcgagaccaccgagacactcagggctagcgatatactcaccaaccaggctctcgagtcccaagagcacttgaggcagttctcccagactgagacccaacaacgcgactataagctggtgcctaaagacagcgagactctctctagagctcttagccacgatcgccagctcatcagccaggacgccagaaagatctcagagacttttggagccacaactttccagagtttagagtcacaacaattatttagtgaaaatagtgagaacatctcttatcacctcactgaaccatcaagcttcgtgccattagtcccccagcatagcttttcctccctgcctgtgaaggtagaaagtgggaagatccaggaaccattctcagcaatgagcaagtctactgtctcaacgagccactctatcatctcacagatgcacgatcgaccacttctgccgtctgaaaatattactgcacagcagggaaacatgaaggctcttcaggaacaactggatctgcagaagaaggtgctccaagcgacacaagaagctcaggaacagctcctattgtgcaagcagaaggaggtagagcagcaaaccgggctctccgtctttctcccactggttacgcccgatagctctgctcttctgcccagtgcaaaggccgacttgggcagaattcaggaatccagtcccacgaagaacaacatagccgtcagttccgaccaccacgtgatttcacagctgcaggacaagcgcttaagcttgagtcagcccattttgagccagcaaaacaattttaaattcttacaggagcagctgaatatacagaaggacagtctacaggcgaggcgtgaagcacaggaggtgttgtacgtccacaagcaaagcgagctcgaccgtcgcgtgtgttctgagcaggcggaaccatccttcccatttcaggtggcccagcacacgttcacctcacttccaagtgcggataccaagtctgggaagatccaggaacagcactcctctaagtccgagaagggacttgtgtcctgccagagcgatattcccatcagtcaggacggctctctgtccttcctgcagcagttcttgcccctgcacgatagcctaaagctgctccaagaacagttgacaaaacagagggacacattgcaggccagacatgaggctcaggttgagctgctactgcaccgccagagagaccttggtgatagcaagtccggactggtttcttcaagttcctctcctgttgtggtccagcattccgtggccagtcaggcttccgcaaaagctgaaccacggaggatacaggagctgtatctgagtgaaaaagagaatgttggcccatcttgtcacctgataataccgacattccaagataaaagtttgtcttttccacaacactctctggcccagcaggagaacctgaccattctccaagagcaatctcagatacagagagtgatcctgggggcaaaagaggggacccaggagtttgttcacacagagtctgagctggaaaagagaatttcttctgagcagaccggtacctcctcaagcctttcccaagttgatgagagcgaacgttttcaggagtgtattagtatcaaatccgattctactatccctctcagtcatccaaaaataccacgctgtcaggagagacttttacgggtctcacaacacatgcttccccttcaggataacctggaagaacaccaggcctggttggacaccgagaaggaggcatttcacttctcccaaaagacacaggaaaatacatcctccgagcagactggcagcagtagctttattccccaactagttcagctgtcatttactagtctggcttcggctgaaagtgggactattctggagcctttgtttacagaaagtgagtcgaaaatattttcctcacacctgcaaatcccacaattacaggaccggctgctgcgtatcagtcagctgatccagccacagcaagacaacctgaaagctttgcaagagcagctcgcaacacagcgcgaagcaattatcctggccaggcaggaagcgagggaagagctgctgcttcaccagagcgagtgggaggggaggataagccccgagcaggtggataccagcagccttcccctggttccccagcattctttcgccagcctgcccttaaatgaaagtgagcggaaccaggagccgtgttctatcaatagcgacaacatcgtttcttccggacacagcgaaattccgacattacctgatgggctgctgggcctgtcccatctggtgcttccccagcaggataatctgattgcactggaggagcaccttcacgcccagactgacttccttccctctatcgagaagacccaaaaagagctcgttcttagtaagccttgcaaattcgaagaaaaggtgagttccgagcattttattcaatctcaccacggcgacttacaggcactgcagcagcagctggacacacagaagaaggcaataagatctatccaagaagtacaggaggagctgctgttgcagaggttgagcgaactggagaaacgggtgtcgtcggaacaggtttgctctagctcctttgtctcgcaggttcccgtagctgactcagagcgcactcagaagagttttccaaccaagtcgaacgacaccctcccatcctctcaccgagagattcccagacttcaggaccgactgttgagcctctccaagcccattctgccgcagcaggacaacatgactgcccaattggatgcgcaaagggaggtgatgtactcttatgagaagccacaggaagagctgtcgctgaataagcaaagaaagcttaataagagcgagagcgccgaacacacaatcccttccctgttcctgcccaaggagacagagcactcgttcatccccttgccattcgcggaggccaaacctaagtctacatgtgagttgtattcgtcccagaatgaacacgctgctcccccatctaaccctgtgattcccggttttcaggatcggctactgagtttctcccaaagcgtgctcactcaacaggataacctcggactccagaagcagttggacttgcagcgagaagtgctccactactcacagaaagctcaagaaaaactgctcgtacagaggcagacagcccttcagcagcagatccagaagcacgaggagacattgaaggacttctttaaagattcccagataagcaaaccaacagtcgagaatgatctgaagacccagaagatgggccagttgcgagactggttccctaacacacaggatctggcgggtaatgatcaggagaacattcgacatgctgatagaaataactctgatgataaccacctggccagtgaggacaccagtgccaagcagtcaggagagcaccttgaaaaggacctcggcagaaggtcatccaagcctcccgtggctaaagtgaaatgcggtctggacctgaatcaacacgaactttccgccatccaggaggttgaatctcctgccatcgggcgtacatccatactggggaagcctgggatttacgaggatcgggaccctctcagggtttccatctcacgtgagcagtccttttttggcagtccgctcgcccacgatcccttttcttgtctccagctagtaggacaggaaaacgtctgcggggacgattatgacgaggccgtgaaattgaaggagtctgtggtggagaaccatgctgttctgtcctacgctgtggaggaggagcatgcctatctggggcctaccgtaaagccggacgacaaggccaagaccttgagctatgagccactgtcttcagcaactgtatccacagggtccttgctatcctacgagaacacggacctgtccctgaccgatccagaaagtttttctgagcacatggatgattcaaaacaggaatccacaacatccaaggaggaagagacaaacataataagttccatagtgccatctacccaagatatttaccagcgccagaacagttctgatgtccacaagtcactcctcccagcagtggatgagacgacctgcggccacactcactttcagcagatgatcgacaaatacatcaacgaagccaacctcatcccggaaaagacagacctgcaagaactggagcacattttccccaacctgcaccatcagctgtttaaaccactagagcctcatccggattttgacctgtcatcttcatcgtctggtatctccccggataatcgggacttttatcaaagatccgacagctcaagtgaatcccactgcgctaccgggctcagcaagagcacggtgtattttacagctctgagacgtacgagtatgcattcctcgcttaacacatctccgaaccagcagcctgatacaaacctagcccacgtgggggctcactctttcgcgaccgaaaatattataggcggttccgagcagtgttttgagcagttacaacccgagtacagttctcaagaggaaagtcaacacgccgatctcccctccatcttttcaatcgaagctcgcgattcctcacagggcatgaaaaaccagaattatccttctgaagaacatacagagattctgcagaacaaaaagaagatcgttcatttccagctgagtataggaaatttgagcagtgtttattcctcaagtgatgaagctaatgttttcgaccagctgaacgttcagcactcaacaccttgcgggagtaactcctcagaatgcagcaccaaacaccagcttgagagccgcaaagagtccatgggattcgaagaactttccaaacggggagtggtgacaatgttgcaaagccaaggactgatcgaagacaataagaatgagacttgcagggtgctggacattaacccacaggttgaggaaactgattctaggctatgtgtccgtactgttgagatggggacttcgattcaggccccttatagtctcacaactcaaaatgaaaagtacttcgaaaacagtgcggaaacagacatccccaaaattacaaagaaactgtcccaactcggtgaaagtgagctgtttgcctcctccggatccttctcccttcaaagcagtattcccgtgtgggaaactgagaccggccacggcatcatggaggaacccgagctgactttgatctccactacagacacctctatcgcagaaatggattttgccaacctgacacttgaggagaagtccgaaaatgaagccaagtgcttttttcaggtttctgagttcttgcctttggtgagcgccacggaggcctcagattaccccgcagtttcagagctctccatcgaaaaacccagaactgcttctacagcagaaactccccgaaggttaacaccagtgcccggaagcctgcaggaagcctttatcaagcgtaagaagagtttcatggagagatctcaccagaggcagaaggaaatccgcaataagatacatgtgagcgaaaattcccagataaagaccgtgaaggagaagccctcaatttcctcctccgtttcaaggttgaagggcgtgaataaggtgcgggcttctttcccagaggatagaaaaaccactcaggcattgaggcatcagaggggtctgagactatacaatcagcttgctgaggtgaagcagcagaaagaggaaaaaactaaacaggaagcatacgcacagaacagagctagggccaaagaatttcataagaaaaccttagagaagctccgagcaaaaaacacttgtta

SEQ ID NO: 29808 - DNA, 1602 bp, synthetic construct
  source 1..1602: mol_type = other DNA; note = Synthetic coding sequence
tccgccccatccgttgggaatgatatggggaacgacgacgccattggcggtaacgtcagtaaatacatcgtcctccctaccgggtattgtggccagcccaaaaagggccaccttatttttgacgcttgcttcgagagtgggaacctcggaagggtagatcaggtctccgaattcgaatatgacctcttcatcaggcctgatacgtgtaacccgcgattccgtgtgtggttcaatttcacagttgagaatgttaaggagtcacagcgcgtgatctttaatatcgtgaacttttctaaaacaaaatcattataccgtgatggcatggctcccatggtgaagtctacttcacgtcctaagtggcagcggttgcctccaaagaacgtctattactatcggtgccctgatcacagaaaaaactacgtgatgtccttcgccttctgcttcgaccgggaggaagatatctaccagttcgcctattgttatccctatacttacaccagatttcagcactacttggacagcctccagaagagaaacatggactatttttttcgggaacagctcggacagtcagtacagcaaagaaaactagacttgcttacaattacatcccctgataatcttagggagggcgctgaacagaaagtcgtgtttattactggcagagtgcaccctggcgaaacgccgtcgagtttcgtgtgccagggtattattgattttcttgtatcccagcaccccatcgcatgtgtgctgcgagaatatctggttttcaagattgccccaatgctgaatccagacggagtataccttggcaactaccgttgtagtctcatgggtttcgacttaaatagacattggctcgatccatccccctgggtccatccaaccctgcacggcgtcaaacaactgattgtgcagatgtataacgacccaaagacatcacttgaattctatattgacatccacgcccactccacaatgatgaatggttttatgtacggcaatatcttcgaagatgaggaaagattccagcgacaagcaatttttccaaagcttctgtgtcaaaatgccgaggactttagctactcatcaacgagttttaatagagatgcagttaaggcgggaacaggacgccgatttcttggagggctgctggaccatacctcctactgctacactctcgaagtgagcttttacagctatatcatctctgggacaacagccgcagtcccatacaccgaggaagcttatatgaagctgggccgaaacgtggcacgcacattcctggattattacagattaaaccctgtggtcgaaaaggtcgccatccccatgccaaggctccgcaacaaagagatagaggttcaaagacggaaagaaaagagccccccttataaacatcccctgctgcgtggacctgcaagcaactaccccaacagcaaaggagataagaagagctccgtgaatcacaaggatccctctaccccatttaaaacaaggtccccgggacgcagttatggagacagaagcatgcattttctgctgggaaatgaaatcaaccacagctcattagccagtaaggatctttggattaacgcttag

SEQ ID NO: 29809 - DNA, 1509 bp, synthetic construct
  source 1..1509: mol_type = other DNA; note = Synthetic coding sequence
atgcccgagattagagtcacgccactcggggcatgccctgtgttaagttggaatctggtcctcccccctgggaggggtagtcgggctccttcatccacagatacaagaactgggtttcacgtgctgccacatggcgtggatgacgagttggaaataaaagcctattatgcagggcatgttttaggcgcagcaatgtttcagattaaggtgggcagcgaatccgttgtctacactggggattacaatatgacgcccgatcgccatctgggtgccgcatggatcgacaaatgccgaccgaatctgctcattaccgagtcaacttacgcgacgaccattagggacagtaaacggtgtcgcgagagggacttcctgaagaaagttcacgaaactgttgagcggggagggaaagtgttaatcccagtttttgctctggggagggcacaggagttatgtatcctgctggaaactttctgggaaagaatgaatctgaaggttcccatttacttcagtaccggcctaacagagaaagccaatcattattacaaactctttatcccctggaccaatcagaaaataagaaagacctttgtgcaacggaacatgttcgagtttaaacatattaaggcctttgacagggccttcgccgataacccaggtcccatggtggttttcgccacgcctgggatgttacatgcagggcagtcgctccagatcttcagaaagtgggccggtaatgaaaagaatatggtgatcatgcctgggtactgcgttcagggtacagttggccacaaaattttgtctgggcagaggaagctggagatggaggggaggcaagtgctagaggtgaagatgcaagtcgagtacatgagcttcagcgcacacgccgacgcgaaggggatcatgcaactagtgggccaagccgaaccggagtctgtcctcctggtccatggggaagccaagaagatggaatttctgaaacagaaaattgagcaagagctacgggtgaattgctacatgcctgcaaacggggagacagtcaccttgccaacctccccaagtattccagtcgggatttctctcggtctgttaaagcgggaaatggcgcagggccttctcccagaagccaaaaaacctcgcttacttcacgggacccttataatgaaagattcaaacttcagactagtctccagcgagcaggcccttaaagagttaggcctggccgagcatcagctgagatttacctgtagggtgcatctgcacgatacaaggaaggaacaagaaactgccctgcgcgtttacagccatcttaaatctgtgctgaaggaccactgcgtacagcacttgcccgatggcagtgtgaccgtggaaagtgtgctgctacaggcggctgcaccgtccgaagatcccggaaccaaagtgcttctggtttcatggacatatcaggacgaagagcttggctcttttctcacctccttgctgaagaagggtctgccccaagcgccaagttag

SEQ ID NO: 29810 - DNA, 1371 bp, synthetic construct
  source 1..1371: mol_type = other DNA; note = Synthetic coding sequence
atggccgattctctggaaagcactcccctgcccagtcctgaggataggcttgctaagctgcatccctctaaggaattactggagtactaccagaaaaagatggccgaatgcgaagcagaaaatgaagatctgttgaaaaagctggagctctataaggaggcctgcgagggccaacataaacttgaatgcgacctccaacaacgcgaagaagagatcgcagaactgcagaaggcgctgagcgatatgcaggtgtgcctttttcaagagagagaacatgttctgcggctgtattcagagaacgatcgactacggattagggagctagaagacaaaaagaaaattcagaatcttttagctctggtgggtaccgacgctggggaggttacatacttctgtaaagagcctccacacaaagtgacaatcctgcagaagacaattcaggccgtcggggagtgcgagcagtctgaaagcagcgcctttaaggcagacccgaaaatcagtaaacgccgtccctcaagagagcggaaggagtcaagtgagcactatcagcgtgatattcaaacactgatccttcaggtggaggctctgcaggcccagctgggggagcagaccaagctgtcacgggagcagattgaagggttgattgaagatcgacgtatccacctcgaggagatacaggtccagcatcagcggaatcaaaacaagatcaaagagttgacaaagaacctccatcatacacaagaacttctgtacgagtcaaccaaggattttttgcaactgaggtctgaaaaccagaataaggagaaaagctggatgctggaaaaagataaccttatgtcaaaaatcaagcagtatcgggtgcagtgtaagaagaaagaagacaagatagggaaggtgctgccggttatgcacgagtcacatcacgcccaatcggaatacattaaaagcctgaaagataagttggttcaggaaaaaaaactgagtaatatgtatcaggaacagtgtatctcactagaggaagagttggctcggatacgggaggaggagggcatgcggagagaaatcttcaaagacagaacaaacaaaatgggtaagagactgcagataatgacaaaaagatacgaagcgttggaaaggcgcagaattctggaagttgaggggttcaagacagacatcaaagtgctaagacagaagcttaaggatctggaacagatgctttataaagccacagtcaatgcaagggctaaccaggacctggccctgctttgcgaggtgcgggattctaatcggcgagcacacaagattcagggcgaactgaaaaatctcaaatctaaagtttttggtctcgaaaacgagcttcgcctgtgctag

SEQ ID NO: 29811 - DNA, 270 bp, synthetic construct
  source 1..270: mol_type = other DNA; note = Synthetic coding sequence
atgagcgagcagggagacctgaatcaggcgatagctgaggaaggcggtacagagcaagaaacagcaacccccgagaatggaatcgtgaaatcggagagtctagacgaggaggagaagttggaattgcagaggcgtttggaggcacaaaaccaagaacggcgaaaatcaaagtcaggggcaggcaaagggaagttgacccggagcttggcagtttgcgaggaatccagtgccaggccaggcggagagtcactccaggaccagacgctctag

SEQ ID NO: 29812 - DNA, 453 bp, synthetic construct
  source 1..453: mol_type = other DNA; note = Synthetic coding sequence
atgcaccccgaggacagcgtcgtgagctcaaaagtgctcggatgttcacacttccccgtcgccagcagacccgctggatcccacgacccccagccgggacaccggggacgggtgcttggccctgcgagggctccaggctgggttcggtatgcagaacgagtgttgggacggcctattaccgctcatctctgtactgctaagagtccccagcaggtgatgggctccctcgtcaaggattactttgcaagacaacagaacctgagccctgaaaaaatcttccacgtgattgtcgccccttgctacgataagaagttggaagcactgcaggaaagcctcccgccagcattgcacgggtcccgcggagctgattgtgtgctaactagcggggaaattgctcagatcatggagcagggagatctgagtgtcagggacgctgctgtggatacactctag

SEQ ID NO: 29813 - DNA, 534 bp, synthetic construct
  source 1..534: mol_type = other DNA; note = Synthetic coding sequence
atgggctgctgcgggtgtagtcggggatgtgggagtgggtgtggcggatgcggcagctcctgcgggggttgtggctctggatgtggcggttgtggttctgggcgagggggttgtgggtctggttgtgggggttgttcctcctcctgcgggggttgtggttctagatgctatgtcccagtttgttgctgcaaaccagtgtgttcctgggtccctgcttgcagctgcacctcatgtggatcttgtgggggaagcaaagggggatgcggctcttgcggaggcagcaaagggggttgtggctcttgtggcggttcaaagggtgggtgcggaagctgtgggtgttctcagtcatcttgctgcaagccttgttgttgttcctctggttgtggatcctcctgctgtcagtcttcttgttgcaagccttgctgttgccaatcttcgtgctgtgtcccggtgtgctgccagtcgagctgttgcaagccgtgttgctgccaatcaaattgttgcgtgccggtgtgctgccagtgtaaaatctag

SEQ ID NO: 29814 - DNA, 294 bp, synthetic construct
  source 1..294: mol_type = other DNA; note = Synthetic coding sequence
atgccggctgaattgtggttaacatcatatggtgtgcgggaggtggatcaagttaagcggcttacagggccaggcctgtctgaggggcctgagccctccataagcgtgatggttaccggagggccttggccaactaggcttagccggacgtgtcttcactatctcggtgagttcggggaggaccagatctacgaagcccatcaacaaggccgaggtgcactagaggccctgctgtgcggcggtccgcaaggtgcgtgcagtgagaaagtgtcagctacccgtgaagaactgtag

SEQ ID NO: 29815 - DNA, 264 bp, synthetic construct
  source 1..264: mol_type = other DNA; note = Synthetic coding sequence
atggagaaccagctggccaagtccacggaagagaggactttccagtatcaggactccttgccaagcttgccagtgccatcactggaggaatccttgaaaaagtatttagagagcgtgaagcctttcgctaatcaggaggagtacaagaagaccgaagagatcgttcaaaaatttcagtctgggatcggcgaaaagttgcaccaaaagctactggagcgcgctaaaggtaaacgcaattgggtctttgttgtgatcatcgaatag

SEQ ID NO: 29816 - DNA, 1881 bp, synthetic construct
  source 1..1881: mol_type = other DNA; note = Synthetic coding sequence
atgtgcagcactctgaagaagtgcggaacctaccggaccgaggttgcagagtgccatgaccatggatcaaccttccagggacgcaagaaaggcggttctagcttccgagataatttcgacaaacgcagttgccactacgaacacgggggttacgagcgtccgccaagccattgtcaagagaatgatgggtcagtggagatgcgtgacgtgcacaaggatcagcagctaagacacacaccctatagcatcaggtgtgagagaaggatgaagtggcactctgaagatgagattcggataactacctggcggaaccgaaaacccccagagagaaaaatgtctcaaaatacacaggacggctacacccggaactggttcaaggtgaccattccatacgggataaagtacgataaagcgtggctaatgaactccattcagtcacactgttcagatcgctttacacccgtcgactttcattatgtgcggaaccgagcgtgcttcttcgttcaggatgcctccgccgctagcgccttgaaggatgtgtcatataaaatttatgacgatgagaatcagaagatttgcattttcgttaatcatagcacagccccttattcagtcaagaacaagttgaaacctggacagatggagatgttgaaactgaccatgaacaaacggtataatgtgtcgcagcaggccctggatctccagaacctccgattcgacccagatctaatgggacgtgatatcgatataatcttgaaccgtcgcaactgcatggccgctacgctgaaaattattgaacggaactttcccgagctactgtctctcaatctgtgcaacaataagctttatcagcttgacggcctctctgatattactgaaaaggcaccaaaagtgaagactctgaatctgtctaagaacaaacttgagagtgcatgggagctggggaaggttaaggggttgaagctggaggagttatggctcgaaggtaatccactatgttccactttttccgatcagtctgcgtacgtctcagccatcagagactgctttccaaaactgctgagattggacgggagagaactgagcgcacctgtcattgtcgacattgattccagcgagacaatgaaaccgtgcaaagagaacttcacaggtagtgaaactctaaagcaccttgtactgcagttcttgcagcagtactatagtatctacgacagtggcgatcggcaaggactgctcggcgcttaccacgacgaggcctgtttctcgctggcgatcccttttgatcccaaagacagcgccccaagttccctgtgcaaatatttcgaagacagccggaacatgaagaccctgaaagacccatatctcaaaggcgagctgcttcggagaactaaaagggacatagttgactcactgtccgctctccccaagacccaacatgacttgagttcaattttggtcgacgtatggtgccagactgaacggatgctgtgtttttctgttaatggtgtgtttaaagaggtggaaggacagtcccagggctccgtgcttgcattcactaggacatttattgctactcccggttccagtagctctctgtgcattgtaaacgacgagctctttgtccgcgacgcttcccctcaggagacccagagtgcattttccattcctgtaagtaccctgagttcttcttccgagcccagtctgagtcaggagcagcaggagatggtccaagcattctctgctcagagcggcatgaaattggaatggagccagaagtgcctgcaggacaacgagtggaactacactcgtgcaggtcaggctttcacaatgctgcagacagagggaaaaatccctgcagaggcattcaagcagatttcttag

SEQ ID NO: 29817 - DNA, 2940 bp, synthetic construct
  source 1..2940: mol_type = other DNA; note = Synthetic coding sequence
atgttatgctggggtaatgcctctttcgggcagttaggccttggcggtatcgatgaagaaatcgttcttgaaccgaggaaaagtgacttcttcattaacaagcgcgttcgggatgtgggttgcggtcttcgccatacagtgtttgtgctggatgacgggacggtatatacgtgtgggtgtaacgatctagggcagttgggccatgagaagtcccgaaagaaacctgagcaagtggtggctctggacgcccagaatatcgtcgctgtctcatgtggcgaggcccataccttagctctcaatgataagggacaggtctatgcatggggactcgattctgatggacaactggggctggtaggctcagaggaatgtataagagttccgagaaatattaaaagtttatccgacatacagatcgttcaggtggcatgcgggtactaccacagcctggctctgagcaaggcaagcgaggttttctgctgggggcaaaacaagtatgggcagctgggtctgggcactgattgcaagaagcagacctctccgcagttgctgaagagtttgctcggcattcctttcatgcaggttgccgcaggcggagctcactcgttcgtgcttacactgtcaggcgcaatttttggctggggaaggaataagttcggtcagctgggcctgaatgatgagaacgatcggtatgtgccaaacctgttgaagtctctacggagtcagaagattgtttatatctgttgcggggaggaccacacagcagccttgacgaaggaaggaggagtgttcacatttggcgctggaggatacggacaattgggccataatagtacaagccatgaaatcaacccgaggaaggtctttgagctaatgggcagcattgtcaccgagattgcctgcggcaggcagcacactagtgcgttcgtgccctctagcggccgaatctattcattcggactcggcggaaatggtcagttgggcactggatcaacttccaaccgaaaaagccccttcactgtgaaggggaactggtatccctataatgggcagtgtctccctgacattgatagtgaggagtacttctgtgtaaagaggatcttttcaggcggtgaccaatctttctcgcactactctagcccgcagaattgcggccctcctgacgactttcggtgtccaaaccccactaagcagatctggactgtgaatgaggccttaatacagaaatggctgtcctacccttccggtaggttcccggtggaaatagccaatgagatagatggcacattcagctcaagtggctgtttgaacggctcgttcctcgctgtttccaatgatgaccattatagaacaggcaccaggttcagtggcgtggatatgaacgctgcccgtctcctgttccataagctgatccagccagaccatccacagatctcgcagcaggtggcagcctcgctggagaaaaatcttattcctaaattgacaagcagcttgcctgacgttgaagccttgaggttttacctgacgctgcccgaatgtccactgatgtcagatagtaataatttcacgacaatagctatcccgtttgggacagccctggtgaacctcgagaaagcccctctcaaggtcctggaaaactggtggtccgttttggaacctccattgttcctcaaaattgtggaacttttcaaggaagtggtggtgcaccttcttaagctgtataaaattggcatcccccctagtgagagacggatcttcaacagttttctccacactgccttaaaagtgctcgagatactgcatcgggtaaatgaaaaaatgggacaaattattcagtatgataaattttatattcatgaagtccaggagcttatcgacattaggaatgactacatcaactgggtccagcagcaagcctatgggatggacgtgaatcacgggctgacagaactggctgacatccccgtgaccatatgcacttacccatttgtctttgacgctcaggcaaagactaccctcctgcaaacagatgcagtcctgcagatgcagatggctatcgatcaggcacaccgacagaacgtgagcagtctgtttttgcctgtcatcgaatcagtcaatccatgcctgattctggtggtgcgcagagagaacattgtgggcgatgcaatggaggtgctgagaaaaacaaaaaacattgactacaaaaagcccctgaaggtcatatttgtgggcgaagacgccgtggacgcaggaggcgttagaaaggagttctttctgctcatcatgagggagctcctggaccccaagtatggaatgttcaggtactacgaggattctcggctcatatggttcagtgacaaaatcactgttgagaattttggagccacagaagtgaaggagctggtgctaaatggagccgacaccgcggttaataagcagaatcgccaggaatttgtggatgcttatgtggactacatctttaacaagtccgtggcctctctttttgacgcgttccatgccggattccataaggtctgcgggggtaaggttctgctgctcttccagccaaatgaactgcaggcaatggtcattggcaacactaattatgactggaaggagctggaaaaaaacacagaatataagggtgagtattgggcagaacacccaaccataaagatcttctgggaggtgtttcatgagctgccactagagaaaaagaaacagttccttcttttccttacagggtctgatcgcatacccattctcgggatgaaatccctgaagctagtcatccagagtaccggtggaggagaggaatatttgccagtgagccatacctgtttcaacctcttagatcttcctaaatatacagagaaagagacactgcggagcaagctgatacaggccattgaccataacgaaggcttctcactcatttag

SEQ ID NO: 29818 - DNA, 1020 bp, synthetic construct
  source 1..1020: mol_type = other DNA; note = Synthetic coding sequence
atgaagattttcgtgggcaatgttgacggcgcagatactaccccagaagaattggccgcactgtttgccccttatggaaccgtcatgtcctgcgctgtgatgaagcagtttgcattcgtgcacatgcgcgagaacgctggcgcactgcgagccattgaagcactccatgggcatgagctgagacccggacgcgcactcgtggttgaaatgagccggcctagacccctgaacacttggaagatcttcgttggtaatgtttccgctgcctgcacatcacaggaactccgtagcctgtttgagcgcaggggacgagtgattgagtgcgatgtggtgaaagggaagcggatgcacgtgcaactcagtaccagcaggttgcgcaccgcccctggaatgggggaccagagtggttgctatcgatgcggcaaggaaggtcactggtctaaggagtgtcctatagatagaagtggcagagttgccgatttaaccgaacagtataatgagcagtatggagcagtgagaacaccatacaccatgagctacggcgattctttgtactacaacaatgcatacggtgccctggacgcctactacaagaggtgtcgggctgctagaagctatgaggccgtggccgctgcagctgcttcagtgtacaattatgccgagcagaccctttcccaattgcctcaggtccagaatacagcaatggcatcacacctcaccagtaccagcctggatccatacgatcggcatctcctgcctacatctggggctgccgctacggcggctgccgcagcagctgctgctgcggctgtcaccgcagccagcacatcctattatggacgtgatcgctcccctctacggcgtgctaccgcacctgtgccaactgttggcgaggggtatggttacggccatgagtccgaactgagccaagcgagcgcagcggctcgcaattccctttatgatatggctagatacgagcgggaacagtacgccgatcgtgccaggtacagcgcattttag

SEQ ID NO: 29819 - DNA, 390 bp, synthetic construct
  source 1..390: mol_type = other DNA; note = Synthetic coding sequence
atggcggaactcatccagaaaaaactgcagggcgaggtggagaagtatcaacagctccagaaagatttgtctaagagcatgtccggcagacagaagcttgaagcccagttgacagaaaataacatcgttaaagaggaactggctctgctcgacggctcaaacgtcgtgtttaagctgctaggcccagtgttagtgaagcaggagctcggcgaggcacgggctacagttggcaagcgtctcgattacatcacagcagagattaaaaggtatgagtcacagctacgagatctggaacgccagtcggagcagcaacgcgaaacccttgcccagttgcaacaagagtttcagcgtgctcaagcagcaaaggctggagctcctggaaaagcgtag

SEQ ID NO: 29820 - DNA, 1695 bp, synthetic construct
  source 1..1695: mol_type = other DNA; note = Synthetic coding sequence
atgtcatatcccgctgacgattatgaatcggaggcagcttatgacccctacgcctatccctcagactacgatatgcacacgggtgaccccaagcaggaccttgcctacgaacgccaatatgaacaacagacctatcaggttatccccgaagtcatcaagaacttcatccagtattttcataagacagttagcgatttaattgatcagaaagtatacgagctgcaggcgtcaagagtgtcttcggatgtcatcgaccagaaggtgtatgagattcaggacatatacgaaaatagttggaccaaattaactgagagatttttcaaaaacacgccttggccggaggctgaggcaattgctccccaggtgggtaacgatgccgtgttcctcatcctatataaagagctgtactataggcacatctacgctaaggtctctgggggtcctagtttagagcagaggttcgaaagctactacaactattgcaatcttttcaattacatcctcaatgccgacgggcctgctcccctggagctacccaaccaatggctgtgggatatcattgacgagtttatctatcagtttcagtcattctcgcagtatagatgtaagactgccaagaaatccgaggaagagatcgattttttaagatcaaacccaaaaatctggaacgtgcattcagtgcttaatgtgttgcattctctggtcgataagagcaacattaatagacagctcgaagtgtatacttcaggcggagatcctgagtctgtcgccggtgagtacggccgacactctctatacaagatgctgggatatttctcactcgtcggcctgcttcgcttacactccctgctgggggattattatcaggcaattaaggtcctggaaaacatcgagttaaataagaaaagtatgtattctcgggtccctgaatgtcaggtaaccacctactattacgttggattcgcttatctgatgatgagaaggtatcaggatgcgattcgggtcttcgcaaatattcttctgtatatccagcgtacgaagtccatgtttcagaggacgacgtataagtatgaaatgattaacaagcagaacgagcagatgcatgcattgctggccattgccctgacaatgtatcccatgcgcattgatgagtcgattcacctgcaactccgcgagaaatacggagacaaaatgctgcgaatgcagaaaggcgacccacaagtatacgaagagctgttcagctacagctgtcccaaattcctatcgcctgtcgttcccaactacgataatgtccatccaaactatcataaggagccatttctgcaacaactcaaggtattctctgacgaggtgcagcagcaagcccagctgtccactataaggtcgttcctgaaattatatacgactatgccagttgcgaaactggcaggctttctggacttaaccgaacaagagttccgaatccaactactggtgttcaaacataagatgaaaaacttggtttggacgtccggaatcagcgcattggacggcgaattccagtcagcatcagaggtggacttttacattgacaaggatatgatccacattgccgataccaaagtcgccaggaggtacggggacttttttatccggcaaatccacaaattcgaagagctgaacaggacacttaagaaaatgggtcagagaccatag

SEQ ID NO: 29821 - DNA, 789 bp, synthetic construct
  source 1..789: mol_type = other DNA; note = Synthetic coding sequence
atggcactgtctctgggctggaaggcacacaggaaccactgtggtctcttacttcaggccttgagatcaagcgggcttctattgttcccttgcggacaatgtccttggaggggcgctgggagctttctggaccctgagataaaagcattcttggaagaaaacacagaggtcaccagtagcggtagtctgacccccgagatccagctgagactgctcacccccaggtgcaaattttggtgggaacgggcagatctgtggccgcattccgatccctattgggccatctactggcccggaggacaggctctatccagatacttgcttgacaaccctgatgtcgtgagaggcaagagcgttctggacctaggctctggttgcggagcgaccgcaattgccgctaaaatgagtggcgcatcccgcatccttgccaatgacattgaccccatcgccggaatggccattaccttaaattgcgagctcaacaggttaaacccctttcctattctgatacagaacatactcaatctggaacaggacaaatgggatttagtcgtcctgggggacatgttttacgacgaagatctggccgactccctgcatcaatggttaaagaaatgtttctggacataccgcacacgggtcctaataggcgaccctgggaggccacaattttctggtcattccatccaacaccaccttcataaggtcgtcgaatactctttgcttgagtctacccgtcaagagaactccggactgacgacttcaacggtatggggctttcaaccatag

SEQ ID NO: 29822 - DNA, 1626 bp, synthetic construct
  source 1..1626: mol_type = other DNA; note = Synthetic coding sequence
atgtcctcttgcgtttcctcccagccatcgtcaaatcgtgcagcccctcaggatgagctaggcggacgcggatcctctagctctgagagtcagaagccgtgtgaagctttacgaggacttagttccctgagcatccacctgggaatggaatcttttatcgtggtaaccgagtgtgaaccaggctgcgctgtggatctcggactggcaagagatagaccgctcgaagccgacgggcaagaagtgcccctggacactagcggttctcaagccagacctcaccttagtggcaggaaactgagcctccaggaacgcagtcaggggggtcttgccgctggcggatccttggacatgaatggacggtgcatttgtccgagcctcccgtattcgcctgtgtctagcccccagagcagtcctcgtctcccccgaagacccacagtggaatctcaccatgtctccatcaccgggatgcaagattgtgtgcagctgaaccagtatacgcttaaggatgaaatcggcaaggggagctatggggtagtgaaactggcctataatgaaaacgataatacttactacgctatgaaagtactctccaaaaagaagctgatcagacaggccggatttccacgtagaccccctccgaggggcactagaccagctcccggaggatgcatccagcctaggggacctatcgagcaggtataccaggaaatcgctatcctcaagaaactggaccatcccaatgtcgtgaagctggtggaggtgcttgatgatcctaatgaagatcatttatacatggtcttcgaactagtcaaccagggaccagtcatggaagttccaacactgaaacccttgtcagaggatcaggcaagattctattttcaggacctgattaagggcattgagtacctccattatcaaaagattatccatcgtgacatcaaaccctctaacttactcgtcggcgaggacggccacattaagatcgccgatttcggggtaagcaatgaatttaaggggagcgatgctcttctgtcaaatacggtgggcacccccgcattcatggccccagagtccctttccgagactagaaagatttttagtggcaaggcactggatgtgtgggccatgggtgtaaccctgtattgtttcgtatttggccagtgtccctttatggatgagagaataatgtgcctgcactctaagattaaaagccaggccctggaattccccgaccagccagatattgcagaggacctaaaagacctcattacccggatgctggacaagaaccccgagagtaggattgttgttccggagatcaaactacatccatgggtgacacggcacggcgctgaaccccttcccagtgaagacgaaaactgcaccctcgtagaggtgacagaagaggaagtggagaactccgtgaagcacatcccctcactagcaactgtgatcctagtcaagaccatgatcagaaaacggtcatttggtaacccatttgagggctctaggcgcgaggagagatctctatcggctcctgggaatctactcaccaagcaggggagcgaggataacctgcagggaaccgatcctccccctgtgggggaggaggaagtcctcctgtag

SEQ ID NO: 29823 - DNA, 303 bp, synthetic construct
  source 1..303: mol_type = other DNA; note = Synthetic coding sequence
atgtccacgataggcagctttgagggattccaggcagtcagcctcaagcaagagggggatgatcaaccctcagagacagatcacctcagtatggaggaagaagatcccatgccccgacagattagccgtcagagcagcgtgacggagtccactctgtatccaaacccataccatcaaccctatataagccgcaagtattttgctactagacctggcgctattgagacagctatggaagacttaaagggccacgtcgctgaaacttcaggagagacaatccaagggttttggttgctcacttag

SEQ ID NO: 29824 - DNA, 1425 bp, synthetic construct
  source 1..1425: mol_type = other DNA; note = Synthetic coding sequence
atggagcggtctggtcagcgtgtgaccacgtgggactgcgaccaagggaagcacagcgactctgactatagagaggacggcatggatttggggtctgacgccggatcatccagttcctcctctagggcgtcttcgcagagcaactctaccaaagtaaccccctgcagcgagtgcaagagttcgagcagcccgggtggctcactggatcttgtttccgcattagaggactacgaggagcctttcccagtgtaccagaagaaggtcatcgacgaatgggcccctgaggaagacggcgaggaagaagaggaagaggatgagcgggatcaaagaggatacagggacgatcgttcccccgctcgggagcctggggacgttagtgctagaaccaggtcgggtggcggtggcggaaggagcgctaccacagctatgcctccacccgttcctaatggcaatctacatcagcatgatccgcaggatctgagacataacgggaatgtcgtggtagccggaaggccatcttgttctcgcggtccacggagagcaatccagaaaccccagcccgcaggcggacggaggtccggacgcggtcctgccgctggcggactttgcctgcagcctccagacggcggaacttgcgtacctgaggagccgcctgtgcccccaatggactgggaagccctcgaaaagcacctggccggtctgcagtttcgcgaacaggaagcgcagaagaacgagcgagaatcaatccgacagaagctcgcactgggctctttttttgatgatggccctggtatctatacttcttgcagtaagtccggcaagccctctttatctagcaggctgcagagtggaatgaacctccaaatctgtttcgttaatgattcggggtcggacaaggatagcgacgctgacgactccaagactgaaacgtctctggacaccccactgagccccatgagtaaacaatcctcatcttattcagatcgagacactacagaggaggaatccgagagcctcgacgatatggacttcctcacccgtcagaaaaaattgcaggccgaggcaaagatggcgctggccatggctaaacctatggctaagatgcaggtggaggtggagaagcagaatcggaagaaatctccagtcgctgatctgctgccccatatgccacacatcagcgagtgcctcatgaagcggagtctgaagcccacagatttgagggacatgaccatcggacagctccaggtgatcgtcaatgacttgcactctcagatcgaatctcttaatgaagagttagtgcagctgctgttgattcgagatgagctacacaccgaacaggatgcgatgctcgtggatattgaggatctcacaaggcatgcagaatctcagcagaagcatatggctgagaaaatgcctgcaaagtag

SEQ ID NO: 29825 - DNA, 690 bp, synthetic construct
  source 1..690: mol_type = other DNA; note = Synthetic coding sequence
atgcagcagcgcgtgctggagctgattccacaaatcgccaacgagcaactgacagaagaacttctgatcgtcaacgacaacctcaacaacgtgttcttgcggcacgaacgcttcgaaaggttccgcacaggacagaccaccaaagcgccatccgaggctgagccagccgcagatttaattgacatggggccagatccggctgccacaggcaacctgtcctcgcagctcgctggaatgaacctgggcagcagctcagtgcgcgctgggctgcagtccctggaagcttccggcaggctagaggacgagttcgatatgttcgcactgaccagggggtcgagcctcgcagatcagcgaaaggaagttaaatacgaggcacctcaggctacggatggactggctggagcccttgacgccaggcagcagtccactggcgcaatccccgtcacacaggcctgtctgatggaagacatcgaacagtggttatctactgatgtgggcaatgatgctgaagagcccaaaggggtgacttcagaggaattcgacaaattcttagaggaaagggcaaaagcagccgaccgtttacctaacttgtctagcccgtctgcagaaggcccaccaggtcccccatcaggacctgcacctcgcaagaaaacacaggaaaaggacgatgacatgctgtttgccctgtag

SEQ ID NO: 29826 - DNA, 1650 bp, synthetic construct
  source 1..1650: mol_type = other DNA; note = Synthetic coding sequence
atgtccagggtggcaaagtacaggcgccaagtctcagaggaccccgatatcgattcactgttagagacattgtcaccagaggaaatggaggaactcgagaaagagctggacgttgtggaccccgacggttcagtgcctgtggggctgcgacagcgcaaccagaccgagaaacagagcaccggggtatataacagagaggctatgctcaacttctgcgaaaaagagactaagaaacttatgcagcgcgagatgtctatggatgagagtaagcaggtagagaccaagacagatgcaaaggaagaaaaaattattagagggatcgacaaaggccgtgtcagggctgcagttgataagaaagaggcgggtaaggacggacgaggcgaggaacgagccgttgccacaaagaaagaagaggagaagaaaggctccgaccgaaatacaggcttgagtcgcgacaaggacaaaaagcgcgaggagatgaaagaggtagcaaaaaaggaagacgacgagaaggtgaagggagaacgcaggaataccgacacccgcaaggaaggcgagaaaatgaagcgggctgggggtaataccgatatgaaaaaggaagacgagaaggtgaaacgcggtacaggcaacaccgataccaaaaaagacgatgagaaggtgaagaaaaacgagcccctccacgagaaggaagctaaagatgactctaagactaagactccggagaagcagaccccctctggcccaacgaaaccctctgaagggccagcaaaggtagaggaagaggcggcaccttccatcttcgatgaacccctggagcgcgtaaaaaataacgacccggaaatgacagaggtgaacgtcaacaacagcgattgcattacaaatgagatactcgttagatttaccgaggcacttgagttcaacacagtcgttaagctgtttgctctagcaaacaccagggcagacgaccatgtggccttcgccatcgccattatgctgaaggcaaacaaaacaataacatcgcttaaccttgattctaaccatattactggcaagggtatcctggccatatttagagctttgctgcagaataacaccttaacagagctccgctttcacaatcagcgccacatttgtggagggaagacagagatggaaatagctaaactgctgaaggagaacaccactctgctgaagctcggctaccacttcgaactggcaggtcctcgaatgactgtaacaaacctgctgtctaggaacatggacaagcagaggcagaaacgtctgcaggagcagcggcaggctcaagaggccaagggtgaaaagaaggacctgctggaggtgcctaaggccggtgcagtagccaagggcagtccaaaaccctctccacagccctctcccaagcctagccccaagaactcaccaaagaagggcggagccccagccgcacctccccctcctcccccaccgctagccccacccctgataatggagaatttaaagaattctttgagtcccgcaacccagaggaaaatgggagacaaggtgctgccggcacaagagaagaatagcagggaccagctcctggccgctatccgcagctctaacctcaaacaattgaagaaggtggaagtgcccaaactgctgcagtag

SEQ ID NO: 29827 - DNA, 231 bp, synthetic construct
  source 1..231: mol_type = other DNA; note = Synthetic coding sequence
atgtccgcctcctgcgacggatgcgtgggttctcgtccccctgtgcacctcgccagcggttatagcctagcggacttgttagttctggagatggggatgggaacccaatgttggaccgaagatcagcgtaggtggagttctctttggccatggtcacacctgtcttctgaccctagtttgcccaatgtgcaagtcacacgtctaacacttctgtcggagcaggctccctag

SEQ ID NO: 29828 - DNA, 1416 bp, synthetic construct
  source 1..1416: mol_type = other DNA; note = Synthetic coding sequence
atggctaacagcttcgcggctagaatctttaccaccctgtctgatttgcagaccaatatggctaatctgaaagtaattggaatagtgattgggaaaacagatgtcaaggggtttccagaccgtaagaatataggaagtgagcgatacacattttcattcacaattcgggattcccctgcccatttcgtcaatgccgcatcctgggggaacgaagattacataaagtccctgtccgacagtttccgcgtgggggactgcgtgataatcgagaaccctctaattcagagaaaggaaattgaacgggaggagaaattctcccccgctactccatctaactgcaaactccttctgagtgagaatcattctacagtcaaggtttgttcttcctacgaggtcgataccaaactgctttccctgatccaccttcctgtgaaggagtcacatgactattactctctgggggatatagtcgccaatggacactccctgaacggaagaatcatcaatgtgttggcagctgttaagagcgtgggtgagcctaaatatttcaccaccagtgacaggcggaaaggccaacgctgcgaggtcagactctatgatgaaacggagagcagctttgccatgacttgctgggataatgaatcaatcctcttagctcagtcttggatgccgcgagaaactgtgatttttgcgtctgatgtgagaattaattttgataagtttcgtaactgtatgacagcaacagtgatcagcaaaacaattattaccacaaacccagacattcctgaagccaatattctgcttaattttatccgagagaataaggagacaaacgtgcttgacgatgagatcgattcatattttaaggagtccattaacttgagtacgatcgtggatgtgtatacagtcgagcagcttaagggaaaagccctgaaaaacgaagggaaagcagatccctcttatggaatcctctatgcgtatatctctaccctcaacattgacgatgaaactacaaaagtggtgcggaaccggtgttccagctgtggatatattgtgaacgaagcctcaaatatgtgcactacatgcaacaagaattccctagattttaagtccgtctttctttccttccacgtgcttatcgacttgactgatcatactggaaccctgcattcatgtagccttaccgggagtgtagccgaggaaacgcttggatgcactgttcatgagttcctggctatgacggatgaacagaaaacagcattgaaatggcagttcctattggaacggtcaaagatctatctcaaatttgtcctgagccatagggctcgaagtggcctgaagatttccgttttatcttgcaagctggcagatcccacggaagctagtcgcaatctgtccggacagaagcacgtctag

SEQ ID NO: 29829 - DNA, 747 bp, synthetic construct
  source 1..747: mol_type = other DNA; note = Synthetic coding sequence
atggccacaagcgctccactgcgatcccttgaggaagaagtcacatgcagtatatgtcttgattatttaagagatcctgtaacaatcgattgtggacatgtgttttgtaggtcttgcactaccgacgtgcggccaattagtggcagccgacctgtctgtcccctgtgtaagaagcccttcaagaaagaaaacattaggcccgtgtggcagctggctagcttagtggagaatattgagcgactgaaagtggataaaggcagacagccaggcgaggtgactcgagagcagcaagatgcaaaactgtgtgaacgacacagagaaaagctccattactactgcgaagatgatggaaagcttctgtgtgtcatgtgcagagagagtagggagcaccgccctcacacagccgttctgatggagaaagccgcacagccccacagagaaaagattttaaatcacctgtcgacacttagacgggatagggacaagattcagggctttcaggctaaaggagaagctgatatcctggcagcccttaagaagctgcaggaccagcgccagtacatcgtcgcagaattcgagcagggccatcaatttctgagagaacgggaggagcatctactcgagcagcttgctaaactcgagcaggaattaacggaaggccgtgagaaatttaaatcccgcggagtgggcgagctcgctagactggccctggtcatctccgagcttgagggcaaagcgcagcagtag

SEQ ID NO: 29830 - DNA, 2646 bp, synthetic construct
  source 1..2646: mol_type = other DNA; note = Synthetic coding sequence
atgttttggaagttcgacctgcacactagctcgcacctggatacactgctcgaacgcgaggatctgtcactccccgagctattggatgaggaggacgtattacaggaatgcaaggtggtgaacagaaagttgttggactttctgcttcagcctccacacctccaggccatggtcgcatgggttacacaagagccacccgatagcggcgaggaaagattgagatataagtatccaagcgtagcctgtgagatactaactagcgatgtaccacagatcaatgatgctctgggagccgacgaaagtctgctgaaccgtttgtatggatttctgcagtctaccggatctctgaatccgctccttgcctcatttttcagtaaagtaatgggtatcctgattaacagaaagaccgaccagttggtgtccttcttgaggaagaaagatgatttcgtggatctgctcctgcagcacattgggacctccgccatcatggatctgctcttgaggctcttgacatgtgtcgagagaccacagttgaggcaggacgtagtcaattggctgaatgaggaaaagatcgtccaacgcctgatagagcagatccacccaagtaaagacgagaatcaacacagtaacgcaagccaatccctgtgtgacattatcagactcagccgggagcaaatgattcaggtgcaggactctccagaaccagatcagctactcgcaaccctggagaaacaggagaccatagaacagctcttgtccaatatgttcgagggcgagcagagccaatcagtaatcgtcagtgggattcaggtgctgctcacgctattggagcccaggaggcctcgaagtgaatctgtgaccgtcaacagctttttctctagcgtcgatggccaactcgagctgctggctcaaggcgcactggagagcaccgttagttccgtgggtgcactgcacgccctcagaccaaggctgtcatgcttccaccagctcttgctggagccacccaaactagaacccctgcagatgacctggggtatgctggcccctcctctgggtaatactcgactacatgtggtcaagttgctggcatccgccctgagcgccaatgacgccgctctcacacatgagctcctggcccttgacgttcctaacacgatgctggatttgttttttcattatgtctttaataactttttacatgcacaggtggaggggtgcgtatcaacgatgctgtctctgggacccccacctgatagctctcctgagacgcccatacaaaacccagtggtgaagcacctgttgcagcagtgcaggctggtcgaacgtatcctcacttcatgggaagagaacgatcgagtgcaatgtgctggaggaccccgtaagggctacatgggacacctgacccgagtcgcaggtgccctggtgcagaacacggagaaagggccaaacgccgaacaactcaggcaattgctaaaggagctcccaagtgaacagcaggagcagtgggaagcctttgtgtcagggcctctggccgagactaacaagaaaaatatggtggacctggttaacacccatcatctgcattcctcaagtgatgatgaggacgaccgtctgaaggaattcaattttcctgaagaggcagtcctgcagcaagcattcatggatttccagatgcaacgtatgacctccgcctttatagaccacttcggcttcaacgacgaagaattcggcgaacaggaggagagtgtcaacgccccattcgacaagaccgcaaatattaccttcagtctgaacgcagacgacgagaacccgaacgcaaacttgctggaaatctgttacaaagatagaattcaacagtttgatgacgatgaggaggaagaggacgaggaggaggctcaaggctcgggcgagagcgacggtgaagacggcgcttggcaggggtcacagctcgccagaggtgccagattgggacaacctcccggtgtccgctctgggggaagtacagatagcgaggatgaggaggaggaggatgaggaagaggaagaggacgaggaagggatcggctgcgccgcacgaggaggagccacccccctgagctaccctagccccggaccacaaccaccaggcccttcctggactgcaaccttcgatcccgtccctaccgacgctcccactagccctagagtttcgggtgaggaggagttacacacgggtccccctgcaccacagggaccactgtcagttcctcagggccttcctacccaaagcctggcatcaccgcctgccagggatgctttgcagctccgctctcaggaccctacgcctccgagtgcccctcaggaggccaccgaaggctcaaaggtgactgagccctctgcaccctgccaagctctcgtttcgattggtgatttgcaggcaactttccacggaatacgctccgctccatcctcaagtgactcagcaacccgcgatccctcgacctcagtcccagcatcaggcgcacaccagcccccacagaccaccgaaggcgagaagtctcccgagcccctcggtcttccacaatcgcagtccgcccaagcgttgacaccccctcccattcctaatggtagcgctcctgagggtcctgcctctccgggaagtcagtag

SEQ ID NO: 29831 - DNA, 354 bp, synthetic construct
  source 1..354: mol_type = other DNA; note = Synthetic coding sequence
atgaagtttcaatacaaggaggtccacccctttgaatatcgcaagaaagagggagagaaaatccggaaaaaatatcccgatcgcgtccccttgatcgttgagaaggcccctaaagccagagttcctgatttggatcggagaaagtatctggtgccctccgatctgacagatggacagttttacttactgattagaaaacgcatccatcttagacctgaagatgctctgttcttcttcgtcaataataccataccccctacttccgcaacgatgggccagctttatgaagacagtcatgaggaggacgacttcctgtatgtcgcctattctaatgaatctgtatacggaaaatag

SEQ ID NO: 29832 - DNA, 1089 bp, synthetic construct
  source 1..1089: mol_type = other DNA; note = Synthetic coding sequence
atgcgcgagatcgtacatttacaagccggacagtgtggtaaccagattggggctaagttctgggaggtcatctctgatgaacacggaattgacccaacaggcacctaccatggagattcagacctgcaactggagaggattaatgtttactataacgaggccaccggcggaaattatgtgccgcgtgctgtcttggtagatctggagccaggaaccatggatagcgttaggagtggacccttcggtcagattttccgccctgataatttcgtgtttggtcagtctggtgctggcaacaactgggccaaggggcactatacagagggcgcagagctggtggatgctgtgcttgatgtggtgagaaaggaggcggaaagctgcgattgtctccaaggctttcagctgactactcccacgtatggggacctgaaccacctggtctctgctaccatgagcggagtcactacctgtttgcgattccctggccagctgaacgcggacctcaggaagctcgccgttaacatggtgcctttcccacgtctgcatttctttatgcctggctttgctccgctgacatcacggggttcccagcagtatcgggctctgaccgtgcctgagttgacacagcagatgttcgatgccaagaatatgatggctgcgtgcgatccacggcacggcaggtatttgaccgtggcagctgtcttccgaggcaggatgtctatgaaagaagtggatgaacagatgctgtccgtgcagtcaaagaattcttcttacttcgtggagtggattccaaacaatgtcaaaaccgcggtctgtgacatcccccctcgaggactgaagatggctgcaaccttcatcggcaactctacagctatacaggagctatttaaacgtatcagcgaacaattcaccgctatgttccgtaggaaagcttttctgcactggtacacaggcgagggaatggacgaaatggagtttacagaggcagagtcaaatatgaatgaccttgtcagcgaataccagcagtaccaggatgctaccgccgaggaaggcgaattcgaagaggaagcagaggaagaagtggcttag

SEQ ID NO: 29833 - DNA, 654 bp, synthetic construct
  source 1..654: mol_type = other DNA; note = Synthetic coding sequence
atggaggagacaatgaagctggctactatggaggatactgtagagtactgtttattcctgatcccagacgaatctcgcgatagtgacaagcacaaggagatcctgcagaagtacatagaacgtataatcacccgcttcgcaccaatgctcgtgccctatatctggcagaaccaaccctttaacctcaagtataaaccaggcaaggggggagtgccagcacacatgtttggggtgaccaagtttggggacaacattgaggatgaatggttcatagtatatgtcattaagcagataacaaaggagttcccagaactggtcgcttctaccaaccgggtgttcttttgccacggcgaactgtgtatcatcccggctcccagaaagagcggtgctgaaagttggctgccgacgacacccccaaccattccccaagccctcaatataattacggctcacagcgagaaaatcctcgctagcgaatccatacgggctgcagttaatagacgtatccgtggttaccccgaaaaaatacaagcttcactgcatagggcccactgcttcctgccggctggcatagtggcggttctgaaacaacgtccccgactggtggccgctgcagtacaggccttctatctgcgggatcccattgacctttag

SEQ ID NO: 29834 - DNA, 1188 bp, synthetic construct
  source 1..1188: mol_type = other DNA; note = Synthetic coding sequence
atggcatctgctgctagcgtcaccagcttagcagatgaagtcaactgcccaatctgccaaggaaccctgagagagccggtgacaatcgactgcgggcacaacttttgtcgagcatgtctaaccaggtattgcgagatcccagggccagacctcgaagaaagcccgacgtgtcctttgtgcaaggaacctttccgcccaggcagctttagacccaactggcagctcgccaacgtggtcgagaacatcgagagactgcagctggtaagtaccctagggttaggagaggaagacgtgtgccaggaacacggtgaaaagatatactttttttgtgaggacgatgagatgcagctgtgcgtcgtttgtcgagaagcgggagagcacgccactcacacaatgaggttcctcgaggatgctgccgcaccataccgcgagcagatccacaagtgtctgaagtgcctgagaaaagagcgagaagagattcaagaaattcagagccgtgagaataagcgcatgcaggtgctcctgacacaagtgtcaacaaaaaggcagcaggtaatttccgagttcgctcacctgcgcaagtttctggaagagcagcagagcatactgctggcccagctcgaaagccaggatggcgacattctcagacagcgtgatgagtttgatctgctagtggccggagagatctgccgcttttccgcactcatcgaggagcttgaagaaaagaacgaacgacctgcccgtgaattgcttacagacataaggtcgactcttattaggtgtgaaacaaggaaatgcaggaaaccagtcgccgtgtctcctgaactgggccagcgaattagagattttccccagcaggcactgcctttgcagagggagatgaagatgtttctagagaagctctgctttgagctggactatgagccggcacatatatcactcgacccacaaacctcacatcctaagctgctactgagcgaggaccatcagagggcacaattcagctataaatggcaaaatagccccgacaatccccaacgattcgatagggcgacttgcgtgctggcccataccggtattaccggagggaggcatacatgggtttggatggctcgggtgccaggtgacagtggatgttgccagttttgtagtcctcctagtgtgctcggaacggaagtcgcagcttag

SEQ ID NO: 29835 - DNA, 102 bp, synthetic construct
  source 1..102: mol_type = other DNA; note = Synthetic coding sequence
atgagcatatcttcggacgaagtgaacttcctagtgtaccggtatttacaggagtccggattcagccacagtgccttcaccttcggaatagaatctcactag

SEQ ID NO: 29836 - DNA, 1242 bp, synthetic construct
  source 1..1242: mol_type = other DNA; note = Synthetic coding sequence
atgttcgcctctgatttgctccgtgccctggactgctgcccaggtgccggaagcagcggcctgctccctcagttggggccacgccaactgcttgctttcaccgtgaactgtctgggaaaccacaggtatttaggattcttcgaagatctagagcaacgacacaaggctcaagtgctcgttgaagatatttcggatatcctggaagagcacgctgaaaaacatttccacccatacatcgcctattgttccaacgaagtgtaccagcaacggaccctacaaaaactgatcagctcgaatgcggctttccgggaggccttgcgagagattgaaaggcgtccagcctgcgggggacttcctatgctgagtttcttaattctaccgatgcagcgcgtgacacgactgcccttgttgatggatacgctctgcctcaagactcagggtcatagcgagcggtacaaggctgccagtagagctctcaaagctatcagtaagcttgtccgacaatgtaacgagggtgctcacagaatggaacggatggaacagatgtatactcttcatacacaactggattttagtaaggtaaaatcattacctcttataagtgcttccagatggctgctgaagcgcggtgagctcttcctggttgaggagacgggcttgtttcgaaagattgccagtagacccacgtgttacttgttcctctttaacgatgtgttagttgtaacgaagaaaaagagcgaagagtcatacatggtgcaagattacgcccaaatgaaccatatccaggtggaaaaaatcgaacccagcgaattgccacttcccggtgggggtaatcgatctagttctgtgccccaccctttccaggtcaccttactgaggaattccgagggtcgtcaggagcaattactgttgagtagcgatagcgcttcagaccgagccaggtggatagtggccctgactcactctgagcggcagtggcagggtctttcttcgaagggagatcttccacaggtagaaatcacaaaggctttctttgccaagcaggctgatgaagtcacgctccagcaggcggatgtggtgttagtcttacagcaggaggatggatggctgtatggtgagcgcctgagggacggagagacgggttggttccctgaagattttgcaaggtttatcactagtcgggtagctgtagagggaaatgtgcgccgaatggagcggttgagggtggaaactgacgtttag

SEQ ID NO: 29837 - DNA, 1890 bp, synthetic construct
  source 1..1890: mol_type = other DNA; note = Synthetic coding sequence
atggaggagtcccccctatcacgggctccatctagaggcggagtcaacttcctgaatgtggctcgcacctatatcccgaacactaaggttgaatgtcactacacgttgcctccgggaaccatgccatcagcaagcgattggatcgggatctttaaggtcgaggccgcatgcgtgagggactatcataccttcgtgtggtctagtgttccggagtctacaacggacggtagcccgatccatacctccgtgcagtttcaagcctgtaatcagctcgatgagagccagcaggagaggaacgatctcatgcaactgaagttacagctggagggccaggtcacagagctccgatcccgggtccaggagctagaaagagcattggccactgcccgacaagaacacaccgagctcatggagcagtacaaggggattagtcggtcccacggtgagatcactgaggagcgcgatatcctttctcggcagcagggggatcacgtggctagaatccttgagctcgaagatgacatccaaaccatctctgagaaagtgctcactaaagaagtggagctcgacagactgcgagacacagtgaaagccctaacacgcgaacaggaaaagctcctgggccagctcaaagaggtacaagcagataaggaacaaagcgaggccgagctgcaggttgcccagcaggaaaaccatcacctgaacctggacttgaaggaggctaaatcttggcaggaggagcagtcagctcaagctcagcgcctcaaagataaagtcgctcagatgaaggacactctaggccaagcccaacagcgagttgcagagctagagccgctcaaggagcagctgcgcggtgctcaagagcttgcggcatcaagtcaacaaaaagccacccttctgggcgaggagctagctagtgctgccgctgccagagaccgaaccattgccgaactgcacaggtcacggttggaggtcgctgaagtgaatggtcgactcgccgaattgggcttgcacctaaaagaagagaaatgccagtggagcaaggaaagggcaggactattacaatctgtggaagcggagaaagataaaatcctcaagctttcagctgaaattctacgattagagaaagctgtgcaagaagaacgcacccagaatcaggtgtttaaaaccgaactggccagagagaaggactcatcgctcgtgcagctcagcgagtctaagagggagcttaccgagcttcgatccgctctgcgagtgcttcagaaggagaaggagcagttgcaagaagagaagcaggagctgctggagtatatgagaaaactcgaagctcgtcttgagaaggtcgccgatgaaaagtggaacgaggatgcaacgacagaagatgaggaagcagctgtgggcctctcatgtcccgctgcgcttaccgattcagaggatgagtccccggaggatatgcgactgcctccctatggcttgtgcgaacgtggagacccaggaagctccccagccggtcctcgggaggccagcccactggtggtcatatctcagcctgcccctattagcccccatctgagcggaccagctgaagactcgagctctgatagtgaggccgaggacgaaaaaagcgttcttatggccgctgtacagtccggtggcgaggaggccaatttgctgttacctgaacttgggtccgccttctatgacatggcctcggggttcactgttgggaccctttctgagaccagtactggtggcccagcaacccccacctggaaggaatgtcccatctgcaaagagagatttccagctgagagcgataaggacgccctcgaggaccatatggatggccatttcttctttagcacacaagatcccttcacattcgagtag

SEQ ID NO: 29838 - DNA, 2451 bp, synthetic construct
  source 1..2451: mol_type = other DNA; note = Synthetic coding sequence
atgccgctctctagccccaatgccgctgccacagcttccgacatggacaagaactccggctcaaacagctcttcagcctcttcaggctctagtaagggacagcagccaccaagaagcgccagcgctggccctgcaggagagagcaagcccaagtctgacggaaaaaatagctcaggctccaaacgttataaccggaaacgggaactcagttaccccaagaacgagtcttttaacaatcagagccggaggagctcatcccagaagagcaaaacattcaacaagatgccaccacaaagggggggaggatcctcaaaactattcagctcttcttttaatggcggtagacgcgacgaggtcgccgaggcacagagagcagagttctcacctgcgcagttcagcggaccaaagaagatcaaccttaatcatctgctgaatttcacattcgagccacgagggcagaccggtcattttgaagggagcgggcacgggtcttggggcaaacgcaacaagtggggtcacaaaccattcaacaaggaattgtttctgcaggccaactgccaattcgtggtctccgaggatcaagactacaccgcccactttgccgacccagacactcttgttaattgggacttcgtggagcaggtgcggatctgcagccacgaggtcccctcttgcccgatctgcctgtaccccccaaccgctgcaaagatcacaaggtgtggacacattttctgctgggcatgtatcctccattacctctcactgagtgagaaaacctggtctaaatgccctatttgttacagcagcgtccacaagaaagatctgaagagcgtggtggcaacagagtcacaccagtacgttgtgggagacacaattaccatgcagctgatgaagcgggaaaagggtgtcctggtagctctgccaaaaagcaaatggatgaatgtggaccaccctattcaccttggcgatgaacaacatagccaatactcaaagttactgctggcgagcaaagagcaagtgcttcaccgggtggtcctcgaggaaaaagtcgccttggagcagcagcttgccgaggaaaagcacacccctgagagttgctttattgaagcagctatccaggagctgaaaactagggaagaagcactcagcggcctcgcaggatccaggagggaggttacgggtgttgtggctgctttagaacagctggtgttaatggccccattggcaaaggaatcagtcttccagcccagaaagtctctcctacaacagggggttctcgagtatctcagtgccttcgatgaggagacaactgaggtgtgttctcttgacacgccatctaggcctctcgctctgccactggtcgaggaggaagaggcagtgtcggagcctgagcccgaaggcttacctgaagcatgtgatgacctggaactcgcagatgacaaccttaaagaagggaccatctgtaccgagagctcccagcaggagcctatcaccaaaagcgggttcacccggctgtcatcctctccttgttattacttctatcaggcagaagatggccagcacatgttcttgcatcccgtgaatgtgcgctgccttgttcgggagtatgggtctttggaacgatccccagagaagatctctgctacagtggtggagattgccggatactccatgagcgaagacgtacggcaacggcaccgctatcttagccatctccctcttacatgcgaattttcaatctgtgaactcgcacttcagccgcctgttgtcagtaaggagaccctcgagatgttttctgacgacattgagaaacggaaacgacagagacaaaagaaggctagagaggagagaagaagagagagacgcatcgagattgaagaaaacaagaagcaggggaagtaccccgaagttcatattccgcttgaaaacctccagcagtttcctgccttcaatagctatacctgctcaagcgacagtgctctcgggccaacgagcaccgaaggccacggggcactgagcatatctccattatccagaagtcccggaagccacgcagactttctcctcaccccattgtcgcctacagcatctcagggaagtccatccttctgtgtcggatcattggaggaggatagtccattcccgtctttcgctcaaatgctccgcgtggggaaagcaaaggcggacgtttggcccaaaaccgccccaaagaaagacgaaaatagcctggtcccacccgctcccgtggacagcgacggagaaagcgacaacagcgacagagtgccagttccatcctttcaaaattccttctcacaagcgattgaagccgcatttatgaaactggatacacccgctacttccgaccccctgtcggaagagaagggcggtaagaaaaggaagaaacaaaaacagaaattattattctccaccagtgttgtgcataccaaatag

SEQ ID NO: 29839 - DNA, 429 bp, synthetic construct
  source 1..429: mol_type = other DNA; note = Synthetic coding sequence
atggcatcccctggcaaggacaactaccgcatgaaatcgtataagaataaggccctcaacccccaagagatgcgcagacgcagggaggaagaaggcatccagctccgaaagcagaaacgagaggagcaactgttcaaaagacgtaatgtgtacctgccccgaaatgatgaaagcatgctcgagagccccatccaagaccccgatattagttcgacagtgcccattccagaggaagaagttgtcactactgacatggtgcagatgattttcagcaataacgcggaccagcagttgacagctactcaaaaatttcgcaagttattatccaaggagccaaatcctcccatcgaccaagtcattcagaaaccaggtgtggtgcaaagatttgtgaagtttttagaacgaaatgaaaattgcacattacaatag

SEQ ID NO: 29840 - DNA, 297 bp, synthetic construct
  source 1..297: mol_type = other DNA; note = Synthetic coding sequence
atgtccgaacagggtgatctgaaccaggcaattgccgaagagggaggaaccgaacaagaaactgctactcctgaaaatggaatcgtgaagagtgagagcttagacgaggaagaaaagctagaactgcagcgtaggctcgaggcccagaatcaggagcggaggaagtcaaagtcaggggcaggcaagggcaagcttacccgctcactggcagtttgcgaggaatcatctgcgaggccaggcggagagagcctccaggaccaggaaagcatacacctgcaactgagtagcttctcatag

SEQ ID NO: 29841 - DNA, 1917 bp, synthetic construct
  source 1..1917: mol_type = other DNA; note = Synthetic coding sequence
atggaaaacctgcagaccaacttttccctagtccagggctcaaccaagaagctcaacggcatgggcgatgacggcagtccccctgccaagaaaatgattaccgacattcatgcaaacggaaaaacaatcaacaaggtgcccactgtgaaaaaagagcatttggatgactatggtgaggctcctgtagaaaccgacggcgagcacgtaaagaggacctgcacctccgtgcccgaaaccctgcacctgaacccgtcgttgaagcacactctcgctcagtttcacctgtcttcccagtcatccctggggggaccagcagctttctctgctcgtcactcgcaggagagcatgtcgcctaccgttttccttccattacccagtcctcaggtcttaccagggcctctactcatcccatcggattcctccaccgagctcacccagacagtcctggagggggaaagcatctcttgcttccaggttggaggagaaaagcgcctgtgcctcccccaggttctgaactccgtgttgagagagtttacactccagcagatcaacaccgtgtgtgacgagctgtatatctactgttctcggtgcacatctgaccagctgcatatcttaaaggttctcgggatccttccatttaacgcgccttcctgtggcctgataacactcacggatgctcagagactttgcaacgccctgctgcggcctagaacattcccccagaacggcagcgtgctccccgctaaaagcagcctggctcaactaaaagaaactggcagcgcctttgaggttgagcatgagtgcctcggcaagtgccaggggctgtttgccccacagttctacgtccagccggacgcaccctgcattcagtgcttagagtgctgcggaatgttcgcacctcagacttttgtgatgcacagccaccgcagccccgacaagcggacctgtcactggggcttcgaatcagctaagtggcactgctatctgcacgtgaaccagaaatacctcggaacaccagaggaaaaaaagcttaagattattctggaggaaatgaaggagaagttttcaatgcgatctggcaaacggaatcagtccaaaacagatgcaccctcagggatggagctccagtcctggtaccccgtgatcaaacaagagggcgatcacgtgagccaaacacactcttttctacacccctcctactatttgtacatgtgtgataaagtggtggctcccaatgtaagcctgacgagtgccgtctcccagagcaaagagctcaccaagacagaggccaatgcttccatcagtaataactccaccagcaagaggaagagtgagtctgcaacctgtaacctggttcgcgatattaataaggtgggcatcggtctggtggccgctgctagcagcccgttgcttgtcaaggacgttatttgcgaagacgacaaggggaagataatggaggaggtcatgcgtacttaccttaaacagcaggaaaaactcaacttgattttgcaaaagaagcagcagctccaaatggaggtgaagatgctctcgtccagtaaatcaatgaaagagctgaccgaggaacagcagaatctgcagaaggagcttgagtccctgcagaacgagcacgcacagcgcatggaagaattttacgtggaacaaaaggaccttgaaaagaagctggaacaaatcatgaaacagaagtgtacctgcgatagcaatctggagaaggacaaggaagccgagtatgccggacaactggcggagttgcgtcaacgcttggaccacgctgaagcagacagacaggagttgcaagacgagctgcggcaggaacgagaggccaggcagaaactggagatgatgattaaggaactgaaactgcagatcttgaaaagctccaagactgcaaaagaatag

SEQ ID NO: 29842 - DNA, 1530 bp, synthetic construct
  source 1..1530: mol_type = other DNA; note = Synthetic coding sequence
atgaagagagggaggctcccttcaagctcagaggacagcgacgacaacggatcactgagtaccacatggtcccagaacagtaggtctcagcataggagatcctcctgttcccgccatgaggatagaaaaccatccgaagtctttagaaccgacctgattacggccatgaaactgcatgatagctaccagctgaaccccgacgagtattacgtgctggccgatccatggcgccaggaatgggagaagggcgttcaggtgcctgtatcgcccggaaccatcccgcagcctgtggctcgggtggttagtgaagaaaagtctcttatgtttatccgtccaaaaaagtacattgtgtcgagcggctctgagcccccagaattggggtacgtggacattcgaaccctcgccgacagcgtctgtcgatatgacttaaatgatatggacgctgcctggctggaactgactaatgaagaattcaaagaaatgggcatgcccgagctggacgaatacactatggaacgcgtacttgaggagttcgaacagagatgctacgataatatgaatcatgctatcgagactgaggaggggttggggattgagtatgacgaagacgtggtgtgcgatgtgtgccagagccctgacggcgaggacggcaacgagatggttttttgtgacaaatgtaatatttgtgtccatcaggcgtgttatggcatacttaaggtccctgaaggatcctggctctgtcgaacttgcgcgctcggagtgcaacccaagtgcttactgtgtccaaaaaaaggaggagcaatgaagcccacacggtcgggcactaagtgggttcatgttagctgcgctctgtggattcctgaagtctcgattgggagccctgaaaagatggaacctataacaaaagtgtcgcatatcccctcgagcaggtgggccctcgtttgttccctgtgtaacgagaaattcggggcatctatccagtgtagcgtgaaaaactgtcggacagcttttcacgtgacatgcgccttcgatcgaggtctcgagatgaaaacaattctcgcagaaaacgatgaggttaagttcaagtcctactgcccaaaacattcatcccatcgtaagcctgaagagtccttagggaagggtgcggcacaggaaaacggtgctccagaatgttcgcctagaaatccgctggagccttttgctagtctggagcagaaccgggaggaggcccatagggtgtccgtccgaaagcaaaagctgcagcagttagaagatgaattctatacttttgtcaacttgctcgatgtggctagggccctgagattgcctgaagaggtggtcgattttctgtatcagtattggaagcttaaaaggaaggtgaatttcaacaaacctctaataactcctaagaaggatgaggaggacaacttggccaagcgggagcaggacgtgctattcagaaggcttcagctgtttacacatctgcgccaggatctggagagagtaatgatcgacaccgacaccctgtag

SEQ ID NO: 29843 - DNA, 354 bp, synthetic construct
  source 1..354: mol_type = other DNA; note = Synthetic coding sequence
atggccttttccggcagagccaggccctgtattattccagagaacgaggagattcccagggccgcactgaataccgttcacgaagccaacgggacagaagacgagagagccgtgtcaaagctgcagaggcggcacagcgatgttaaagtctataaggaattttgtgacttctatgctaagttcaacatggcaaacgcactcgcaagcgccacctgtgagcgctgtaaagggggatttgcccctgcagagaccatcgtcaactccaacggggaattatatcacgagcagtgctttgtctgtgcccaatgtttccaacagtttcctgagggcctgttttacgaggagagaacctag

SEQ ID NO: 29844 - DNA, 1110 bp, synthetic construct
  source 1..1110: mol_type = other DNA; note = Synthetic coding sequence
atgaaggatacacaggacattcaggaagcgagcaaggcaatgcagaataaagtccatgaacaggaggataagaatgagaaacagaaacaaagggaagacaagttaggagtctattctctggtgcactttagtcctaaaatgcttgggtcagtggctaccacgctccccctctctagctccaattcatctggcatgcctttaggatattacttatcgagtccacaaatttctcgggtgacaattagcacaactggccagctgacaagcaaagcaaccgtgggttcttgttcccgggttgaaaactcacttgacgcctccccgttttccgtgcccaagaaacaggatgaatcacccatgattggggacggcgaagattacttccttagtctcttcggggatagtaaaaagctcactgcacactctaattacacacaaaaaacacttaagtacttcagcatgattctcgaggaggttggccagtttactagttcctcgctcggcgacgtggagatcgccgaggtgaacgtgaaaggcctgttcgttaaactgatcaattctagtttagataaagagatggccattggtgatcacatccttcagcagaacgtgaacggccagactattagcctgtataggtttttacccaatatcgtgatgcaagcaaactctaccgttaccgccattgcttggtacacaccaatccactggaaacaggcatgggaaaagctggacgctgacgtggaatttaaccgctgttccgtggtgtcccccaccttcagaaaacgggtgttccagtggaccgcttctactgctaccatcacaaaggagaagcaagaccagcccaaaaaagatatttctaactaccaggtggagcaggcccaggtgctgctcaagagagaaaaggaaattcctcccacggtctttcccaaccgctctccgtggtgccagaatccttacgtatccgcccacccgtactgccccctaatcgaaccccataatacgagcaccgccggaggccgattagataggcaaccgagaaccaggagcacgcggcctaatcgcgcaagtggcagcaaaaaaaaaaaaacctcagagtcccagaaacagtag

SEQ ID NO: 29845 - DNA, 681 bp, synthetic construct
  source 1..681: mol_type = other DNA; note = Synthetic coding sequence
atggaccagtcacgcgtgctgctgtgggtcaaagccgaacctttcatcgtgggggctttgcaagtgccacccccttccaagttcagcctgcactatcttcggaaaatatcgacctatgtgcagataagggctaccgaaggtgcctatcctaggctctattggagcacatggcggcacattgcatgcgggaagctccaactcgccaaggacctggcctggttatactttgagatcttcgattccctgtccatgaaaacccccgaagagcgactggagtggtcagaagtcctttcaaactgtatgagtgaggaagaggtcgagaaacagcgaaatcagctgagtgtggatacattacagttcctgctgtttctctacatccagcagctcaataaggtgtctctgagaacaagcctgattggagaggagtggccctcacctcggaacaagtctcagtctcccgatctgaccgaaaagagcaattgccataataaaaattggaacgattattcccaccaggcattcgtttatgaccatctcagtgatcttcttgagctcctcttggaccctaaacaattaacggcctcattccactctacacactccagcttggtgtcacgtgaagccgtggtggctttaagttttctgattgaggggaccatttcacgcgcaagaaagatttag

SEQ ID NO: 29846 - DNA, 747 bp, synthetic construct
  source 1..747: mol_type = other DNA; note = Synthetic coding sequence
atgaatgacaggttgggagaggatgagagcctcctcatgaagttatattcttttttactcaatgacagtcccctgaatcctctgctggccagctttttcagtaaggtgcttagcatcctgatatctaggaagcccgagcagattgtggacttcctcaagaagaagcatgacttcgtagacctgatcatcaaacatatcggtacttccgccatcatggatctcctgttgaggctgttaacttgcatcgaaccgcctcaaccgcgacaggacgtactgaattggttaaacgaagagaagattatccagaggcttgttgaaatcgtgcacccctctcaggaagaggataggcatagtaacgccagccaaagtctgtgtgaaattgtccggctgagtcgggatcaaatgctgcagatccagaattccactgaacccgatctgctcttagcaagcggcctgcctgacctgaatggggtcgggcctcgaggcttgctggtggataacatgctttggtctcgcctggtggtttcgtttgcctctcatggacaggggcttgcgcctctggtggcccacgtcgcatccgtagtgtggacctggtggcttctacaccctactgtggccagcgtagtgtggacatggtggctgcttcaccccacccaaggaaactctgtgctgctgcatcctacagattgttgggagcgagcttccggtacctttctgtgggggattatacttttctgcctatcttag

SEQ ID NO: 29847 - DNA, 1869 bp, synthetic construct
  source 1..1869: mol_type = other DNA; note = Synthetic coding sequence
atggccatggcaccctctcccagtctggtgcaagtatacacaagtcctgctgccgtcgcggtctgggagtggcaagacggcctgggcacttggcatccatattctgccaccgtctgtagctttatcgagcagcagtttgtccagcaaaaaggccagaggttcggtcttggatcactcgctcatagcattcctctgggtcaggccgatccttcattggccccatacattatcgacttgccctcctggacccagttccggcaggacacaggcaccatgcgagccgtgagaaggcatctattcccccagcacagcgccccagggagaggcgtagtgtgggagtggctgagcgatgacggcagttggaccgcttacgaagcaagcgtttgtgattatctggagcagcaggtggccaggggtaaccagctcgttgacctggctccccttggctacaattataccgtgaattataccacgcacacccagaccaataaaacttcatctttttgtagaagtgttcgacgacaagccggtccaccttaccctgtcacgacaattatcgctccaccgggacacactggtgtggcctgtagctgtcaccaatgtctgtcgggctctaggactggcccagtatctgggaggtatcgccactccatgacaaatttacctgcctacccagtgcctcagcacccgccacaccggacagccagtgttttcgggacccaccaggcatttgccccatataacaagccctccttatctggcgcacgatccgccccaaggctgaatactacaaatgcatggggggctgcgccaccgtctctcggcagccagcctctgtacagaagctcactctcgcacctgggtcctcagcatctgcctcccggaagctctactagtggagccgtatccgcctctctccccagcggaccctcaagctcccccggttcagtgccggctaccgtccctatgcagatgcctaagcctagcagagtgcagcaggctttggctggaatgacgtctgtcctgatgtctgccattgggctgccagtgtgcctcagccgcgcaccccagcccacgtcacctcctgcgtcccgcttagcctccaagtctcatggcagtgtcaaaagactcaggaagatgagtgttaagggggctacccccaagccagagccagagcccgaacaggtcataaagaactacacagaggaactcaaagtcccacccgatgaggattgcatcatttgcatggaaaaactctcaactgcaagtggctactccgatgtgactgacagcaaggctatcggcagcctggccgtaggtcatcttacaaaatgctcccacgcattccatttgttatgtcttttagccatgtactgtaatggaaacaaagacggcagtctccagtgcccttcctgcaaaaccatctatggcgaaaaaactggtacacaaccgcaggggaaaatggaagtattgagatttcagatgagtctgccaggccacgaagattgcggcaccattctaattgtctattccattccacacggcattcagggaccagagcaccccaaccctggcaagccttttacagccagaggcttccctcggcagtgctacctacccgacaatgcacaaggaagaaaggtgctggaactgctaaaggtcgcgtggaagcgccgtctgatcttcactgttggaactagtagcactaccggggagactgacacggtcgtttggaatgaaattcatcacaagaccgagatggaccgcaatattacgggacatggctacccagaccccaattacctgcagaatgttcttgccgagctcgcagcccaaggggtgacggaggactgcctggaacagcagtag

SEQ ID NO: 29848 - DNA, 4008 bp, synthetic construct
  source 1..4008: mol_type = other DNA; note = Synthetic coding sequence
atggaagagattccagtgaaggtggctgtgagaatcagaccattactttgtaaagaagcactccacaatcaccaggtgtgtgttagagtgattcccaatagtcaacaagtaatcattggcagagatagagtgttcacctttgatttcgtgttcgggaagaactccacccaagacgaggtgtacaatacttgcattaagcctctggtgctctccctcatcgagggatataacgcgaccgtattcgcttatggacagacagggagtggtaaaacgtacactataggaggtggccatatcgctagcgtagtagagggacagaagggtattatcccacgcgcaattcaagaaatcttccagtccatcagcgaacatccatctatagacttcaatgtcaaagtaagctacatcgaagtttacaaagaggatctacgcgatctgcttgaacttgaaacatcaatgaaggacctgcacatcagagaagatgagaaaggcaataccgttatcgtgggcgctaaggagtgccacgtagagagtgccggagaggttatgagcctgctggagatgggcaatgcagctcggcacaccgggaccacgcaaatgaacgagcacagctcaagaagccacgcaatttttacaatcagcatatgccaggtgcataagaacatggaagctgctgaagatggcagttggtacagcccacgccacatcgtgtcgaaattccattttgtcgacctggccggaagcgagagagtgaccaaaaccggtaacaccggcgagcgttttaaggaaagcatccaaatcaacagtggtttgcttgcattgggcaatgtgatcagtgcactcggtgatccgaggcgaaagagctctcacataccatatcgggacgccaagattacccggctgcttaaagattccctgggcggatctgccaaaaccgttatgatcacctgtgtaagcccctccagttccaacttcgacgaatccctcaatagcttgaagtatgcaaaccgggcaagaaatattaggaacaagcctaccgtaaatttcagcccagaaagtgataggatagatgagatggaattcgagattaagctccttagggaggcattacagagtcagcaggcgggagtctctcaaacaacacagatcaacagggagggatcccccgataccaatcggattcactccctcgaggaacaagtggcccagctacagggagagtgcctcggataccagtgttgcgtggaggaggcatttacatttcttgttgaccttaaggacacggtgagactcaacgaaaagcaacagcacaagttacaagagtggttcaacatgattcaagaggtgcggaaggccgtcttgacgtcctttcggggaattgggggaacagcctccttggaagaggggcctcaacatgtcaccgtgttacagctgaaaagagagcttaagaagtgtcagtgtgtgctcgccgctgatgaagtggtgtttaaccagaaagaacttgaagtaaaggaattgaagaatcaggtccaaatgatggtccaggaaaacaaggggcatgcagtgtctctgaaggaggcacagaaggtaaaccggttacaaaatgaaaagataatcgagcagcaactgctggtggaccagctgagcgaggagctcactaagttgaatctgagtgtgacaagctccgccaaagagaattgtggggacggcccagacgctaggatcccagagcggagaccctacacagttccttttgacactcacctagggcactatatttatataccatcacggcaggattctcggaaagttcacaccagcccacccatgtattccctggatcgtatcttcgcagggtttcggacaagatcgcagatgctcctgggacatattgaggagcaagacaaagtgttacactgccaatttagtgacaatagcgacgacgaagaatctgagggccaagaaaagagcgggaccagatgtcgttctcgaagctggatacagaagcctgatagcgtgtgtagcttggtcgagctcagtgatacccaggacgagacacagaagagcgacctggaaaacgaagatcttaagatcgactgcttgcaggagagccaagaactcaacctccaaaaactgaagaattcagagcgcatcctgacagaagcgaagcagaagatgcgcgagctcaccattaatatcaagatgaaggaagatttgattaaggagctgatcaagacaggaaacgatgctaagagtgtctcaaaacagtatagcctgaaggtaactaaattagaacacgatgctgaacaggctaaagttgaattaattgagacgcaaaaacagctgcaggaactagagaacaaagacctctctgacgtagccatgaaagttaagctacagaaagagttccggaaaaagatggacgccgctaagctaagggtgcaggaaatacaacttaaaactggacaggaggaaggattaaaaccaaaggccgaggatttggatgcatgcaacctgaagaggcggaagggatcatttggaagcatagatcacctgcagaagcttgatgaacagaagaaatggcttgacgaagaagttgagaaggtcttgaatcagcgtcaggaactggaagaactggaggccgatctcaaaaagcgcgaagcaatcgtctcaaaaaaagaagcattgctgcaggagaagtcacatctggaaaataagaaactgcggagcagccaggcactaaatactgactctctgaaaatcagcacccgtctgaatctgcttgaacaggagttaagcgagaagaatgtacagcttcagactagtaccgcagaggaaaaaaccaagatcagtgagcaggtggaagtgttgcagaaggagaaggatcagctgcagaagagacgacacaacgtagacgaaaagcttaaaaacggacgcgtactgtctccagaggaggaacacgtcctcttccagctggaagaaggcatcgaggcacttgaggccgcaattgaatacaggaatgaatcaatccaaaaccgccagaagagtcttcgggcaagctttcataaccttagcagaggggaggccaatgtcctagagaagctggcatgcctgagcccggtggagatccgtactatcttatttagatatttcaacaaagtcgtaaatctccgtgaggctgaaagaaagcagcagctttacaacgaggagatgaagatgaaggtgctggagcgcgacaacatggtacgggagctcgagtccgcgttagatcaccttaaacttcaatgcgacaggcgtttgacgctccagcagaaggaacatgagcagaaaatgcaactgctgttacaccattttaaagagcaggacggtgagggtatcatggagaccttcaaaacctacgaagacaagattcagcagcttgaaaaggatttatacttttacaaaaagacgtctagggaccacaaaaagaaactgaaggaacttgtgggcgaggcaatcaggcgccagctggctccgagtgagtaccaagaggccggtgacggagtgctcaagcccgaagggggtggcatgcttagcgaggagctcaagtgggcatccagacctgagtccatgaagttgagcggaagagagagagagatggattcgagcgccagcagtttgagaactcagccaaatcctcagaaactgtgggaagatatacccgagcttccacctatccatagcagcctcgctcccccttccggccatatgctaggaaacgagaataagaccgaaaccgacgataatcaattcaccaagtcacactcaagattatccagccaaatccaggtggtggggaacgtggggcgtctacatggagtgactccggtcaaactctgcagaaaggagcttcggcagatttcagctctagaactaagtctccggcgatctagcctgggtgttggtattgggagtatggccgcagactctattgaagttagtcgtaaaccccgagatttaaagacctag

SEQ ID NO: 29849 - DNA, 2745 bp, synthetic construct
  source 1..2745: mol_type = other DNA; note = Synthetic coding sequence
atggaggagagaatcaccactctcgaaaagaggtatttagccgctcagcgagaggctaccagcatccatgatctgaacgacaaactcgagaatgagctcgcaaacaaagaaagtctccacaggcagtgcgaagaaaaggcccgacatctgcaggagctgctcgaggtcgcggagcagaaattacagcagacaatgaggaaagcagaaacattacctgaagtagaagccgagctcgcgcagagaatcgccgcacttaccaaggcagaagagaggcacgggaacattgaagaacatcttcgccagttggagggccagctcgaggagaagaaccaggaattggcccgagttcgccagagagaaaaaatgaatgaggaccataataaacgcctctccgatactgtggaccgcttgcttagcgagtccaacgagagactacagctacatttaaaagagcgcatggccgctctcgaagaaaaaaacaccctgatacaggagttagagagttcacagcggcaaatcgaggagcaacaccaccacaaaggcaggctatcagaggagatcgagaagctacgacaagaagtggatcagctaaagggaagagggggacccttcgttgacggagtccatagccgatcacacatgggttccgccgctgatgttcggttttctctcgggactacaacacatgccccaccaggcgtgcatcgcagatacagtgcccttcgagaagagagcgctaaggattgggagacgtcccccctaccgggaatgcttgcccctgctgctggtcctgcctttgactccgaccccgaaattagtgatgtggacgaggatgaacctggtggcctagtggggtctgctgatgtggtttcaccgtccgggcactcagacgcacaaactctggccatgatgctgcaggagcaactggatgccattaatgaagagattagaatgatccaagaagagaaagagtccacagagctccgggcagaagaaattgaaacccgagtaacttccgggtctatggaggctcttaatctgaagcagctcagaaagcgaggatcaattcctactagcctcacagccctcagtttggctagtgcatcacctcctcttagcggccgaagcacgcccaaactgacgtccagaagtgccgcacaggatttggaccgcatgggggttatgaccctcccctctgacctgcgaaagcaccgcaggaagttactctcaccagtgtcacgcgaggagaacagggaggacaaggccactattaaatgcgaaacatcaccaccctcctctccgagaacattgcgtttagaaaaactgggacatcccgctctgtctcaagaagaggggaaaagcgccctggaggaccaaggaagcaatccaagctccagcaactcttctcaggactctctgcacaagggagccaagagaaagggaattaagtcaagcataggtcgtttattcgggaagaaagagaaggggaggctaattcagctgtcacgggatggagccaccggccacgtgttactgacagattcagaattttccatgcaggaacccatggtgcccgcaaagcttggtacacaggcagagaaggaccggaggttgaaaaagaagcaccaattgctcgaggatgcccgaagaaagggtatgcccttcgctcagtgggatggccctaccgtggttagctggttggagctatgggtgggcatgcctgcatggtacgtagccgcatgtcgcgctaacgtgaaatcgggtgctatcatgtctgcactaagtgatactgagatacagagagagatagggataagtaacgcactccatcggcttaaactgcgcctggctattcaagaaatggtctctctgacatccccctcagcccctcctacgagtagaacaagtagtgggaacgtgtgggtaacccatgaggagatggagaccctcgagacaagcactaagaccgatagtgaggagggttcatgggctcagaccctggcctacggcgacatgaaccacgagtggatcggcaacgagtggctgccttcattgggtttgccccaataccgatcgtacttcatggaatgcctggtggacgcaaggatgctggatcatctgaccaaaaaggaccttcgggttcaccttaagatggtcgactcctttcaccgcacttccctacagtacggaatcatgtgcctcaaaagactgaactacgacaggaaagaactagagaagcggagggaagagtctcaacacgagataaaggacgtgctggtgtggacaaatgaccaagtggtccactgggttcagtccattggccttcgcgactacgctgggaacctgcatgaatccggggtccatggggctctccttgcattggacgaaaatttcgaccataatacgctggctctaatactccagatccctacacagaacactcaggccagacaggtgatggagcgggagttcaataacctgctggcccttggaaccgacagaaaacttgatgacggggatgacaaggttttcaggcgagcgccttcgtggcgcaagcgttttcgcccacgcgaacatcacgggagaggcggtatgctgtccgcctctgcagaaacactgcccgctgggtttcgagtcagcaccttgggaaccttgcaaccaccaccggctcctcctaagaaaatcatgcctgaagctcattcccattacctctatggacatatgctgtcagccttccgtgattag

SEQ ID NO: 29850 - DNA, 1494 bp, synthetic construct
  source 1..1494: mol_type = other DNA; note = Synthetic coding sequence
gatgtgggaggagaccgcccttgggattctgggaacacccaactccctccgagaaaccctgtcaaggcaaacgccatgttcggagcgggagatgaggatgataccgattttcttagccctagtggcggagcccgtctcgcttcgctgtttggtttggatcaggccgcagccggacatgggaacgaattttttcagtacacggcccctaaacagcccaagaaggggcaggggaccgccgctacgggtaaccaagccacgccaaaaaccgcccctgcaaccatgtctactccgactatactggtggctacagcagtgcacgcctaccgttatacaaacggtcaatacgtgaaacaaggaaagtttggcgcagcggttcttggtaatcacaccgcacgcgaatataggatcctgctgtacatatcacagcaacagccggtgacagtggctagaatccatgtgaatttcgagctgatggtacgacccaataactacagcactttttacgatgaccaacgccaaaactggagtatcatgttcgaatccgaaaaggccgctgtagagttcaacaaacaagtgtgtattgcaaaatgcaatagcacttcatctctggatgcagttctgtctcaggaccttatagtcgccgacgggcctgccgtggaagtgggagattctctggaagtggcttatactggttggctctttcagaatcacgtgttgggccaggtgttcgatagtaccgccaacaaggacaaactgcttcgcttgaagcttgggtctggcaaagtaattaaggggtgggaagacggaatgctgggcatgaaaaagggtggtaaacggctccttattgtgccccctgcctgcgctgtaggctctgaaggcgtcattggctggacccaagccacagactcaattctcgtgttcgaagtggaggtgaggagagttaagttcgcgagggactcggggagtgatgggcattctgtctcatcaagagacagcgcagctcctagccctattccgggagccgataacctgagtgccgacccggtggtttcgccacccacgagcattcccttcaaaagcggggaacccgcactgcgtacaaagagtaattccctgtccgagcagctcgctattaacacctcaccagacgctgtgaaggctaaactgatctctcgcatggctaagatggggcaaccaatgttgccaattctgccccctcaactggacagtaatgatagtgagattgaagacgtgaataccctgcagggcggagggcagcccgttgttaccccttctgtgcagccttctctccaccctgcccaccctgccctgcctcagatgacctcacaggcaccacagccatccgttacaggcctgcaggcccctagtgccgcactcatgcaggtctcctctctcgactcgcactccgccgtgtccgggaatgcccagagctttcaagtcaccttctacaataggatcaattatatcttgtag

SEQ ID NO: 29851 - DNA, 462 bp, synthetic construct
  source 1..462: mol_type = other DNA; note = Synthetic coding sequence
atgaatctcgcagagatatgcgataatgccaaaaagggtcgtgagtacgcactcctcggaaattacgattcgtccatggtctactatcagggggtcatgcaacagatccagcggcactgtcagtctgtgcgagatccagctattaaaggaaagtggcagcaggtccgtcaagaactgctggaagaatatgagcaagttaagagcatcgtgagcacgcttgagtccttcaaaatcgacaagcctcctgatttccccgtgtcctgccaagacgaacccttccgagaccccgctgtctggcctccacctgtgccggcagaacacagggcccctcctcagatccgtagacccaatcgggaggtgagacccctgaggaaggagatggccggagttggggctagaggcccagttggacgagctcatcccatcagtaaatcagagaagccgtcaaccagcagagattag

SEQ ID NO: 29852 - DNA, 627 bp, synthetic construct
  source 1..627: mol_type = other DNA; note = Synthetic coding sequence
atgtttcaggtgcctgactccgaggggggacgcgcaggctccagagcaatgaagcctccgggaggggagtctagtaatctctttggatcacctgaggaagctacaccatcgagccgtcccaaccgcatggccagcaacattttcggacctacagaagagcctcagaacatccctaaacggaccaacccccctgggggaaagggatccggaatcttcgacgagtctacacccgttcagacgcgacaacatttaaacccccctggagggaaaacctccgacattttcggaagcccagtgacagccacatcacgccttgcccatccaaacaaaccaacccgcaatagtagagacagggtagccatgttttcttttcctttcgctcagatgagtggcgtgggaagggggctggttctctgtgaaccgggttgctctgcgtcgcctggccgtcacgactcctgtcttgaaacgagagcttttcagatggcgggaagatgcctctgcggagacgaaatgggtcatccttggccctccctgatgtgctcgccagggctacggggaacgggccgtggtgttagagtcgggcgatggggcagagcctggtcacttgatcagcagcccgctagctag

SEQ ID NO: 29853 - DNA, 591 bp, synthetic construct
  source 1..591: mol_type = other DNA; note = Synthetic coding sequence
atgccattctctaaagagaagtatattctggatagcagtcccgaaaagcttcacaaagaactcgaggaggaactcaaacttagcagcacagacctgcggtcccatgcctggtaccacggcaggatccctcgtgaggtatctgagacattggtgcaacggaacggtgactttcttattagggactcactgacctcactgggcgactacgttctcacatgcagatggcgcaaccaggctctccatttcaaaattaacaaggtggttgttaaggcgggtgagtcatacacccacatccagtacctgttcgaacaggaatcatttgatcacgtgccggcactcgtacgttaccacgttggatctcgtaaggccgtatccgaacagagtggagctatcatttattgccccgttaacaggacgtttcccctcagatatttggaggccagctatggcctcggccagggcagtagcaagcccgcatcacccgtgtcaccctcagggcctaaaggctcacatatgaagaggagaagtgtgacgatgacggacggcctaacagccgataaggtaacaagatccgatggctgtcccacttag

SEQ ID NO: 29854 - DNA, 1986 bp, synthetic construct
  source 1..1986: mol_type = other DNA; note = Synthetic coding sequence
atgcaggccaatggtgctggagggggaggaggaggcggaggaggcggaggaggtggtggagggggtgggggaggtcaaggacaaactccagagttggcttgcctatctgcgcagaatggagaatctagcccaagcagctcttctagtgctggcgatcttgcacatgctaatggcttgctgccctcggccccaagtgccgcaagcaacaatagcaatagtttaaatgttaacaatggcgtccctggcggtgcagctgcagccagctccgccacggtggctgcagctagcgcaaccaccgctgccagcagctccttagccacacctgaactcggatcttccctcaagaagaagaaacggttaagtcagtccgatgaggacgtgatacgcctgattggacagcatcttaatggcctgggtctgaatcagaccgtggacttgctgatgcaggagagtgggtgtcgactcgagcatccctccgccactaagtttcggaatcacgtgatggaaggggactgggacaaagccgagaatgatctaaatgaactgaaacccctggtgcactcgccccacgccattgtggtcaggggcgcacttgaaatctcccagacactgctgggtattattgtgcggatgaagtttctgcttctgcagcagaagtacctcgagtatctggaggacggaaaagtcctcgaagccctgcaggtcctcaggtgtgaactaacacctctcaagtacaatacagaaagaattcacgtcctgtccgggtatctgatgtgcagccacgcagaggatctccgggctaaggctgagtgggagggtaagggaacagcctcccgctccaagctgctggataagctccagacatatctcccaccgtcggtgatgcttcccccaagacgcctgcaaacactgctgaggcaggccgttgaacttcagcgcgatagatgcctctaccacaacaccaagctcgacaacaatcttgattccgtgtccctgctaattgaccatgtatgttcacgacgtcagtttccatgctatactcagcagattctgactgagcattgtaacgaggtctggttctgtaagttttccaatgatggcactaaattagcgaccggttctaaagacacaacagtcatcatatggcaggtcgaccccgacactcacttactcaaactgctgaagacactcgaaggacacgcctatggggtgagctatattgcctggtccccagacgataattatctggtggcctgcggacccgatgactgttccgagctctggctgtggaacgtgcaaactggcgaactgcggacgaagatgtcacaatcacacgaagactccctcaccagtgtggcatggaaccccgacggcaagagattcgtgaccggcggacagagggggcagttctaccagtgcgaccttgatggtaacctgctggacagctgggagggggtgagagtgcagtgcctgtggtgccttagcgatggaaaaacagtgctggctagcgatacacaccagaggattagagggtacaattttgaggacctaaccgaccgaaatatcgtacaagaagatcaccctatcatgagttttaccatttccaagaatggtagattggccctcctgaatgtagcgacacagggggtgcacctttgggacttgcaagacagagtacttgttagaaagtaccagggcgttacacaggggttttataccatccactcttgttttgggggtcacaacgaggacttcattgcatctggctctgaggatcataaagtgtacatttggcacaagcgcagcgaactgcccatcgccgaattgactggacacaccagaacagtgaattgcgtgtcctggaatccacaaatcccgagtatgatggcatcggcctccgatgacggcactgttcgcatttgggggcctgcaccctttattgaccaccagaacatcgaagaagagtgctcctcaatggacagctag

SEQ ID NO: 29855 - DNA, 1113 bp, synthetic construct
  source 1..1113: mol_type = other DNA; note = Synthetic coding sequence
atggagaagaagaaaatggtgacgcaaggcaatcaagaacctaccaccacccccgacgctatggtgcagccattcaccaccatccctttcccccctccccctcaaaatgggataccaaccgaatatggcgtgcctcacacccaggattacgccggacaaaccggagagcacaacctgactttgtatgggtccacacaagcccacggggaacagagctcaaattcccccagcacacagaatggatcccttactacagaaggtggagcacagaccgatgggcagcagtcacaaacgcaatccagtgaaaattctgaaagcaagagtactcccaaacggcttcacgtatctaacattccatttcggttcagggatcccgacctgcgccagatgttcgggcaattcgggaagatcctagatgttgaaattattttcaacgaacgagggtccaaagggtttggctttgtgacattcgagaacagtgccgatgccgatcgtgcacgcgagaagctgcacggtactgtcgtggaggggcgtaagatagaagtcaataacgccactgccagagtgatgactaacaagaagatggtcacgccatatgcgaatggatggaaactgagtccagtagtgggcgcagtgtatggacccgaattatatgcggcatctagtttccaggccgacgtttccttaggtaatgacgcagctgtgccgctatctggacggggtggtattaatacttacataccactgatcagccttcccttggtgccgggtttcccatacccaaccgcagctaccacagcagccgcattccgcggagctcacctccggggaagagggaggacagtgtatggagcagtgcgcgctgttcctcccaccgcaataccggcatacccgggagtggatatgcaacccactgacatgcattccttgctgctgcagcctcagccgcctcttttacagccgctgcagcccctgaccgtgactgtgatggccggatgtacccagcccacacctaccatgcccttacccctgccgctcgccatggaattggccctgtggcgagtctacactgaggttgccaccgccgatctcccacccacagaagtgacctag

SEQ ID NO: 29856 - DNA, 348 bp, synthetic construct
  source 1..348: mol_type = other DNA; note = Synthetic coding sequence
atgccacaccttcccctagcttcgttccgacccccattttggggtctgcgccattctcggggattgccacgctttcatagcgtgtcaacacagtccgaaccccacggaagccccatctcccgacgcaatagggaggcgaagcaaaagagactgcgggaaaagcaggcaacgctcgaagcagaaatagccggagaatccaaaagtcccgcagaaagcatcaaggcctggcgaccgaaggaacttgtgttgtatgagatcccaaccaaaccaggagagaagaaggacgtatcgggccctctgccaccggcttactcgcccaggtacgttgaagcggcatggtacccatag

SEQ ID NO: 29857 - DNA, 3039 bp, synthetic construct
  source 1..3039: mol_type = other DNA; note = Synthetic coding sequence
atgcttctaaaaagtatcttcatagtttatattttcttctactccatcagcgaactctcacttgacagtacactgcacgccgtcaatctgcactgcaataacatatcaaaaatcgaagctatcgatcacatttggaatctgcagcatctggatctaagctccaaccagataagtagaatcgaaggtctgaatacgctaaccaaactctgtactctaaatttgtcctgcaacctgattactaaagtggagggtctggaggagctcattaacctcacacggctgaacgtgtcttataatcacatcgacgacctgtccggcttgatccctttgcatggcattaagcacaaactccgatacatcgatctgcacagcaaccgcatcgacagcatccatcacctattgcagtgcatggtcggattgcattttctgaccaatttgatcctagaaaaagatggggacgacaatccggtttgccgcctccccggatatcgcgctgtaatcctacagaccctaccacagcttcgcattctggactgtaaaaatatttttggcgagccagttaatctgactgaaatcaactcaagccagttgcagtgcctcgagggcctcctggacaacctcgtgtccagtgattcgcctctgaacatcagtgaggacgaaatcattgaccgcatgcccgtgatcacagcacccattgacgaactggtgcccttagaacaatttgcctctacccccagtgatgccgttctgaccagctttatgtctgtgtgtcaaagctccgagccagaaaagaataaccatgagaatgatctgcaaaatgaaatcaaactgcaaaaactggacgatcagattctgcagctgttaaatgagacctcgaattctatcgacaacgttctcgagaaggatccgcgacccaaaagagacacagacatcacctccgaatccgactatggaaatagaaaggagtgcaatcgaaaagtgccccgtaggtcaaaaattccttacgatgctaaaacaattcagaccataaagcaccacaacaagaactacaactcctttgtctcttgcaaccgaaagatgaagccaccttatcttaaagagttgtatgtcagctcaagcttagccaattgtcctatgttacaggaatctgagaagcccaagactgagattattaaggtagaccagtcacactctgaggacaacacctaccagagcctggtagaacagctggaccaggagcgggagaagcgttggagggccgaacaggccgaaaacaaactcatggactatatcgacgagctgcataaacacgccaacgagaaggaagacattcactctctggcattattgacaaccgataggctgaaggaaatcatctttcgagagagaaattcgaaagggcagttggaggtgatggttcacaaactgcaaaatgaaatcaaaaaactaactgtcgagctgatgaaagctaaagatcagcaggaagatcacctgaaacacctccggaccctggaaaagactctcgagaagatggagcgccagaagcgccaacagcaggccgctcaaattcggctcattcaggaagtcgagttaaaagcctctgccgcagaccgggaaatatatctcctcagaacctctctccatagagaacgggaacaggcgcaacagcttcaccagctgctggcccttaaagaacaagaacataggaaggaactggagacacgggaatttttcaccgacgccgacttccaggacgcgctagctaaagagattgcaaaggaagagaagaaacacgaacagatgatcaaagagtatcaagagaagatcgatgtgctgagccaacaatatatggatcttgaaaacgagtttaggattgctttgacagtcgaggcccgaagattccaggatgtgaaagatggcttcgagaatgtggccaccgaactggcaaagtcaaagcacgctctgatctgggcccagcgcaaggagaatgaatcttcctctttgatcaaggatctgacctgtatggtgaaggagcaaaaaacaaagctcgctgaagtgagtaagttaaaacaggagacagcagcaaacctccagaatcaaattaataccctggagattctgatcgaggacgacaagcagaaaagcattcagatagagctgttaaagcacgagaaagtgcagcttataagcgaactcgcagcgaaggagagcttaatatttggcctgcgcactgaaagaaaagtgtggggccacgagttggcgcagcagggatcttccctcgcccagaatcggggtaagctggaggcccagattgagtctttaagcagagaaaatgagtgcctccgcaaaactaacgaaagtgattccgatgccttgaggatcaaatgtaaaataattgacgaccagaccgagactattcgtaagttgaaagattgtctgcaagagaaggatgaacatatcaagcggctgcaggagaagatcacagaaatcgaaaaatgcacacaggaacagctggacgagaaatcttctcaactggatgaagtgttggagaagctcgaaaggcacaacgaacggaaggagaagctcaagcagcagctgaagggcaaagaagtcgaactcgaagagatccggaaagcatacagcacactgaataggaagtggcatgacaagggcgaactgttatgtcatctcgagacacaggtcaaggaggtgaaggagaaatttgagaataaggagaagaagctgaaggccgagagagataaaagtattgaattgcagaagaatgccatggaaaaactgcactccatggacgatgcttttaaacggcaagtcgatgcaatagtggaagctcatcaggctgaaattgctcaactggccaatgaaaagcagaagtgcattgattcggccaacctcaaggtgcaccagatcgagaaggagatgcgcgagcttcttgaggagacttgcaagaacaaaaagaccatggaagctaaaatcaaacagcttgcgttcgcattgaacgaaatccaacaggacatgtag

SEQ ID NO: 29858 - DNA, 4665 bp, synthetic construct
  source 1..4665: mol_type = other DNA; note = Synthetic coding sequence
atgtccgccacttcatggttcctggtgtcctcctctggcgcacgccaccgcctaccaagggaactgattttcgtcggccgagaagagtgcgagctcatgctgcagtctaggagcgtggacaagcagcacgctgtgatcaactacgaccaggaccgggacgaacattgggtgaaggacctcggaagtctgaacgggaccttcgtaaacgatatgcggattcccgatcagaaatacgtcaccctgaaactcaatgacgtcattcgcttcgggtacgatagtaatatgtacgtgctagagcgagtgcagcaccgagtcccggaggaggctctgaaacacgaaaaatatacaagccaactgcaggtgtccgtgaaagggctcgctccgaagcggagcgaggcattgccagaacacacaccttattgtgaagcatctaatcctaggcctgagaagggtgaccgacgccctggaaccgaagccgcttcgtatcggacacccctctacggccagccaagctggtggggagaagacgacggcagtacgctgcccgatgcacagcgacagggcgaaccctacccagagcggccaaagggcccagtacaacaagatggcgagcttcatggattccgtgcgcctgcagagccccaaggctgttcatttcgcagagaacccagctacttcgaaatccccacaaaggaaacacctcagcctagccagcctccggaggtgcccgcacacgagatgcccacaaaggacgcggaggctggtggagggggtgctgcaccagtggtacaatctcacgcctctttcaccatagaattcgacgattgttctcctggtaaaatgaaaataaaagatcatattacaaagttctccctgaggcagcgccgacctccaggtaaggaagctaccccaggcgagatggtgtctgctgagacgaaagtagcagattggcttgtacaaaatgacccttccctgctgcatcgcgtgggtccaggagacgaccggcatagcactaaatctgatctgcccgtccacactaggaccctgaagggacacaagcatgaggatggtacacagtcggatagcgaggatccgcttgcaaaggcagcttcagctgctggggtacccctcgaggcctcaggggagcaggttagactgcagagacagatcaagagagatccccaggagctcctgcataatcagcaagcttttgtcatcgagttcttcgacgaggacactccgagaaagaagaggtctcagagtttcactcattctccaagtggagatcctaaggctgacaagagaagagggccaacaccagccgatcgcgatagaccgtccgtccccgcaccagtgcaggctggtggacgcagtagtgggccacaaagggccggttcgctcaagagagaaaaaactgaagagaggctgggttcgccttcccccgcatcacgtacccctgcccgtccttttggtagtgtcgggcgtcggtcacgactcgcgcaggattttatggcccagtgcctgagagagtcatcacctgccgctaggccatccccggagaaggtgcctcctgtgttacccgcaccgcttactccccatggcaccagccccgtgggaccacctacccccccaccggctcccacggaccctcagctaaccaaggctagaaagcaagaagaagacgattctctttctgacgctggtacctatacaattgaaactgaagcgcaggataccgaagtggaggaagccagaaagatgatagaccaggtgttcggtgtcctggagtcacccgaactgtctcgtgcttcgtctgctacattcaggcccgtgataaggggcgacagagacgaatctgacgacggcggagtggcacaacggatggccctgctccaggaatttgcgagcaggccactgggcgctgcgcctcaggctgaacaccaggggcttccagtgcccggttcacccggtgggcaaaaatgggtgagtaggtgggccagcttggcagactcatatagtgaccctggcctcacagaagacggtctgggccgacgcggaggggaacctgagggtagcttgccagtgaggatgagacggcgacttccacagctgccttccgagagagccgactcaccagccggacctgagtcttcgaggcgctccggaccaggccctcctgagctggattccgaacagccctcccgattgttcggtcaggaggaactcgacccagactcactctctgacgccagcgggagcgacggtggcagaggaccggagccaggagttgaacctcaggattcacgccgacgttcacctcaggagggtccaacatggagcagaggcaggagatctcctcgggctcctggggagcctacccctgcaagcttcttcattggagaccagaacggagacgccgttctcagcaggaagccattagcagccccaggggacggggagggtctaggacagactgcacaaccgagtccccctgctagggacggcgtctacgtcagcgctaatggcagaatggttatacagctacgaccaggaaggagccccgaacccgacggtcctgctccggcattcctacgacaagagtcttttaccaaggagcctgcctccggaccccctgcgccaggcaagcctcctcacatctcctcccatccgttactgcaggacctggccgcaacccgcgcagcgaggatggacttccattcccaagatactcatctgatcctgaaagagactgaaacagccctggcagctttggaagcacgcttgctgtccaactctgtggatgctgagtgtgaagggggtagtacacccaggccccctgaagacgcactgtcaggagattccgacgtggacacagcttctacagtgagtctgcgtagtggcaagtccggcccatcaccaacaaccccccagccacttcgcgctcagaaagagatgtcgccaagcccacccgctgctcaggatccaggcggtacagccctggtgtccgccagggaacagtctagtgaaaggcagcatcatcccttaggtcccacggacatgggtcgcggagagccggtacgtcggagtgccatccgtaggggacatcgacctcgcggaagtctggattggccaagcgaggagcgtggacctgtgcttgcacatctgcccagtagcgacgtcatggcatcgaatcacgaaacccctgaggccaccggcgctgggagactcgggtccagaagaaaacctgcagcaccacccccttcacccgcagctcgtgaggagcagtcaagaagttccgcttcttcgcagaagggtccccaggcgcttacaagatccaacagtctcagtacaccaagacctacacgcgcatctagactcagacgggcacgtttgggagacgcctccgacactgaggctgctgatggcgagcgcggttcactgggcaatcctgaacccgttgggagacccgctgccgagcaggcaaaaaaattatcccgccttgacatcctcgctatgccacggaaacgtgcgggatctttcacagggacatccgaccctgaggccgctccggctaggacgtctttctctggtcgatcagtcgagctctgttgcgccagccggaaacctactatggccgaggccagagccgtgtcccgcaaggcagctaatacagccaccacaacaggaccaagacagccattttcacgggcaagaagcggttccgccagatatacttcaactacgcaaactccccgtgccggttcttcatccagagctaggtctagggcccctgggcctagagataccgatgacgatgaagaagagccagatccctacggtttcatagtgcagacggcggaaattgccgaaatcgcccgactctcccaaacgctcgtgaaggacgtggctatccttgcacaggagatacatgacgtcgcaggggatggagataccctgggcagctccgaaccagcccactctgcatcactgagcaacatgccttctacacctgcgtcaacaatttccgcgcgtgaagaactcgtgcagagaatcccagaggcctcactcaacttccagaaagtgcccccaggttccctaaatagccgtgattttgatcaaaatatgaacgacagctgtgaggatgccctcgctaataaaactagacccagaaaccgtgaggaagtaatctttgacaacctgatgctaaatcccgtgtcacagctgtcgcaagccatccgtgaaaatacagaacacctcgccgagaaaatgaaaatactattccagaacaccggtagggcctgggaggacctagaggcaagaattaatgccgaaaacgaggtgccaattctgaaaacttccaataaggaaatttcctcgatcttaaaagagctgcgtcgcgtacagaagcagctggaggtgatcaacgcaatcgtggacccatctggttcactcgacctacttacagggaatcgctccctggccagctctgcgcagcctggcctgggaaaggggagagtggcagcccaatcgccgccttcacccgcttcagcagaggctttacttccagcactgccattacggaacttccctcagagagctagttgcgggccacccagcctgcctgatccaacctttctgcccgacgccgaacgattccttatatag

SEQ ID NO: 29859 - DNA, 696 bp, synthetic construct
  source 1..696: mol_type = other DNA; note = Synthetic coding sequence
attatactgctcttggtgccttctgaggaaaccgatgagaacgatctgattctggaggttaccgcaggtgttgggggtggtttacggcacgctagcgcctctatcgggggtagcgaagcttacagacacatgaagttcgagggaggagtgcaccgcgtccagcgggttcccaaaaccgaaaagcaggggagagtccatacatcaacaatgaccgtggctatactgccacaaccaacagaaatcaaccttgtgatcaaccccaaagatcttcgtatagacactaaacgcgcatctggcgctgggggacagcatgtgaacacaacagacagtgccgttcgcatcgtgcatctcccaacaggggtcgtatcagagtgtcagcaggagaggtcccagcttaagaataaagaactggctatgacaaagcttcgcgcaaagctgtattctatgcacctagaggaggaaatcaataaacggcaaaacgcaaggaagatccaaatcggaagcaaaggtagaagtgagaaaattaggacctacaactttccccagaatagggtcactgatcatcgaatcaacaagacactgcacgatctcgaaacttttatgcagggcgactacctcctagacgagctcgtccagagcctgaaggagtacgccgactatgagagcttagtagaaattatctcgcagaaagtttag

SEQ ID NO: 29860 - DNA, 483 bp, synthetic construct
  source 1..483: mol_type = other DNA; note = Synthetic coding sequence
atggaagctgagcggccacaggaggaggaggacggtgagcaaggccctccacaggacgaagaggggtggccaccccctaatagcacaacaagaccctggagaagtgctcctccatcacccccaccgccagggactagacataccgctttggggccacgaagtgcgagcctgctctcacttcaaactgaactgctgctggacctggtggcggaggctcagagccgtcgcctggaggaacaacgagccacattttatacgccccagaaccccagtagcctggctcccgcacccttacgacccttagaggatcgagaacaactgtatagtactatcctgagccatcagtgtcagcggatggaggcccagcggagcgaaccaccattaccccctgggggtcaggagttgctggagctgcttctgcgtgttcagggcggaggccgtatggaagagcagaggtccaggccacccacacacacgtgttag

SEQ ID NO: 29861 - DNA, 423 bp, synthetic construct
  source 1..423: mol_type = other DNA; note = Synthetic coding sequence
atgcagtttggcgaacttctcgccgctgtcaggaaggcccaggccaacgtaatgctgttcctggaggagaaggagcaggcagccctatcccaagccaacggcatcaaagctcacctcgaatatcggtccgccgaaatggaaaagtccaagcaagagcttgagacaatggcagccatcagcaatacggttcaatttctggagatgtgcatgaccagccgctcgacccgtacccagcatactagtattagcgggtgtcggagaaggaccgcacgatcgccaacaccaagacccggatctatcccaactcggacatctcccgcagggtcctgcacaggcggaagatgctgccctagcagggtgtgtacatgtacaggcacgatcttaagatggagaagttccgggcaggcacccatgctggcgtag

SEQ ID NO: 29862 - DNA, 819 bp, synthetic construct
  source 1..819: mol_type = other DNA; note = Synthetic coding sequence
atggcatcttccaatacagtcctcatgcggttggtcgcatccgcctacagtatcgcccagaaggcgggtatgattgtgcgacgggtcatcgcggaaggcgatcttggaatcgttgagaagacatgtgcgacggacttacagacaaaagcagatagactggcgcagatgtcaatttgttccagtctagccaggaagttcccaaaactaaccattatcggggaagagctggttgtctgggtggaccccctggatggcactaaggagtacacggaaggcctattggataatgtgacagtactgatcggaattgcctacgaagggaaggctatagccggagtgataaaccagccctactacaactatgaggccggtcctgatgctgtccttgggcgaacaatttggggggttttgggcctgggcgcttttggatttcagctgaaagaagtacccgcaggaaagcacattatcacaaccaccagatcacactccaacaagctggtgactgattgcgttgcagccatgaaccccgatgctgtcctgcgcgtgggcggtgcagggaacaagatcatccaactgattgaagggaaggcctcggcctatgtcttcgcttcacccggatgcaaaaaatgggacacatgtgcgcctgaggtcatcctccacgccgttggtggcaagcttacggatattcatggaaatgtattacagtaccacaaagatgtcaagcacatgaactccgccggagttctggcaacgctgcgaaactatgactactacgccagcagagtacctgagtcgattaagaacgcgctggttccgtag

SEQ ID NO: 29863 - DNA, 606 bp, synthetic construct
  source 1..606: mol_type = other DNA; note = Synthetic coding sequence
atggaatcgaatcataagagcggggacggtctcagcgggacccagaaggaagccgcactgcgcgcattagtgcagcgcactggatattctctggtccaagagaatgggcagcgcaagtacggaggcccaccacctggatgggacgccgctcccccagagagagggtgcgagatctttataggtaaactgccccgagacctgtttgaagatgagcttattcctctatgcgagaaaatcggcaaaatctacgagatgagaatgatgatggatttcaacgggaataatcgcggatacgcctttgtgaccttttcgaataaagtagaagccaagaatgccatcaagcagcttaataattacgaaattagaaacggtcggttgctgggcgtgtgcgcgagcgtggacaattgcaggcttttcgtggggggaatccccaagacgaaaaaacgggaggagatcctgtccgaaatgaagaaggtcaccgagggggtggtggacgtgatcgtgtacccaagtgctgcggataaaacaaaaaaccggggattcgcctttgtcgagtacgagtctcaccgcgctgcggctatggccaggagaaagcttcttccatag

SEQ ID NO: 29864 - DNA, 1905 bp, synthetic construct
  source 1..1905: mol_type = other DNA; note = Synthetic coding sequence
atggccctgagcaagcgtgaactagatgagctaaagccatggattgagaaaacagtgaagagagtgctgggcttcagcgaaccaaccgtggtcactgcagccttaaactgcgtggggaagggtatggacaagaagaaagcagcggatcacctcaaaccgtttctggatgactcgactctgcgcttcgtcgacaagctgttcgaggcagtggaggaggggcgtagcagcagacattccaaatcctcttcagaccggtcgaggaagagggaactgaagattaaacagatgatggaggccgcaactaggcaaatcgaggaacgcaaaaaacagcttagctttattagccctcccactccccagcctaagactcccagcagctcccagccggaaagactgcctattgggaataccattcaaccctcacaggccgcaacgtttatgaatgatgcgattgaaaaagctaggaaagctgctgaattgcaggcccgtattcaagcccaactggcccttaaacccggtctgattggaaatgccaacatggtaggtcttgccaatctccatgctatggggatagccccaccaaaggtcgagctgaaagatcagactaagcctactcccctgatattggatgagcaggggaggactgtagacgccactggaaaggaaatagagctgactcataggatgcccactcttaaagcaaatatccgcgctgtcaagcgcgaacaatttaagcagcagctcaaagaaaagcctagcgaggacatggagagtaacacgtttttcgatcctcgcgtttccattgcccctagtcagcgccagcgtagaacctttaaatttcatgacaaaggcaaattcgaaaaaatcgcccaaagactgagaaccaaagcacagctggagaagttgcaggcagagatcagccaagcagcaagaaaaaccggcatccacacctccacccggcttgctttaatcgccccaaagaaggaactgaaagaaggcgatattcccgaaattgagtggtgggattcctacattatacctaacggattcgatctcacggaagagaaccccaagagagaagattacttcgggattacaaaccttgtggagcaccccgctcagttgaacccacccgtggacaacgacacacctgtcactttgggcgtctacttgaccaaaaaggagcagaaaaaattgcgcagacaaaccagacgggaggcacagaaagagctgcaggaaaaagtccgcttgggcctcatgccacctccggaacccaaagtcaggatctcaaatttgatgcgtgtcctgggcaccgaagcagtccaagatcccacaaaagttgaggcacacgtgcgggcacagatggcaaagcggcagaaggcacacgaagaggccaatgctgccaggaaacttaccgctgagcagcggaaagttaagaaaataaaaaagctgaaggaggatatttcccagggggtccatatttcagtgtaccgagttcgcaacctcagcaaccccgcaaaaaaattcaagatcgaagccaatgccggtcagctttatctcacaggagtcgtggttctccacaaggacgtaaatgtggtagttgtggaaggcggtccaaaggctcagaagaaatttaagcgactgatgttacaccggatcaagtgggacgagcaaacaagtaacacaaagggtgacgacgacgaggagagtgatgaagaagccgtgaaaaagactaataagtgtgtccttgtgtgggaggggacagctaaagaccgctcattcggcgagatgaagttcaaacagtgtcccacagagaatatggccagagaacacttcaagaaacatggtgctgagcactattgggacctggcgttgtctgagtccgtgctggagtcaactgactag

SEQ ID NO: 29865 - DNA, 3192 bp, synthetic construct
  source 1..3192: mol_type = other DNA; note = Synthetic coding sequence
atgcctcacctgccgttagcgtcctttcggcctcccttttgggggctacgacactctagaggacttccccgatttcatagcgtgtccacacaatcagaaccacacgggagtcctataagcagaaggaatcgtgaagctaaacaaaagcgcctcagagaaaagcaagccacccttgaagcagagatagcaggagaaagcaagagcccagctgaatctatcaaagcctggagaccaaaggagctggttctttacgaaatcccaaccaagcctggagaaaagaaagacgtgtctggacctctgccaccagcctatagccctcgatacgtcgaggccgcttggtacccctggtgggtccgcgaaggcttcttcaaaccggagtaccaggccagacttccacaggcgactggggagacgttcagtatgtgcatccctcctcccaacgtgacgggctctctgcacattgggcatgcactgacggtcgcaattcaggacgccctggttcgctggcaccggatgcggggagaccaagttctgtgggttcccggaagcgatcacgctggtattgctacgcaggccgtcgttgaaaaacaactgtggaaggagcggggtgtccgcagacacgagttatctcgggaggcctttctccgggaggtctggcagtggaaggaagcaaaagggggagagatttgtgaacagttgcgcgctctcggtgcctctctggattgggatcgcgaatgcttcaccatggatgtcgggagctccgtggcagtcactgaagcgtttgtgcgcctatataaagccggactcctgtacaggaatcaccagctcgtgaattggtcatgtgctcttcgctctgcaatctccgatattgaagtcgagaatcggcctctccccggacacacccagctgcgcctgcctgggtgtcccacaccggtgagcttcggtctgctgtttagcgtggcctttccggtcgatggcgagcccgacgctgaagtcgtggtcggaacaacaaggccagaaaccctacccggtgatgttgcggtcgctgttcatcctgacgacagccggtacacccacctgcacggcaggcagctgcgacacccactcatgggccagcctctccccctgataacagactatgctgtccagccccatgttggcacgggcgcagtcaaggtaacacctgcacatagtcccgcagacgcagaaatgggagcccgtcatggcctctcccctttgaatgtcatcgctgaggatggtacgatgacgtccttgtgtggtgattggctccagggtctgcaccgttttgttgcccgagagaaaatcatgtccgtcctgagtgagtggggcttgttcagaggcttgcagaaccatccgatggttcttccgatatgtagccggagcggcgacgtcattgagtacctcttgaaaaatcagtggttcgtgcggtgccaagaaatgggagcgagagctgcaaaagccgttgaatctggcgctctcgagctgtccccaagttttcatcagaagaattggcagcactggttttcccacatcggcgattggtgcgtgtccagacagctgtggtggggccaccagatccccgcttacctagtagtggaagatcatgcccagggggaagaggactgctgggttgtgggtcgctccgaggctgaggcccgagaggtggcggctgaactgacagggaggccaggggctgagctgacccttgaaagagatcccgacgttctggacacctggttttcctccgccctctttccgttttccgcactgggatggccgcaggagacgcctgacctagcccgattctaccctctcagtttgctagagacaggtagtgatctcctcctattctgggtcggtagaatggttatgttaggcacacaacttacaggacagctgcctttttctaaggttctgctccacccaatggtacgcgatagacaggggcgtaaaatgtcaaaatccctcggcaatgtgcttgaccccagagatattatttccggagtggaaatgcaggtcctgcaggagaaacttcggtcgggcaacctggacccagcagaattggcaatcgtggccgctgcacaaaagaaagatttccctcacggtatacccgagtgcggcactgatgctctgcgctttaccctgtgttctcatggcgtacaggccggtgacctgcatctgagcgtatccgaggtacaatcatgtcgacacttttgtaataagatctggaacgcgctgcgtttcattcttaatgccttgggtgaaaagtttgtccctcagcccgctgaggagctgagcccctcgtctcctatggacgcctggattctcagtaggttggccctggccgcacaggagtgtgagcggggattcctcactcgggaattgtcgcttgtcacccacgcgctccatcacttttggctgcataacctctgcgacgtatacctcgaggccgtgaagcctgtgttgtggcactctcccagacccctgggtcccccacaagtgctattcagttgtgcggatctgggcctgcgtcttctcgcacctttgatgccatttttggctgaagagctatggcaacggctgccacctcggccagggtgcccaccggcaccaagtatctctgtggcaccctacccctcagcctgttcgctggaacactggcgccagccagagctcgaaagaagattcagccgggtgcaggaagtggtccaagtgctgcgggctttgcgcgcaacatatcagctcacaaaagctcgccctcgagttcttctccaaagctcagagccaggcgaccaggggcttttcgaagcgtttctggaacctcttggcacactgggttattgcggcgcagttgggctgctccctcccggagcggcagctcctagcggatgggcccaggcccctttatctgacactgcccaggtctacatggaactgcaaggattggtggatccccagatccagctcccacttctggcagccaggcggtacaagctgcagaagcaactcgacagtctgacagccagaaccccctctgagggggaggcgggaacccaacggcagcagaaattgagttcactgcaactggagttaagtaagctggataaggccgctagccacttgagacagttaatggacgaaccaccggctcccggttccccggaactctag

SEQ ID NO: 29866 - DNA, 2118 bp, synthetic construct
  source 1..2118: mol_type = other DNA; note = Synthetic coding sequence
atgatcgactcagtgaagttacgcagagacagcgcagctgattttttctcacactacgaatatttgtgcgctctccagaattcagtaccactgcccgctgtcagggcgtgtctgagagagggtgtcttggactttaacgccgaccgacttcgcggtgttgattgggcgcctctgctgtctacccttaagattaataaggacctgcccctcgtttccattaagtccttctttcaaccctggcttggagacactgggagcgacatgaataagttctgtcggagcagagtccctgctatccgctataaagacgttacctttcaactgtgtaaagcactgaagggatgtttatccatctctagtgtccttaagaacctggagctgaatgggttgattctcagagaacgcgatttgaccatattggctaagggtttgaacaaatcagctagcctagtgcacctgtcactggctaactgtcccattggcgatggcggactcgaaattatctgccagggcataaagtcttcaatcacgctgaagaccgtcaactttactggttgtaatcttacctggcagggcgctgaccatatggccaagattctgaagtatcagactatgcgcagacatgaagagacctgggccgaaagtctgcgctaccggcgacccgatctagattgcatggctgggctgaggcgcatcacgttgaattgtaatacacttatcggagatctcggagcatgtgcctttgcagattctctgagcgaagacctctggctgagagccttggacctccagcagtgcgggctgactaatgaaggggcaaaagcgctgctcgaagctctcgagactaacactaccctggtggtgctggatatcaggaaaaatcctctgattgatcacagcatgatgaaagccgtcatcaaaaaggtgctccaaaacggcagaagtgccaagagtgaataccagtggatcacctccccttcggtgaaggagccatcgaaaactgccaaacaaaagcggaggacgatcatactcggatccggccataaaggaaaggctacaattaggattggtctggcaaccaaaaagccagtatcaagtgggaggaaacatagcctcggaaaggagtactatgcaccagccccactgccaccaggcgtgagcggcttcctgccttggaggaccgctgagcgggcaaaacgacatcgagggtttcctctgataaagacccgagacatctgtaaccaactgcaacagccaggattccccgtcacagtcactgtggagtcgccttcaagcagcgaggtcgaggaagtggacgactcctctgagtctgtgcacgaggtgccagaaaaaacctccatcgagcaagaagcactccaggagaaactggaggagtgcttgaaacagctgaaggaagagagggtgattcggctgaaggtagataagagggtgtctgagctggagcacgagaatgcccagctccggaatataaactttagtttaagtgaggcgcttcacgcacagagcctgacgaacatgattctcgacgacgaaggcgtgttggggtccatcgagaactctttccagaaattccatgctttcctggacctcctgaaagatgccggactcggccaattggccacaatggccggaatcgatcagagcgactttcagctgctcgggcacccccagatgacaagcactgtgtcaaatcccccaaaggaagaaaagaaggccctggaagatgagaagccggaaccgaagcaaaatgcccttggacagatgcagaatattcaagtgtccatatgcatgcagtcagcgtacaacgaaggcaccttaatgaaattccaaaaaattaccggagacgccagaatccccctgccgctggattcctttccggtgcccgtctcaacaccagagggactcggcacgagtagtaataatctgggggtgcccgcaacggagcagcgccaggaaagttttgagggcttcatagccaggatgtgcagcccctccccagacgccacaagtggtaccggatctcagaggaaggaagaggaactctcccgtaacagccggtctagcagcgagaagaagacaaagaccggaagccattag

SEQ ID NO: 29867 - DNA, 1287 bp, synthetic construct
  source 1..1287: mol_type = other DNA; note = Synthetic coding sequence
atggcctggcaaagccgcaaaggcggacatttcagagaggtggcgatgcagtggaaggtcaccctgacttccagatggggcctgttgaggcactgccaagtgctagccggactgttgcacctaggtaatattcagttcgcagcttccgaggatgaagcacaaccttgccagcccatggacgatgccaaatattctgtgcggaccgccgcaagcctgttgggcctgcccgaggatgtgctcttagagatggtccaaatcaggaccattcgggcaggccgacagcagcaggtgtttagaaaaccgtgtgcacgggctgagtgtgatacaaggcgcgattgccttgctaaattgatatacgcaaggcttttcgattggctggtcagcgtgattaatagctcaatctgtgccgacacagactcttggaccacttttataggattacttgatgtgtatggattcgagtcctttccagataacagtctggagcagctttgcatcaactatgctaatgagaagctgcagcagcacttcgtagcacactacctcagggctcaacaggaagagtacgcagttgaaggactggaatggtcctttattaactaccaggataatcagccctgcctcgacttaatcgaaggctctccaatctcaatttgctccctcatcaatgaggagtgccggctgaatcggccatctagtgcagcccagctgcagacaagaatagaaaccgccctggcaggaagcccttgcctgggtcataataaattgtccagggaaccaagcttcatcgtggtacactatgctggacccgtgagataccacacagcagggctcgtcgaaaaaaacaaagatcccatccctcctgaactagacggtgttgaggagaagcacttttcccaggcaccctgttctctgagcacctcaccccttcagacgcgattattagaagccattatacgcctctggccccttgggctggtgttagctaatacagcaatgggagttggatcttttcagcgaaaattagtggtgtgggcatgtctacagctgcccaggggaagcccaagcagttatactgtgcagacagcccaggatcaagccggagtgacttcaattagggcgctcccccaaggtagcataaaattccattgccggaagagccctcttcgttacgccgatatatgccctgaacccagtccttatagtatcactggcttcaatcagatccttcttgagaggcatcggctaatccatgtgactagcagtgcctttacgggcctaggatag

SEQ ID NO: 29868 - DNA, 927 bp, synthetic construct
  source 1..927: mol_type = other DNA; note = Synthetic coding sequence
atgaatcccatagtagtcgtccatggcggaggagctggccctatctcaaaggaccgcaaggaaagagtccaccagggtatggtgagggccgctacagtgggctatgggatcctccgtgaaggaggctcagcagtcgacgccgttgaaggggcagtagtcgctcttgaggatgatcctgaatttaacgcaggctgtggttcagtcttgaacacaaacggcgaagtggaaatggacgcgtctattatggacggtaaggacctgtccgctggggctgtgtcagctgtgcagtgtatcgcaaaccctattaagctggccagactggtcatggaaaaaacaccacactgttttctgactgatcaaggcgcagcccagttcgcagcggcaatgggtgtgcccgagatcccaggggagaaactcgtaaccgaaagaaataagaagcgcctggaaaaagagaagcatgaaaaaggcgctcaaaaaaccgactgccaaaaaaacctgggtaccgtaggcgctgttgccctggattgcaaaggaaatgtggcgtatgctacttccaccggaggaatcgtgaataagatggttggcagagttggagacagtccgtgcctgggcgctggcggttatgctgacaacgacattggagctgtcagcaccaccgggcacggagagtccatactgaaagtcaacctggcccgtcttactctgttccatatcgagcagggcaagacagttgaggaggcggcagacctgtccctgggttacatgaaatccagggtgaaaggtttggggggtctcatcgttgtgtctaaaaccggcgactgggtggccaaatggacaagcactagcatgccatgggctgcagccaaagacggaaaactgcatttcggcattgatccggatgacacaaccataactgacctgccttag

SEQ ID NO: 29869 - DNA, 429 bp, synthetic construct
  source 1..429: mol_type = other DNA; note = Synthetic coding sequence
atgagccttcacgggaagcggaaagagatctacaaatatgaagctccatggaccgtttacgcaatgaactggagtgttcggccagacaagaggttcagactcgccctgggtagcttcgtcgaggagtacaataataaggttgtgatcctggacgtgagggtcccctgtacaccagtggcaaggttgaataaccatcgcgcatgtgtcaacggcatcgcctgggcaccccactcctcctgtcatatctgtacggccgcagatgaccatcaggccctgatctgggatattcagcagatgcccagagctatcgaagaccccatattagcgtacactgccgagggtgaaataaataatgtgcagtgggctagtacacagccagattggatcgcaatctgctacaacaactgcctggagatactgagagtgtag

SEQ ID NO: 29870 - DNA, 1233 bp, synthetic construct
  source 1..1233: mol_type = other DNA; note = Synthetic coding sequence
atggcagccccttctccctccggcggtggaggcagtgggggaggctctggatcaggaactcccggacctgtcggttccccggcacccggacacccggcagtaagtagtatgcaggggtttcagattaacttctgtgagaaggctcaatccaagaggaaggctttaaagttaaatttcgcaaacccaccttttaagagcaccgctagattcacacttaatccgaacccaacaggggtacaaaacccacatatagaacgcctaaggacacatagcatagagtccagcggtaagctgaaaattagccctgagcagcactgggactttacggccgaggatcttaaggacctgggggagatcggacgtggggcttatggcagtgtcaacaaaatggtccataagccttccgggcagatcatggctgtgaaaaggattcggagtacagttgatgaaaaagaacagaaacagcttctcatggacctcgacgtagtcatgcgttcatctgactgtccatatatagtccaattttatggagcccttttccgcgaaggagattgttggatctgtatggagttgatgtccacctcatttgataagttttataagtacgtttatagtgtactggacgatgtcatccccgaagagatcctgggtaaaattaccctcgctacggtgaaggcactcaatcaccttaaagaaaatctgaaaattatccaccgtgacattaaaccgtccaacatcttactcgaccggtcaggcaatatcaaactgtgtgactttgggatctcaggacagctggttgacagcatcgccaagaccagagacgccggatgccgcccttatatggcaccagaacgtattgatccaagcgcttcacgtcagggttatgacgtgaggagcgatgtgtggtccctgggcatcactctgtatgaactggccaccggtaggtttccttacccgaaatggaattccgtctttgaccagctgactcaagtggtgaagggtgatcctccacagttaagcaattctgaagaacgcgaattctcacctagcttcattaatttcgtcaacctttgtctaacaaaggacgagagcaaacgacctaagtacaaagagctcctcaagcatccattcatcttaatgtacgaagagcgagcggtcgaggttgcctgttacgtctgtaaaattctcgaccagatgccagccaccccctcaagccccatgtacgtggattag

SEQ ID NO: 29871 - DNA, 687 bp, synthetic construct
  source 1..687: mol_type = other DNA; note = Synthetic coding sequence
atgcaactggccgtagtgtcagaggagcaggatcaaaatttaaaccgactaatctgctggatactgatgcagttcatctatatcagttcagattatgtttttgacgggactaatccaccctatcgggaggaggacatccccgcacctctcaatctgtatgggaaaacaaagttagatggtgagaaagctgtgctggagaacaacctgggggctgccgttctgaggatcccaattctgtatggggaagttgagaagctcgaagaatctgcggttaccgtgatgtttgataaggtccaatttagtaacaagtcagctaatatggatcattggcaacagcgtttcccaacacacgtgaaggatgtcgctacagtgtgcaggcagcttgcggaaaagcgcatgttggacccaagtataaaggggacgtttcactggtccggaaacgaacagatgaccaagtacgaaatggcctgcgcaatcgccgacgcttttaatctaccctctagccatctaagacccatcaccgactctcccgtgctgggcgcacagaggcctagaaacgcacagctcgattgtagcaagttggagactcttgggatcggccagcggacccctttccgtatcggcataaaagaatctctgtggcctttcctaattgataagcggtggcgccaaactgtattccactag

SEQ ID NO: 29872 - DNA, 1101 bp, synthetic construct
  source 1..1101: mol_type = other DNA; note = Synthetic coding sequence
atgagcgcagctaaccccgagactccaaactctaccatcagtagggaagcatccactcagtccagttccgctgctgctagccaggggtgggttctgcctgaaggcaaaattgtgcccaacacagtcttcgttgggggaatcgacgcgcgtatggatgaaacagagataggaagttgctttgggcgttacgggtccgttaaggaggtgaagattatcaccaacaggacaggggtctccaaaggctatggttttgtgagtttcgttaacgacgtggatgtccagaaaattgtcggaagtcagatccattttcatggtaaaaagcttaaattagggcctgccatccggaaacagaaactatgtgcaaggcacgtgcaacctcggcctttggtcgtgaacccccctccgccacctcagtttcagaacgtctggagaaatccaaataccgagacttatctgcagccccagatcactccaaatccagtgacacagcacgtgcaggcgtatagcgcatatccccattctcccggtcaggtaatcaccgggtgccaactgttagtttataactaccaggagtaccccacttaccccgacagtgctttccaggtgacgaccggctatcagttgcccgtgtacaattaccaacctttcccggcttacccaagttcgcctttccaggtgactgctggctaccagttacctgtgtacaattaccaggcgttccctgcctacccctccagcccattccaagtgacaacaggctaccaactgccagtgtataactaccaagcctttcccgcatatccttcaagcccctttcaagtaaccactggctatcagctaccagtttacaactaccaggcttttccggcttacccgtccagcccctttcaggtgactaccgggtatcaactgcccgtgtacaattatcaggcatttcctgcatatccaaactcagcagtccaggtcacaacaggatatcagttccacgtgtataactaccagatgccgcctcagtgtccagtcggagaacagcgccgtaatctttggacagaggcctacaaatggtggtatctggtctgtttgatccagagacgagattag

SEQ ID NO: 29873 - DNA, 306 bp, synthetic construct
  source 1..306: mol_type = other DNA; note = Synthetic coding sequence
atggcaagcgcaggcactcagcattatagtattggactgcggcagaagaactctttcaaacagtccggcccaagcgggaccgttccggcaacacccccagagaaaccgtccgagggacgagtttggcctcaggctcaccagcaggtcaaacccatctggaaactcgagaaaaaacaggttgagactttaagcgcaggtcttgggcctggtttgcttggtgtcccccctcaacccgcatattttttctgcccctccacactctgcagctcaggtacaacggccgtgatcgccggtcacagtagttag

SEQ ID NO: 29874 - DNA, 2121 bp, synthetic construct
  source 1..2121: mol_type = other DNA; note = Synthetic coding sequence
atgattgacagcgtgaagcttcgtcgtgacagtgcagccgacttcttcagccattacgaatatctctgcgcgttgcagaactccgtcccacttcccgcagtgcgcgcttgtttacgcgagggcgtgttggatttcaatgccgatcgcctgagaggcgtcgattgggcccctcttctgtcaaccctgaagatcaataaggatctgcccctggtgtctatcaaatcatttttccagccttggttgggtgataccggtagtgacatgaataagttctgccggagccgtgtgccggctatccggtacaaagacgtaacatttcagctttgtaaggccctcaaagggtgtctgagcatatctagcgtcctgaaaaatttggaactgaacggcctcatccttcgggagagagatctgacaatactcgccaaaggactcaacaaatccgcatccctcgtacacctctccttggccaattgccctataggggacgggggtctggagattatttgccagggcatcaaaagtagcatcaccttaaaaaccgtaaactttaccggttgtaacttgacttggcagggggctgatcatatggctaaaatactgaaatatcagacaatgcgcagacacgaggagacctgggccgaaagtctcaggtataggagaccagacttggattgtatggcgggacttcgtcggatcacactgaattgtaacactctgatcggagatctcggtgcatgtgccttcgccgacagtctgtcggaggacctgtggctgcgcgctctcgaccttcaacagtgtggtctcaccaacgaaggagctaaagctctgctggaggcgctcgagacgaacacaacgctggtcgtgctggacattaggaaaaatcccttgatagatcatagcatgatgaaggccgtgatcaagaaagtgctacagaacggcagaagcgcaaaatccgagtatcagtggatcacttcgccatcagttaaagagccttctaagacagctaagcagaagaggcgaactataattctgggctctggacacaaagggaaggcgaccattaggattgtgggcctggctacaaagaagcctgtttcctctggaagaaagcatagcttaggcaaggaatattatgccccagccccattacctccaggcgtctcgggctttctgccctggcgaactgctgagagagctaagcgccaccggggtttccccctgattaagactcgggacatttgcaaccagctccaacagcccggattccccgttaccgtgacagtcgagagccccagctcctcagaggtagaggaagttgatgattcaagtgagagcgtgcatgaggtgccagagaaaacgagcatcgagcaggaggctctgcaggaaaaactcgaggaatgcttgaagcaactcaaggaggaacgggtgatacggttaaaggtggataagcgcgtgagcgaactggagcacgaaaatgcccagcttcggaacattaattttagcctgtcagaggccttgcatgcccagtcccttactaatatgattcttgacgatgaaggagtgctaggaagtatcgagaattccttccagaagttccacgctttcttggatctgcttaaagacgcagggttgggacaactcgcgactatggcgggaattgatcagtcagactttcaactgctgggccacccgcagatgacaagtaccgtatccaatcctcctaaggaagagaagaaagccttagaagacgagaaacccgaaccgaaacagaatgcgctgggccagatgcagaatatccagttccagaagattaccggcgatgctcgtattccccttcctctggatagttttcccgtgccagtgtccacgcccgagggcttgggtacctcttccaataaccttggagttccagcaacagagcagaggcaggagagtttcgagggatttattgctcgcatgtgttcgccatcaccagacgccacctccgggacaggatcccagcgtaaggaggaggaactgtctcgaaacagccgttcttcctcagaaaagaagaccaaaaccggggaatacactaaaaagcatagtgataaacagcaccctggcaaagatcttcactcatag

SEQ ID NO: 29875 - DNA, 1932 bp, synthetic construct
  source 1..1932: mol_type = other DNA; note = Synthetic coding sequence
atggcttgccagcaaagccgctatcacagctttagctcagccagccgtctgcagcctcgcccaagcggagtcacgatagacgaatcattcctgaccgaagacaagtccactcagaatagaaagctgctgcagaagcgtcggaccctcgagctgcctgccgcaccgttgagccattgccaagcacctgtactgggcggtaccggaaaattacccacacagggggctccacccgctgggccaggacacagattccatccagggactaaagccgcagctcaccaacgagagaagatccgggcactggagccactgaaagccaaactagtgactgtgaatgaggactgcaacgaaagaatactggcgatgagggccgaagaaaagtatgagatctcacttttgaagaaggagaagatgaatttattgaagttgatagataagaaaaatgaggaaaagataagcctgcagtctgaagtaacaaaactccggaagaacctcgcagaagaatatctgcattacctttcggagcgagatgcttgcaaaattctgattgcagaccttaatgaactgagataccagagagaggatatgtccctggcacagtcccctggtatttggggggaggaccctgtcaaactaacccttgctctgaaaatgactagacaggacctcacacggactcagatggaactaaacaacatgaaggccaactttggggacgtggttccaagaagggattttgagatgcaggagaaaacgaataaggacctgcaggagcagctcgacacactgcgggcatcctatgaggaggttcgtaaagaacatgagattttgatgcaactgcatatgtccaccctgaaggaaagggaccagttcttttcagagctgcaagagatccagcggacttccactcctcggcctgactggacgaaatgcaaggatgttgtagcaggcggaccagaacgttggcagatgctggccgagggaaaaaactctgaccagctggtggacgtgctgctggaggagatcgggagcggcctgctgcgcgaaaaagatttttttccaggtttaggttatggcgaggcaattcctgctttcctccgcttcgacggactcgtggaaaataaaaagccatctaaaaaagacgtggtgaacttgctgaaagacgcctggaaagagagactggctgaggagcaaaaagaaaccttccctgacttcttctttaacttcttggaacatagattcgggccatcggacgccatggcatgggcttacactattttcgaaaacatcaaaatctttcactccaacgaagtcatgtcacagttctacgccgtcctgatggggaagaggtccgaaaacgtatacgtgacccagaaggagactgttgcgcagctactgaaggaaatgactaatgctgactctcagaacgagggtttgctgaccatggagcagtttaatacagtcttaaagagcacttttcccttgaagaccgaggagcagatacaggaattaatggaagccggaggctggcacccttcgtcttccaacgctgacctgcttaattatcgatcacttttcatggaggacgaggagggccaaagcgagccttttgtccagaaactgtgggaacagtacatggatgagaaagacgagtatctgcagcaattgaagcaggagctcggcatagagcttcacgaagaagttaccctgccgaagcttcggggaggactgatgaccattgacccaagcctagacaagcaaaccgtcaatacttatatgagtcaggcatttcagctgcctgagagcgaaatgcccgaggagggagacgagaaagaggaggcagtagtcgagatcctgcaaaccgcgctggagcgtctgcaggtgatcgatataagacgtgtggggcctcgcgagccagaacctgccagttag

SEQ ID NO: 29876 - DNA, 474 bp, synthetic construct
  source 1..474: mol_type = other DNA; note = Synthetic coding sequence
atggcaactagtgccccactaaggtctcttgaggaggaggtaacttgtagcatttgcctggattatctgcgcgaccctgtgacgatcgactgtggtcacgtattctgtcggtcttgcaccactgacgtcaggccaatcagcggctctagacccgtgtgtcctttgtgtaaaaagccgtttaagaaagaaaacattaggcctgtttggcagctagcaagtttggtcgagaacatcgagcggcttaaggtggataaaggtcgacagccaggagaagtgactcgggagcaacaggacgccaaattgtgtgagcgccaccgggaaaaacttcattattactgcgaggatgacggtaagcttctctgtgttatgtgccgcgagtctagggagcacagaccccataccgccgttttgatggagaaagccgctcaaccccacagggaaaagatcttgaatcatctttccaccttacgatag

SEQ ID NO: 29877 - DNA, 939 bp, synthetic construct
  source 1..939: mol_type = other DNA; note = Synthetic coding sequence
atggcacagccttatcctccagctcagtatccgccacctccgcagaatggtatccccgcagagtatgctcctcctccacctcaccctacgcaggactacagcggacagactcccgtgcctacggaacatggaatgacattgtataccccagctcagacacatccagagcagcctggctctgaggcttctacccaacctattgccggtacacagactgtgccacaaacagacgaggctgctcagaccgactcccagcctctccatccatcagatcccacggagaaacagcagccaaaacgccttcacgtgagcaacataccttttcgatttagagacccagatttgcgccagatgttcggccagttcggcaaaatccttgacgtggaaattatctttaacgagcgcggatccaaggggtttggttttgtgacattcgagacttcatcagacgcagaccgcgcacgggagaagcttaacgggacgatcgtcgaagggaggaaaatcgaagttaacaatgcaaccgcacgtgtcatgacgaacaagaagacaggaaacccatatactaacggttggaagctgaaccccgttgtcggggctgtctacggcccagagttctacgcagtcacagggttcccgtaccctactaccgggaccgcggtggcttatcgcggtgcacatttgcgcggtcggggacgagcagtgtacaacacctttcgggcagccccacctccccctcctataccaacttatggcgctgtcgtgtatcaagacggcttctacggcgcagaaatttacgggggatacgctgcctaccgctacgcccagcctgcagctgccgctgcagcctattccgactcctatggcagggtgtatgcagcagccgacccctatcaccataccatcggtcccgcagccacttactccataggcacaatgtag

SEQ ID NO: 29878 - DNA, 300 bp, synthetic construct
  source 1..300: mol_type = other DNA; note = Synthetic coding sequence
atggcatcactgctgcaagatcaactcaccacggatcaggatctgctgctgatgcaagagggcatgcccatgaggaaagtgaggagtaagtcctggaaaaagttaaggtattttcgcttgcaaaatgatggcatgaccgtgtggcatgccagacaggcgcgtggatctgctaagcccagctttagtattagcgacgtggagacaatccgaaatggccacgactcagagctgctgcggtcactggccgaggaactgcccctggaacaggggttcacaatcgtattccatggccgtcgttag

SEQ ID NO: 29879 - DNA, 1620 bp, synthetic construct
  source 1..1620: mol_type = other DNA; note = Synthetic coding sequence
atggctacaagcgccccacttcgctcgctggaggaggaggttacctgcagcatttgtcttgactacctgcgagacccagtgacaatcgactgtgggcatgtgttttgtcgaagctgcaccacagatgtgcgtccaatatccggcagtaggcccgtgtgccccctttgcaagaaacctttcaagaaagaaaatattaggcctgtatggcagctggcgagcctggttgaaaatattgaacggctgaaggtggacaaaggacgccagcccggtgaggtgaccagggagcagcaggacgcaaaactgtgcgagaggcaccgtgagaagctccattactactgtgaagatgatggaaaactgctctgtgtaatgtgtcgtgagagcagggaacataggccacacactgctgtgctgatggagaaagctgctcagcctcatagggagaagattctcaaccacctttccaccctcaggcgcgatcgagacaaaatccaagggttccaagcaaaaggggaggctgatattttggcggcacttaagaaactgcaggaccagaggcaatatatcgtggccgaattcgagcaaggacatcagtttctccgggagcgggaggaacacctcctggagcagctggctaaacttgaacaggaactgactgagggaagagagaaatttaagtcccgcggagtgggggaactcgcacgactggcactcgtgatttcggagcttgaaggcaaggctcagcagcccgcagccgagctgatgcaggataccagggattttttgaaccgataccctcgcaaaaagttctgggtgggtaaaccaatcgcgagagtggtgaaaaagaagaccggcgagttcagcgataaacttctgagcttgcagcggggtctgagggagttccaaggcaagctactccgtgatctggagtacaagaccgtgtcagtgacactggacccccaatccgctagtgggtacctacagctttcagaggattggaaatgtgtgacgtacactagcctctataaaagcgcatatctgcatccacagcagttcgattgcgagcctggtgttctaggcagcaagggattcacctgggggaaagtttactgggaagtagaagtggagcgcgagggctggtccgaagacgaagaggagggggacgaggaggaagagggcgaagaggaggaggaagaggaagaagccggatacggagatgggtatgacgactgggagaccgacgaagatgaggagtcgctgggggacgaagaggaggaggaggaggaggaggaggaggaggtcctagagtcatgtatggtgggtgttgcacgagactcggttaagagaaaaggagatttgagtctcaggcctgaggacggggtgtgggccctgcgactgtcttcttcggggatttgggcaaatacttccccggaggctgagctatttcctgctctgcgtcccagacgggttgggatcgctctggactacgagggaggcactgttaccttcactaatgccgagtctcaggagctgatttacacttttaccgcaacttttacccgcagactggtccccttcctatggcttaagtggcccggaactaggttgctcctccgcccatag

SEQ ID NO: 29880 - DNA, 480 bp, synthetic construct
  source 1..480: mol_type = other DNA; note = Synthetic coding sequence
atggcaacgtccgcaccattacgaagcctcgaagaagaggtcacctgcagtatttgtctcgattatctccgcgatcccgtcacaatcgactgcggacatgtcttttgtcggtcgtgtaccactgatgtccgccctataagtgggtcccgacctgtgtgtcccctatgcaagaagccttttaagaaagagaacattcggccagtgtggcagcttgagaagattttaaatcatttatccacactgagacgcgatcgggataagattcaggggtttcaggcgaagggggaagctgatatcctggcagcattaaagaagctgcaggaccagcggcagtatattgtggcagaattcgaacagggccaccagttcctccgcgagcgagaagagcatcttctggaacagctcgctaagttggagcaggaacttacggaaggccgagaaaaatttaagtctcggggagtcggggagctggcaagatag

SEQ ID NO: 29881 - DNA, 579 bp, synthetic construct
  source 1..579: mol_type = other DNA; note = Synthetic coding sequence
atgggtaagggatgtaaagtagtcgtatgcggactcctgtccgtcggcaaaaccgcaattttggagcaactgctgtacggtaaccacacgatcggtatggaagattgtgaaacgatggaggatgtgtatatggcgagcgtggagacagaccgaggcgtgaaggaacagctgcacctctacgatactcgcggtctccaggagggagtggagttaccgaagcattatttctcttttgccgacgggttcgtcctggtgtactccgttaacaaccttgagtcctttcagcgcgtggagctcctgaagaaagaaatagataaattcaaggacaaaaaggaggtcgccatcgtggtgctgggcaacaaaattgacttgagcgagcagcgacaggttgacgcagaggtcgctcagcaatgggcaaaatctgaaaaagtcaggctctgggaagtcaccgtgacagacaggaaaacactgattgagccctttacactcctcgcatctaagttatctcagcctcagtcaaagagctctttccctctccctggcaggaagaacaaaggtaactctaactccgagaattag

SEQ ID NO: 29882 - DNA, 309 bp, synthetic construct
  source 1..309: mol_type = other DNA; note = Synthetic coding sequence
atgcacaatcggtcacagggcttcttcttctcatcatgccatccgcagaaccatgtttcctatgggtgtcagagcccatctttcatcttctgtcgctgtcagtccttgaacttcgtgagccggacatgttacccgctgtcttacttcagttatggcaatcagacaatcggcagtatttccaactctttccgatccctgaattacgtctcccactctttccagcccatcagttttatgcactcaagtttccaaccggcttgcagcgacttcgtgggctggcagtcccctttcctacgacgcacctgctag

SEQ ID NO: 29883 - DNA, 723 bp, synthetic construct
  source 1..723: mol_type = other DNA; note = Synthetic coding sequence
atggacttggtacgtctgggcttggagagaggagagaccgctaaggaggcactcgatgtgatcgtgtcactcttggaggaacacggccaagggggaaattatttcgaggacgcaaattcctgccattctttccagagtgcataccttatagtggaccgtgacgaagcatgggtcctagagactatcgggaaatactgggctgctgagaaggtgaccgagtccatcactgtccagacaatgatgaacactctaagagacaaggcctccggtgtgtgcatcgactcggaattctttctgaccaccgccagcggagtgtcagtgcttccccagaaccgcagtagcccctgtatccactactttactggcacccccgatccatctcggtccatcttcaaaccttttatcttcgtggacgatgtgaaattagtacccaagactcagagcccctgtttcggggacgatgacccggctaagaaggagccacggtttcaggaaaaacctgatcgacggcatgaactgtataaggcacacgagtgggctcgggctatcatcgaaagcgaccaggaacaggggagaaaactgaggagtactatgctggaacttgagaagcagggcctggaagctatggaggagattctaactagtagtgagcccctggacccagctgaagtcggagacctgttttatgactgcgttgacaccgaaattaagttctttaagtag

SEQ ID NO: 29884 - DNA, 900 bp, synthetic construct
  source 1..900: mol_type = other DNA; note = Synthetic coding sequence
tgaagagaggaggacatctatcagttcgcctactgttatccttatacatacacgcggttccagcattacctggacagcctgcagaaacggaacatggattatttttttagagagcagctcggccaaagcgtgcaacagcgcaaattggatctgctgacgattacaagtcccgataatttgagagaaggcgcagagcaaaaagtcgtatttataacggggagggttcatcccggtgaaactccttctagcttcgtgtgccagggaattattgatttccttgtttctcagcaccccattgcatgcgtgttgagggagtacttggtcttcaagatagcacctatgttgaaccctgacggggtgtatttgggcaactacaggtgctcactcatgggctttgatctgaatagacattggttggacccatcaccctgggtgcacccgaccctgcacggagtgaaacaattgattgtacaaatgtacaacgatcctaaaactagcctggagttctacatagacattcatgcccatagcacaatgatgaatggctttatgtatggcaacatcttcgaagacgaagaacgctttcagaggcaggccatcttccctaagctgttatgtcagaatgcagaggacttctcctactcatcaacaagtttcaatcgtgatgctgtgaaggcaggaactggccgaagattcctgggcggactgcttgaccatacctcctattgctacacgctcgaggtgtccttctatagctatataatcagcggaactacagcagctgtgccgtacaccgaagaggcttgcattctttctccccatcctgctttaggccagcccagttcttcccgtgaatatccaagcctcaccggacaggagctgggaccacagctgcgatag

SEQ ID NO: 29885 - DNA, 1041 bp, synthetic construct
  source 1..1041: mol_type = other DNA; note = Synthetic coding sequence
atggccgctgccgagcctgcctcttcaggtcagcaggccccagccggacaaggacaaggccagagacctccacctcaacccccacaggcgcaggctccgcagccgcctccacctccacaactgggcggtgccggaggaggatcgtcccgccatgaaaagtcactgggtcttctgaccacgaaattcgtctcactactccaagaggcaaaggatggtgtgctggaccttaaagctgccgctgatacacttgcagtgcgtcagaaacgcaggatctacgacattaccaatgtcctcgagggaatcgatcttattgagaagaagtcaaagaatagcattcagtggaagggagtgggggcaggttgcaacaccaaagaagtgattgacagactgaggtacttgaaagctgagatagaggatctggaactaaaggaacgcgaactggatcagcagaaactgtggctacagcagagcatcaaaaacgtgatggacgactcgatcaacaaccgtttcagctatgtgactcatgaagatatttgtaattgttttaatggagacacgcttcttgcaatacaggccccaagtggaacacaactcgaggtccccatcccagaaatggggcagaatggtcagaaaaagtaccagattaatttgaagagtcacagtggcccaattcacgtgttgttgatcaacaaggagtcaagcagctccaagcctgtggtatttcccgtaccaccccctgatgacctgacacagccaagttctcagagtcttaccccagtgacaccacaaaaaagttcaatggctactcagaacctgcctgagcagcatgtctccgagcggagccaagctttacagcaaacgtcagccacggatatttcctccgctggctcaatatccggagacatcatcgatgaactcatgtcaagcgatgtgttccccctgctccggttgagcccaacaccagccgatgattacaatttcaacctggatgataatgagggagtgtgtgatttatttgatgtacaaatccttaactactag

SEQ ID NO: 29886 - DNA, 396 bp, synthetic construct
  source 1..396: mol_type = other DNA; note = Synthetic coding sequence
atgtccaaacgctacctgcagaaagccaccaagggaaagctgctgatcattatctttatcgtcactctctggggtaaggtggtgagtagcgctaatcatcataaggcccaccacgtaaaaaccgggacatgcgaagtcgtggccctccaccgctgctgtaataagaacaagattgaagagagaagccagaccgtcaagtgcagctgtttccccggacaggtggccggaactacgcgcgctgccccatcttgtgtggatgcctcgatcgtagaacagaaatggtggtgtcatatgcaaccatgcctggaaggtgaggaatgtaaggtcttacctgacagaaaaggctggtcctgttccagtggcaacaaagtgaaaacaacccgggtcacacattag

SEQ ID NO: 29887 - DNA, 306 bp, synthetic construct
  source 1..306: mol_type = other DNA; note = Synthetic coding sequence
atgccgttctttggcaacacgttctctccaaaaaagactccacctagaaagtccgcaagtcttagtaatttgcactccctggatcgcagcacaagagaagtggagctcggcctggagtacgggtctccaacgatgaatttggcaggccagtccttgaaattcgaaaatggacagtggatcgccgagaccggagtgagcgggggtgtggatcgacgagaagtccagcggctgaggcgcaggaaccagcagctagaagaggaaaataacctgctgcgcctgaaggttgatatcctcttagacatgtag

SEQ ID NO: 29888 - DNA, 393 bp, synthetic construct
  source 1..393: mol_type = other DNA; note = Synthetic coding sequence
atggatatttcaaagggcctacccggtatgcagggcggactccacatctggatctctgaaaatagaaagatggtacctgtgccagagggtgcctatggcaatttcttcgaggagcattgctacgtaatacttcatgtcccccagtcacccaaagctactcagggcgcatcttctgatttgcactactgggtcggtaaacaggcaggcgctgaggcacaaggcgctgccgaggcattccagcaacggcttcaggacgagttaggtggtcagactgtgcttcatagggaggcccagggccatgagtccgactgcttctgctcatatttccgccctggcattatctaccgtaaaggcggtctcgcgtctgatctgaaacatgttgagacgaattag

SEQ ID NO: 29889 - DNA, 51 bp, synthetic construct
  source 1..51: mol_type = other DNA; note = Synthetic coding sequence
atgtgcacgagcgagacattccaggcgctggacaccttcgaagctaggtag

SEQ ID NO: 29890 - DNA, 5553 bp, synthetic construct
  source 1..5553: mol_type = other DNA; note = Synthetic coding sequence
atggagagcaacttcaaccaggagggggtgcccaggccttcctacgtgttttccgcagacccaatagcacgcccttcagaaataaattttgatgggatcaaactcgatctgagtcatgagttctccctggtagcgcctaatactgaggccaattcgtttgaatctaaagattatctgcaggtatgtctgagaattcgcccttttacccagtccgagaaagagctcgagagcgaggggtgcgtgcatatattggactctcaaacagttgtccttaaggagccccagtgtatcttgggaaggctgtctgagaaatcaagcggtcaaatggcacagaagttctccttcagcaaagtgttcggaccagcaacgacacagaaggagttctttcaggggtgcatcatgcagccagtcaaagatcttcttaaaggacagtcccgactgattttcacatacgggctgaccaactcaggaaaaacatatacgtttcaggggaccgaagaaaacatcggcattcttccaagaacccttaatgtgttgtttgattctctgcaggagcgtctgtacactaaaatgaacctcaagcctcataggtcaagggagtacttgcggttgtcctctgaacaggagaaagaggaaatcgcctctaaatctgcgcttcttcggcagattaaggaggtgaccgtgcacaacgactctgacgacactctctatggtagtttgaccaacagcttgaacatctcagagttcgaggagagtatcaaggattacgaacaggctaatctcaacatggccaactctatcaagttcagcgtgtgggtctcttttttcgaaatctataacgaatacatttacgacctcttcgtgcctgtctctagtaagttccagaagcggaagatgctgcggctgtcgcaggatgtaaaggggtactcttttatcaaggacctccagtggatccaggtttccgacagtaaggaggcttatcgactcctgaaattaggtatcaagcaccagtcagtagcctttacaaaactcaacaatgcgtcatccaggagtcactctatttttaccgttaagatcctacagatcgaagatagcgaaatgtcacgagttattcgcgtatctgaactgagtttatgcgacctagctgggtccgagcggaccatgaaaacccagaacgagggtgagcgtcttcgcgagacggggaacatcaatacctcattgctcaccctggggaagtgcattaatgttttgaaaaattcagaaaagtcaaaattccagcaacacgtgccattccgcgaatccaagcttacgcactactttcaatcattcttcaatgggaaaggtaagatttgcatgatcgtaaatatttcccagtgttatttggcatatgacgaaaccctgaacgtgctgaaattctccgcgattgctcaaaaggtgtgtgtgccggatacactgaactcaagccaagaaaagttatttggtccagtaaaatctagccaggacgtaagcctggacagcaattctaactcaaagatccttaatgtgaagcgagctacaatttcttgggagaactcccttgaggatcttatggaggatgaagatttggtggaggagctagaaaatgcagaggagacccagaacgtggagaccaaactcttagatgaggatcttgacaagaccctggaggaaaacaaagcctttatttctcatgaggagaaacggaagttgctggacctcatcgaagatctcaaaaagaaactcattaatgaaaagaaggagaaattgaccctggagtttaagatacgggaggaagtgactcaggaattcacccagtactgggcccagagggaagcggatttcaaagagaccctccttcaggagcgggagatcctagaagagaatgcagagaggaggcttgctatatttaaggatcttgtgggcaaatgcgacacacgagaagaggctgcgaaggacatctgcgctaccaaagtggaaacagaggaaactcacaattacgtaggatttgaagacatcattgatagccttcaggataacgtggccgacatcaaaaagcaggctgagatagcacacctgtatatagcgtctcttcccgacccccaggaggctactgcctgcctcgaactcaagtttaaccagatcaaagccgaactcgccaaaaccaaaggggagctgatcaagaccaaggaggagctgaaaaaacgtgagaacgagagcgatagcttgattcaagagcttgagacatcaaacaaaaaaattattacccaaaaccagcggataaaggagctgataaatattatcgaccagaaggaggacactatcaacgaattccagaacttgaagtctcacatggaaaatacatttaagtgtaacgacaaagccgacacgtcaagcctgatcataaacaacaaactgatctgcaacgaaaccgtcgaagtgcctaaggattccaagagcaaaatctgtagcgaacgcaaacgagtgaatgagaacgagctacagcaggatgagcctcctgccaagaagggcacaactagtgcagccagtagccgtcgcttgcgaaaactaatcagcaagcccgtgaaccggacacgccaaactgagggccacagtcttgtctctatccacgtttcatctgccataactgaggatcagaagaaatctgaggaagttcgtcccaatattgccgagatcgaagatatcagggtgttacaggagaacaacgagggcctacgcgctttcctcttaacgatcgaaaacgagctgaagaacgaaaaagaggagaaggccgaactgaacaaacagattgtgcactttcaacaggagctttctctttctgagaaaaaaaacctgaccctgtccaaagaagtgcagcaaattcaatccaactacgatattgctattgctgagctccatgttcagaaaagcaagaaccaggagcaagaggagaagatcatgaagctgtccaatgagatcgaaacagcaacgcgcagcattacaaacaatgtctcccagatcaaactaatgcatacaaaaattgatgagctcaggaccctcgactcggtgtcacagatatccaacatagacttattgaacctaagggatttgtccaacggaagcgaggaggataaccttcctaatacccagctggatctcctaggaaatgattatttagtgtccaagcaggtgaaggagtacagaatccaggagcccaatcgggaaaattccttccatagctccatcgaagctatctgggaggaatgtaaggagattgtcaaggcgagtagtaagaagtctcatcagatcgaagagctggaacagcaaatcgagaaactacaggcagaggttaaaggctacaaagacgaaaacaaccgcctcaaagaaaaggaacacaagaaccaagatgacctactgaaggaaaaagagacactgattcagcaactgaaagaggaattacaagaaaaaaatgttacgttagacgttcagattcagcatgttgtcgaaggcaaacgtgccctttccgagttaactcagggggtgacctgttacaaagccaaaatcaaagagttagaaaccatactggagactcagaaggtcgagtgctcacatagtgcgaaactggagcaggacatcctcgaaaaggagtctatcattctgaagctagagcggaacttgaaggaattccaggagcacttgcaggactccgttaagaacactaaggaccttaacgtgaaagaactgaagctcaaggaagaaatcacccaactgacaaacaatctgcaggatatgaagcacctgcttcaactgaaggaagaggaggaggagacgaaccgccaggagaccgagaagctgaaggaagaactgtccgcgagcagtgcaagaacccagaatctcaaagccgacctgcaaaggaaagaggaggattatgcagaccttaaggaaaagctgaccgacgcgaagaagcagatcaagcaagtacaaaaagaggtgtccgtgatgcgcgatgaagacaaattgctacggatcaagattaacgagcttgaaaagaagaaaaatcagtgctcacaggagctggacatgaaacagaggaccattcagcagctgaaagaacaactgaacaaccagaaggtcgaggaagccatccagcaatatgaacgcgcttgtaaggacctgaacgtcaaagagaagattattgaagacatgcggatgactctggaggagcaggaacagactcaggtggagcaagatcaagtactggaagcaaagctcgaggaggtggaaaggctcgctaccgaactggagaaatggaaagaaaaatgtaacgatttggaaacaaagaacaaccaaaggtcaaataaggagcacgagaacaacacggatgtactgggtaagctgactaacctccaggacgagctccaggagtcagagcagaaatacaacgccgacagaaaaaagtggctggaggaaaaaatgatgctcattactcaggccaaggaggcagaaaatatcaggaataaggagatgaagaagtacgcggaggaccgtgaaagattcttcaagcagcaaaacgagatggaaatcctcaccgctcagttgactgagaaggattcagacttacaaaaatggcgtgaggaacgagatcagctagtggcagccttagaaattcagctcaaagcactgataagttccaacgtccagaaagacaacgagatagagcagctcaagcggatcatcagcgaaacgtccaagatcgagactcaaatcatggatattaagccaaagaggatctcctcagcggatccggacaagctgcagacagaacctctgagcacttcctttgagatatcaaggaacaagattgaggatggctccgttgtgcttgattcctgcgaagtgagcaccgagaatgaccagagtacaagatttcctaaaccagagctcgagatccagtttactcccttacagcctaataagatggccgtgaaacaccctggatgcactacccccgtgacggtaaagatcccaaaggctcgaaaacggaaatcaaatgaaatggaagaggacttagtcaaatgcgagaataagaaaaatgcaacaccgagaaccaacctgaagtttcccatatccgatgaccggaatagttctgtcaagaaagagcaaaaagttgcaatcagaccctcaagtaaaaagacttatagcctacgcagtcaggccagtataataggagtcaatttggcaacgaaaaaaaaagagggcacactccaaaagtttggggattttctgcagcacagcccctctatcttgcagagtaaagccaagaaaataatagagactatgtcctcatccaagttaagtaatgtggaggccagtaaggagaatgtcagccagcccaaacgagctaaacgtaagctgtatacctcagaaatatcttcccctatcgatatcagtggccaggtgatcctcatggaccagaagatgaaagaatccgaccatcaaatcataaagcgcagacttcgtaccaaaactgctaagtac

SEQ ID NO: 29891 - DNA, 1527 bp, synthetic construct
  source 1..1527: mol_type = other DNA; note = Synthetic coding sequence
atgcggtgtcctaagagtgctgtaacaatgcgcaatgaggaactcctcctttccaacggtaccgcaaataagatgaacggagccctggatcacagcgaccagccagaccccgatgccattaaaatgtttgtaggccagatcccccgtagctggagtgagaaggaactgaaggagcttttcgagccctacggcgcagtgtatcaaatcaacgtcttgagagaccgaagtcagaaccctccacaatcgaaaggctgttgtttcgttacgttttacacacgcaaagccgctctggaggcccagaacgctctgcataatatcaaaaccctccccggaatgcaccacccaattcagatgaaacccgcagattccgaaaagagcaacgccgtagaggatcgcaagctgtttatcggcatggtaagcaagaaatgcaacgagaatgacatcagggtgatgttctcccccttcggccagattgaggaatgtcgcatcttgaggggtcctgacggcctctctcggggttgcgctttcgtcactttttctacacgggctatggctcagaatgcgattaaggctatgcaccaatcccagactatggagggttgctcttctccaattgtggtgaagttcgcagatacacaaaaggacaaagagcagcgcagactgcagcagcagttggctcaacagatgcagcaattaaacacagcaacctggggtaacctgaccgggttgggaggcttgactccacagtatctggcactgctgcaacaggccaccagttcttcaaacttgggcgcattttccggcattcagcagatggcaggaatgaacgctttacagcttcagaaccttgcgactcttgcagccgctgccgcagctgcacagacgagcgccacaagtactaacgcaaacccactttctacgacctcaagcgcactcggagcccttacatccccagtggctgccagtacccccaattctactgcgggagctgcaatgaattccttaaccagcctgggcaccttgcaaggcctggctggcgcaaccgtgggattgaacaacatcaatgccctggccggtatggcggcactcaatgggggattgggcgctacaggattaacgaacggcactgctggcaccatggatgcactgactcaggcctatagcgggattcagcaatatgccgcagccgcactacccaccctgtattcgcagtctttgctgcaacagcagtccgcagctgggtctcagaaggagggacccgagggcgctaatctgttcatctaccatttaccacaggaatttggggaccaggatattctccaaatgtttatgccttttggaaatgtgatcagcgcaaaagtgtttattgacaaacaaactaatctgagcaagtgctttggcttcgtcagttatgacaaccctgtctccgcacaggcagcaattcaggcgatgaacggatttcagatcggaatgaaaaggctcaaggttcagttgaaacggagtaaaaatgactccaagccgtattag

SEQ ID NO: 29892 - DNA, 975 bp, synthetic construct
  source 1..975: mol_type = other DNA; note = Synthetic coding sequence
atgttcattggaggtcttagttggcagacgagccctgacagcctccgcgattatttttccaaattcggcgaaataagggagtgcatggtcatgcgcgaccctacaacaaagagatcccgaggttttgggttcgtcaccttcgccgaccctgccagtgtggacaaggtattgggtcagccacaccacgaattggactcaaaaacaatcgatccgaaggtagcctttccaaggcgggctcagcctaaaatggtcactcggacaaaaaagatttttgttggcggactttctgccaacaccgtggtcgaagatgtgaaacagtacttcgagcagtttggaaaggtggaagacgccatgcttatgtttgacaagacaaccaaccgacatcgaggctttggctttgttaccttcgaaaacgaagacgtggtcgagaaagtctgtgaaatacatttccacgaaatcaacaataaaatggtggaatgcaagaaggcccagccaaaagaggtcatgtttcctcctggaaccagaggcagggcacgtgggctcccatacacaatggatgctttcatgctcgggatggggatgctcgggtacccaaatttcgtggctacctatggtaggggctatcccggtttcgcaccatcttatggataccagtttcctggctttcccgctgctgcttatggacccgtggccgctgctgccgtggccgctgcccgagggtctgttctgaactcttattcagcccaacccaattttggagctccagcaagccccgcaggaagcaaccccgcaaggccgggaggctttcccggagccaacagcccagggcctgttgccgacctgtacggccctgcctctcaggactcgggtgttggcaattacatctctgctgcttccccccagccaggatccggcttcgggcacgggatagccggaccgctgatcgctaccgccttcactaacggttaccattag

SEQ ID NO: 29893 - DNA, 333 bp, synthetic construct
  source 1..333: mol_type = other DNA; note = Synthetic coding sequence
taacacaaaccttgctacggagctctatttggtcccaggggagtgaatattggcggtgtggggagctacctctacaacccgcctactccctcccccggttgtaccacacctctctccccttcctctttcagtccacctcgcccacgaacaggcctcccgcagggtaagaagaccgagaaagttatgtctttgggcaggaattggcacaggccctgtttgagatgccagcgctgccacaagactctgactgctggctctcacgccgaacacgacggtgtgccatattgccatgtcccctgctacgggtacctgttcggccctaaagccctgtag

SEQ ID NO: 29894 - DNA, 411 bp, synthetic construct
  source 1..411: mol_type = other DNA; note = Synthetic coding sequence
atgacagaagattcacagagaaactttcgtagtgtttactacgagaaggtcggtttccgtggcgttgaggagaagaagtcactcgagatcctgcttaaggacgatcggctagatacggaaaagctatgtacttttagtcagcggtttccactacccagcatgtatcgtgcgctggtatggaaggtacttctgggcattctccccccacatcatgagtcacatgcaaaagtcatgatgtaccgaaaggagcaatacctcgacgtgctccatgcccttaaagtggtgagatttgtctcagacgctacaccccaagccgaagtatacttgaggatgtatcagttggaatctggcaaattacctagatcaccatcttttccactggagccagatgatgaggttttcctggcttag

SEQ ID NO: 29895 - DNA, 1686 bp, synthetic construct
  source 1..1686: mol_type = other DNA; note = Synthetic coding sequence
atggccagccaattctgcttgcccgaatcaccctgtttaagtccaccgcctttgagtcctcttgcacttgcacccagctccgcaatcagggatcaacgcactgcgaccaaatgggttgcaatgattccacagaaaaaccagacggcttctggagattccctggacgtgcgagtgccgagcaagccatgcctgatgaaacagaaaaaaagcccgtgcctgtgggaaatccagaagttacaggaacagcgagagaagcgaagaaggctccagcaggagataagagccaggcgggctctggacgtgaacacacgtaaccccaactacgagattatgcacatgattgaagaatatagacggcacttagactcatcaaagatctcagtgctggagccaccacaggagcatcgcatctgtgtttgtgtcagaaagaggcctctaaaccagcgagaaaccactttaaaggatcacgccttcgacgacaaagcctccaatgagttagtttatcagttcactgcacagcctctggttgagtccatattccgtaaaggtatggccacatgttttgcttacggccagaccgggagtgggaaaacttacaccatgggaggcgatttcagcggaacagcacaggattgctctaagggaatctacgccctggtggcccaggacgtgttcctgttgctgcgtaatagcacctacgaaaagctggacctgaaggtgtacggcacctttttcgaaatctatgggggaaaagtgtatgatctcctaaattggaagaaaaaactgcaggtgctcgaagacggaaatcagcagattcaggtcgtgggcctgcaagagaaagaagtctgttgcgtcgaggaggtcctgaacctcgtggagatcggaaactcttgcagaactagccggcagactccagtgaatgctcattccagcagaagtcacgccgtttttcagatcatactcaagagcggacgcattatgcatgggaaattttcattagtggatctcgcaggcaacgaaaggggagcggataccaccaaagcctctagaaaacgccaacttgagggagccgaaatcaataagtcactgcttgctcttaaggaatgtatcctggcactcggacagaacaagccacacacacccttccgagctagcaaactgacgttagtgctgcgggactccttcatcgggcagaattccagcacatgcatgattgcgaccatatctccaggcatgaccagttgtgagaacactttgaacactttgaggtatgccaatcgcgtgaaaaaactgaacgtagatgtccgcccatatcacaggggtcattaccccatcggtcatgaggcaccgaggatgctcaaatcccacatcggaaacagcgagatgtctttacagcgcgatgagttcataaaaattccctacgtacaatccgaggaacagaaggaaatcgaggaggtggagaccctccccactctgttgggcaaggacaccaccatctcagggaagggcagctcacagtggctcgaaaacattcaggaaagagctggaggagtccatcacgatatcgacttttgcattgccaggagtctctccattctcgagcagaaaatagatgctctcaccgaaatccagaaaaaacttaaactcctcctagcagatctccacgtcaaatctaaggtcgaatag

SEQ ID NO: 29896 - DNA, 375 bp, synthetic construct
  source 1..375: mol_type = other DNA; note = Synthetic coding sequence
tgaagtgcctgtattgggaactgttctacagccctcgaggagctgacagatgatatgaccgaagattttcttccagtactgcgcgagtatatactgtactccgactcaatgaagtctgttctgaagaaaagggatcaggtgcaggctgagtacgaagccaagctggaggccgtggcactgcgaaaagaagacagacctaaagttccagcggatgtggagaaatgccaagataggatggagtgtttcaatgcagatctcaaagctgatatggaaagatggcagaataacaagcggcaagatttccggcagcttctgatgggaatggcagacaagaacatacaatactatgagaagtctattgccgatcttaagtag

SEQ ID NO: 29897 - DNA, 747 bp, synthetic construct
  source 1..747: mol_type = other DNA; note = Synthetic coding sequence
atggccacttctgccccactacgttcccttgaggaagaagtgacttgctccatttgccttgattatctgagagacccagttacgatcgactgtggccacgttttttgcaggtcctgcactacggacgtacggcctatttccggcagcaggcctgtgtgtccgttgtgcaagaaaccattcaaaaaggaaaacattcgcccagtttggcagctcgcttccttggttgagaacattgagaggctgaaagtggataagggcagacagcccggagaggtcaccagagagcaacaggacgcaaagctgtgcgagcgacatcgggagaaactgcattactactgtgaggacgatggaaaacttctgtgcgtgatgtgtcgcgagagtcgcgagcaccggcctcacacagcagtcctcatggagaaggccgcacagccccatcgggaaaagatcctgaatcacctcagtacgctgaggagagatagggacaagattcagggatttcaggcaaagggcgaggccgatattcttgctgcacttaaaaagctgcaggaccagcgtcaatacattgtggccgaatttgaacagggccaccagttcctgcgagagcgcgaggaacacctactggagcaacttgctaaattggagcaggagctcactgaagggagggagaaatttaaatccaggggggtgggagaactggctcgcctcgctctggtcatcagtgaactggagggcaaggcccagcagtag

SEQ ID NO: 29898 - DNA, 1125 bp, synthetic construct
  source 1..1125: mol_type = other DNA; note = Synthetic coding sequence
atggacttcaatatgaagaaactcgcaagcgatgcaggaatattcttcactagggctgttcagttcactgaagagaagttcgggcaggcagagaaaactgaacttgacgcacatttcgagaatctcctggctcgggctgactcaacgaagaactggacggaaaagatacttagacagactgaggtactgctgcagcccaaccctagcgccagagttgaggaattcctgtacgaaaaattagatcggaaagtgccctcccgggtgaccaatggagaactgttagcacagtacatggccgatgccgctagtgaactcggaccaactaccccctatggaaagacactgattaaggttgctgaagcggagaagcaacttggggctgccgaacgtgattttatacacactgcttctatatcctttctgaccccactacgcaacttcctcgaaggcgattggaagacgatttccaaagaacgccgtttgttgcagaatcgtcgcttggatcttgacgcatgcaaggcccgtctgaagaaagccaaagccgctgaagctaaagccacactgtggaacgatgaggtcgacaaagccgaacaggaactgagagtggcccaaactgaattcgatcgacaggcagaggtgactaggctgctcctcgaaggaatctcaagcacgcatgtcaatcatcttcgatgtctgcacgagttcgttaagtctcaaacaacctactatgcgcagtgctatcggcatatgctagacctgcaaaagcagctgggcagattccccggtacctttgtcgggaccactgaaccagctagcccaccgctgtcctctacgagccctaccactgcagcagctaccatgcccgtcgttccaagcgtggcaagcctggcaccgccaggcgaggcaagtttgtgtctcgaggaagtggcccctcccgcttcggggacacgcaaagcgagagtactctacgactacgaggccgcagactcaagcgagctggccctcctcgccgatgaactgatcacagtgtacagcttgcctgggatggaccccgactggctgatcggtgaaaggggaaacaagaaagggaaagttcccgtcacttacctggaactgctgagttag

SEQ ID NO: 29899 - DNA, 1188 bp, synthetic construct
  source 1..1188: mol_type = other DNA; note = Synthetic coding sequence
atggcatctgccgcatccgtcacatcgctcgccgacgaggtgaactgcccaatatgccagggaacccttcgggagccggttaccatcgattgtggccacaacttttgtcgagcgtgcctcacaagatattgtgagattccgggacctgacctggaggaatccccaacctgtccgctgtgcaaggagcccttcagacctgggtcatttaggcctaactggcagctggctaacgtggtggagaacatcgagcgccttcaactggtgtccactcttggtcttggcgaggaggatgtctgccaagaacacggagaaaagatctattttttctgtgaggatgacgagatgcagctgtgcgtcgtatgccgcgaagcaggagaacatgccacgcatacaatgcgattcttggaggatgctgcggctccatatcgtgagcaaatacataaatgtcttaagtgtctgagaaaagagcgtgaagaaattcaggagattcaatccagagagaataaacgtatgcaggtacttctgacacaggtgtctaccaagaggcagcaggttatttcggagttcgcccacctaagaaagtttctcgaggagcaacagagcatccttttagcacagctagaatctcaggatggggatattctgcggcagcgggatgagttcgacctccttgtggccggagagatttgcagattctctgccttgatcgaggaactggaagagaagaatgagaggcctgctcgggagctgctgaccgacatccggtctactctgatccggtgtgaaacaagaaagtgtcggaagcctgtggcagtgtcccctgaactcggacagcggattcgtgattttcctcagcaggccctccccctccagcgcgagatgaagatgtttctcgaaaagctatgttttgagcttgactacgaacccgctcacataagtctcgatccccaaactagccatccaaagctgctcctatccgaggaccatcagagagctcagttctcctacaagtggcaaaacagccccgacaatccacagcgtttcgatcgggcaacatgcgtgctggcccacaccggaattactggcggtaggcatacgtgggtgtggatggcacgcgtgcctggtgacagcggatgctgccagttctgctcgcccccaagcgttttgggaaccgaagttgctgcgtag

SEQ ID NO: 29900 - DNA, 1131 bp, synthetic construct
  source 1..1131: mol_type = other DNA; note = Synthetic coding sequence
atggagaaaaagaaaatggtgacgcagggcaaccaggaacctactaccacccctgatgccatggtccagccttttaccactattccctttccgcctccgccacagaacgggatcccaaccgagtacggagtcccccacacacaggattatgccggacaaaccggagaacataacctaactttgtacggttccactcaggcacatggagaacaatcgagcaattcgccgtccacccagaacggatcactcactacggaaggaggagcccagacggatggccagcagtcccagacacagtcctcagagaacagtgaatctaaatccacgccaaagcggttacacgtttccaatattccctttcgtttccgggatccagaccttaggcaaatgtttggacagttcggcaaaatcttagatgtagaaatcatcttcaacgagcgcggttctaaaggcttcggttttgtcacttttgaaaacagcgccgatgctgatagagcgagagaaaagctgcacggtaccgttgttgagggccgtaagattgaagtgaataatgcgaccgccagggtcatgaccaacaagaagatggtgaccccctacgcaaatggttggaagctttcacctgtggttggcgcagtctacggacccgagctttacgcagcctcatccttccaggctgatgttagcctgggtaatgatgcagcagtacctctgtctggacggggaggtatcaacacctatatcccgctgattatcccaggttttccctatccaacagccgctacaacagctgccgcatttcgaggggcacatctgagaggacggggtaggacagtgtacggcgctgttcgggcagtccctcctacagccataccagcatatccgggagtcgtttaccaggatgggttttatggcgctgacttgtacggtggctatgcagcatacagatatgcccagccagctaccgctaccgctgccaccgccgcagccgcagctgccgctgcttacagtgatggctacggccgtgtttacaccgccgacccttatcacgccctcgcccctgccgcatcctacggggtcggtgccgttgcctcactctaccggggtgggtattccagatttgccccatattag

SEQ ID NO: 29901 - DNA, 1638 bp, synthetic construct
  source 1..1638: mol_type = other DNA; note = Synthetic coding sequence
atgggcaccccttggcgtcccccaagccggcgaccctggcgctggcccaccgggtgcacacgcaagacctgtggtccacccacttggtctttggaaagaacccggtcatggttgtcgggcagggagcatagtgtgttcacaggcgtggccatcgtgcactgttccagtaaagatcaccagctggatacacgggtgagcgaattttacgaagagacaaaggtgaagttttctgagctctcagaagaactgttgtgggagtacgtgcattccggggaaccgatggacaaggccggaggctacgggatccaggctctcggaggaatgctggtggagtccgtccacggtgatttcctgaacgtagttggcttccctctcaaccacttttgcaagcagttggttaaactctattatccgcctagacctgaggacctgcgcagatccgttaaacacgacagcatccctgcggctgatactttcgaggacctgtctgacgtcgagggtggtggttcagagcccacacagagggacgcgggttctcgggatgagaaggccgaagcaggggaggctggccaggcaacagccgaggccgagtgtcatcggacccgtgagacccttccccctttccccactcggcttctggagctaatcgagggctttatgctcagcaagggtcttctcacggcatgtaaactgaaagtttttgatctgctgaaggacgaggccccacagaaggctgccgacatcgcatccaaagttgatgccagtgcttgcggtatggaaaggttgctggacatctgtgcagctatgggactgttagaaaagacagagcagggatattccaatacagaaaccgcaaacgtttacctggccagtgatggcgagtacagccttcatgggtttatcatgcacaacaatgacctgacttggaacctgtttacatatctggagttcgcaatcagggaaggcaccaaccagcatcacagggccctgggtaagaaagcagaagatttgtttcaggatgcatattaccagagccccgagacaagattgcggttcatgcgggcaatgcacgggatgacgaaactcacggcttgtcaggtagccacagccttcaatctgtccaggttctctagcgcttgcgatgtcgggggttgcaccggtgctcttgccagggagctcgccagggagtatcccaggatgcaggtgaccgtctttgatctgcctgacattatagagctggctgcccacttccagcctcctggccctcaggccgtgcagatccacttcgctgcaggggacttcttccgcgaccctctgccaagcgcggaactgtacgttctctgtaggatccttcacgattggccagacgataaagtgcacaaactcctgagccgcgtggccgaatcttgcaagcctggcgcaggcctgctgctggtggagacactgctagacgaagaaaaaagggtggctcagagggctctcatgcagtctttgaacatgttggtacagacagaaggtaaagaacgatcactgggcgaatatcaatgccttctggagctacatgggttccaccaagtccaagtcgtacatctgggaggcgtgctcgatgccatactggctacaaaggtcgctccatag

SEQ ID NO: 29902 - DNA, 621 bp, synthetic construct
  source 1..621: mol_type = other DNA; note = Synthetic coding sequence
atgagtcagacttccctgaagcagaaaaagaatgaaccgggaatgcgaagctcgaaagaatcactggaggccgaaaagagaaaagagagtgataaaactggtgtaagattgtccaatcagatgaggcgcgctgtcaatcccaatcactctttaagatgctgccccttccaaggccattcctcttgtcgtagatgtttgtgtgccgcagaaggaacggctctcgggccatgtcatacaatccggatctacatccatatgtgtctgttgtgggaacaaggtcagcagattacgatgatgagagtatctcgcgaccataccacggacagcggcggagagcctcagactacatgggggtctcaggagtcctctctgcggaagacagacagtcgaggatacctggtccgcagccagtggtcccgaattagcaggtctccctctacaaaagctcctagtatagatgagcccaggtccagaaataccagcgcgaaacttccgagctccagtacatcgtccagaaccccaagtacctccccctctcttcacgatagcagtccgccaccacttagcggacagccctccctccagccccctgcatctccccagctcccaagatccttatag

SEQ ID NO: 29903 - DNA, 414 bp, synthetic construct
  source 1..414: mol_type = other DNA; note = Synthetic coding sequence
atggcaccaggtacccccaagagtctgttacttagtgcttccataaagcgcgagggcgagtccccgaccgctagccctcattcctccgccacggacgacctgcatcacagcgataggtatcagactttcttacgtgtgagagctaaccgccagactagactgaatgcgaggatcggcaagatgaagagaagaaagcaggatgaggggcaagtgtgtccgctatgtaatcgtcccctggccggatctgagcaggaaatgagtagacacgtggaacattgcctcagcaagagagaaggaagttgcatggcagaagacgatgctgtcgacattgagcacgaaaacaataacaggtttgaggaatatgaatggtgtgggcagaagcgcatcagagccaccaccctgctggaaggttag

SEQ ID NO: 29904 - DNA, 570 bp, synthetic construct
  source 1..570: mol_type = other DNA; note = Synthetic coding sequence
atgatacctatttgcccagtcgtgtccttcacgtacgtccccagccggcttggcgaggatgccaaaatggcaactgggaactactttggttttacccacagcggcgctgcggctgctgctgctgcagcccagtatagccagcagcctgcctccggggtcgcttatagccacccaacaacagttgcgtcctatacagtgcaccaggcaccagtggccgctcacacagtgacggccgcttacgctcctgccgctgccactgtcgcagtggcgagacccgcacccgtggctgtggcggcagctgccacggctgccgcatacgggggttatcccaccgctcacaccgcaaccgactacggctatacccaaaggcagcaggaggccccaccccctccgccaccggctacaactcagaactatcaggactcatacagctacgtgcggagcacagctccagctgtggcctacgacagtaaacaatactaccagcagcccgctgccacagaggcaggttcgagttccagctgctgttgctgttgtaacagctgcctggatagggaccatctctattag

SEQ ID NO: 29905 - DNA, 387 bp, synthetic construct
  source 1..387: mol_type = other DNA; note = Synthetic coding sequence
atggacgctgacagtgacgttgccttagacatcctgattaccaacgtggtctgcgtgttccgaacaagatgtcacctaaatttgcgaaagatcgcgctcgaaggggcaaacgtgatctataagagggatgtcggtaaagtactgatgaagctgaggaaacccaggataacggccactatctggtcgtctggcaaaatcatctgtactggagctacgtctgaggaagaggctaaatttggagccagacgcctggccaggagcctacaaaagcttggctttcaggtgatctttactgacttcaaagtggtcaacgttctcgcagtgtgcaatatgccatttgagatccgacttccagagttcactaaaaataataggccgcacgcgtag

SEQ ID NO: 29906 - DNA, 381 bp, synthetic construct
  source 1..381: mol_type = other DNA; note = Synthetic coding sequence
atgtggaccgcaaggggtccttttcgtagagataggtggtcatcggaggacgaagaggcagcgggaccatcccaggccctgtccccactactgagtgacactcggaagatcgtgagcgaaggagagctggatcagctcgcgcagattcggccactgatatttaacttccacgaacaaactgctataaaggactgccttaaaatacttgaggaaaagactgccgcttacgatataatgcaagagttcatggcacttgagttgaagaacctgcctggggaatttaactctggaaaccagcctagcaaccgggagaaaaatcgttatcgtgatattcttccttttcagcaccacggttactccggccctaacgagaggacttag

SEQ ID NO: 29907 - DNA, 912 bp, synthetic construct
  source 1..912: mol_type = other DNA; note = Synthetic coding sequence
gaagatgagtatattcagagccacaactttgattctgctatgaaagtgacctcacaaggccagcccagccctgtagagccccgaggcccattctacttttgcagactgctactcgacgatctggggatgaactcgtgggatcggaggaagaattttcacttacttaagaagaattctaaactcctccgcgaacttaaaaatctggacagtcggcaatgccgggaaacccacaagatcgcagtgttctacattgccgaggggcaggaagacaagtgttcaatcctgtccaatgaaaggggctcacaggcttatgaggattttgttgctggcctgggctgggaagtagacctgagtacccattgtgggttcatggggggtttgcagcggaatgggagcactgggcagaccgccccttactacgcaacctccaccgtggaggtgatctttcatgtctcaaccagaatgccttcagattcagacgactcactcaccaaaaaactgcgacacctggggaacgatgaagtacacattgtatggagcgagcattctagggactatcggaggggaatcatccctaccgcatttggcgatgtgtccatcatcatctaccctatgaagaaccacatgtttttcatagccatcaccaagaaacctgaagttccctttttcgggccacttttcgatggtgcgattgtgagtggcaaattactcccaagtctggtgtgcgccacatgcatcaatgcctctcgggctgtgaaatgccttatacccctctaccagtccttttacgaggagcgggctctctacctcgaagcaattatccagaatcaccgcgaagtcatgacctttgaggatttcgctgcccaggtgtttagcccatcgccgtcgtattccctgtctggtacagattag

SEQ ID NO: 29908 - DNA, 2883 bp, synthetic construct
  source 1..2883: mol_type = other DNA; note = Synthetic coding sequence
atggaggtgcaagttagccaagccagccttgggtttgagctcacgtcagttgagaagtctctgcgagaatggagtcgcctgtcacgagaggtcatcgcgtggctgtgcccctcttctcctaatttcatattgaactttcctcctccgccatctgcctccagtgtgagtatggtccagttattcagctcgccctttgggtatcagagtccctcaggacattccgaagaagagcgggaggggaacatgaagagtgccaagcctcaggtgaaccatagccagcacggggaatcacaacgcgctctgagcccactgcagtccaccctgtcatcagccgcaagcccgagccaggcctacgagacctatatcgaaaacggtctgatctgcctcaagcacaagattcgtaacatagagaaaaaaaagctcaagctggaagactacaaggatcgcctaaagagtggcgaacatctgaatcccgatcagttagaagccgtggagaagtacgaggaggtgctccacaatctcgagttcgcaaaggagttacagaaaaccttcagtggactttcactcgatctcttgaaggcgcagaaaaaagctcagcgacgggagcatatgctgaagttggaggcggagaagaagaagttgagaactatccttcaggttcagtacgtgctgcagaatctgacacaagagcacgtgcagaaagacttcaagggcggtctgaacggagcagtttatctgcccagcaaagaacttgattatctcatcaagttttccaagctaacatgcccggagagaaacgagagtctgagcgtggaggaccagatggagcagagctcactgtacttctgggacctgctggaaggctccgagaaagcagtggtaggtaccacctacaaacacttgaaagatttactttccaaactgctcaatagcggatatttcgaatcgatcccggtgcctaagaacgccaaggagaaggaggtacctctggaggaggaaatgctgatccagtctgaaaagaagacccagttgtccaagaccgaaagcgtgaaagaaagtgagagcctaatggaattcgcccagcctgagatccaaccacaggaatttctgaatcgcaggtatatgaccgaagtggactacagtaataagcaaggagaggaacagccgtgggaggcagactacgctcgcaaaccgaatctcccaaaacggtgggacatgctcaccgagcctgacggccaagaaaaaaagcaagaaagctttaaatcatgggaggcgagcggaaaacatcaggaggtgtccaagcctgcggtctcattagagcagcggaagcaagatacaagtaaactgagaagcactctgccggaagaacagaagaagcaggagattagtaagtctaagccaagcccgtctcagtggaagcaagatactccaaagagtaaggccggttacgtacaggaggagcaaaagaagcaggaaacccccaaactttggccagtgcagctccaaaaagagcaggacccgaagaagcagactcctaagagctggacaccttctatgcaaagtgaacagaacactacaaagagctggactacgcccatgtgcgaggagcaggactccaaacagcctgaaactccgaagagttgggagaacaatgttgagagccagaagcacagtctgacttctcagagccaaatctcaccaaagtcatggggcgtcgcaacagccagcctgatcccaaatgatcaactcctgccacgcaaactgaatacggagccaaaagacgtcccaaagcccgtgcaccagccagtcggttccagttctactctgccgaaggaccctgtgctgagaaaggagaaacttcaggatttaatgacccagattcaaggcacttgcaatttcatgcaggaatccgtcctggattttgataagccctcatctgcaatccccacctctcaaccgccatccgcaacacctggctccccagttgcatcaaaagagcagaatttaagttcccaaagtgatttcctccaagaacctctgcaggctacttcatccccggtgacctgcagctcaaatgcttgcctggtaacaacggaccaagctagttcaggcagcgagacagaattcatgacttccgagacaccagaagccgctatccctccaggaaaacagccgagctctctagcctcccccaatccacccatggcaaaaggtagcgagcagggctttcagagccctcctgctagtagcagtagcgtgacgatcaacactgccccttttcaggcaatgcaaacggtgttcaacgtcaatgcgccactgccgcctcgaaaagagcaggaaataaaagaaagtccttattcccctggctataatcagtcctttaccacagcctccactcaaactcccccacagtgtcagcttccatccatccacgtggagcaaaccgtgcatagtcaggaaacagctaactatcatcccgacggtacgatccaggtgtcaaatgggagccttgcattttaccccgctcagactaacgtttttccacggccaacacagccgtttgtgaacagcaggggatccgtacgcggatgcacgagggggggtcgtttaatcaccaatagctaccggagtccaggaggttataagggctttgacacctatagaggcctacctagtatctccaacggaaattacagccagctgcagtttcaggctagagaatattctggggctccatattcccagagggacaatttccagcagtgttacaagaggggtggaaccagtgggggtccacgtgccaactcccgagccaattgtttcatcatgcgaaacagccttctgctgatcaagcagcaaggaggagtgatcttgcttcgttag

SEQ ID NO: 29909 - DNA, 1746 bp, synthetic construct
  source 1..1746: mol_type = other DNA; note = Synthetic coding sequence
aacaacaacggaacatacgatggtatagcgtacttcgaatgtaaagaaaagcacggtatatttgcgccaccccagaagatcagccacatcccagaaaatttcgacgattacgtcgatattaacgaggatgaagattgctattctgacgaacgataccagtgttataatcaggaacaaaacgataccgaagggcctaaagaccgcgagaaggacgtgtccgaatatttttacgagaagtccttaccctccgtaaacgacattgaggcatccgtcaacagaagtaggagcctgaaaatagagacagataacgttcaggatatttctggggtgcttgaggcccatgtccatcagcagtcctcagtggattctcagattagcagtaaggagaataaagacttaattagtgatgccacagagaaggtctctatcgctgccgaggatgatacattggacaatacattttctgaagagctggagaaacaacagcaattcacagaagaggaggacaatctatacgcagaggcttccgagaagctttgtactcccttacttgatctcctaaccagagagaagaatcaactggaagcacagctgaagtcatcactcaatgaagaaaaaaaatccaagcagcagctggaaaagataagtttactgaccgacagcctgttgaaggttttcgtgaaggatacagtgaatcagctgcagcagattaaaaagacaagagatgaaaaaatccagctttctaatcaggaattactgggcgatgatcagaagaaagtcacaccacaagatttatctcagaatgtggaagaacagagcccaagcattagcggctgtttcctgagctccgagctggaggatgagaaggaggaaatctcatcccccgacatgtgccccaggcccgagtcacctgtcttcggtgccagtggacaggaggagctggccaaacgtttagccgagctcgagctgagtagggagttcctgagcgcactgggagatgaccaggattggtttgacgaagacttcggcctaagctccagccataaaatacagaagaataaggccgaggaaaccatcgtaccactcatggctgagcccaagagagtaacgcagcagccttgtgagacactccttgccgtgcctcacaccgccgaggaagtcgagattttagttcacaatgcagccgaggagctctggaagtggaaagagctggggcatgacctgcactcaatttctatcccaaccaaattattgggttgcgcatccaaaggactggatatagagtctacctccaaaagggtgtacaaacaggctgtcttcgacctcaccaaggagatttttgaggagattttcgcggaggatccaaatctgaatcagcccgtatggatgaaaccttgtcgaattaattcgtcttattttcgcagggtgaagaatcccaataatctcgacgagattaagtccttcattgcatcagaggttctgaaactgttctccttgaaaaaggagccaaatcacaaaaccgactggcagaaaatgatgaagttcggacggaagaagcgcgatagggtggaccacatcctcgtccaggagttacacgaggaagaagcacagtgggtgaactacgacgaggatgagctgtgcgtcaaaatgcaactagctgatggtatcttcgaaactctgattaaggatacaattgacgtgcttaaccagatatctgaaaagcaaggcaggatgttgctagtgtag

SEQ ID NO: 29910 - DNA, 345 bp, synthetic construct
  source 1..345: mol_type = other DNA; note = Synthetic coding sequence
atgtggagcctgactgcttctgagggggagtccacgacagcccacttctttcttggtgccggagacgaaggattgggaaccagggggatcggcatgagacccgaggagtctgattccgaactgctggaggacgaggaggacgaggtaccccctgaaccgcaaataatcgtcggcatatgtgcaatgacaaagaagagcaagagcaagcccatgactcaaatcctggaaagactctgccggttcgattatctaactgtggtgattctcggggaggacgtgatattaaatgagccagtagagaattggccatcctgtcactgcctcatctcattccattccaaatag

SEQ ID NO: 29911 - DNA, 918 bp, synthetic construct
  source 1..918: mol_type = other DNA; note = Synthetic coding sequence
atggaagcagaaagctttccctgtctgttgaggccatttttcaaggaaagatcctgcgcacttcggccagcttttcatactgccaaatgcgagaaacttcagaaagagaaggaggaattagagcggaggttcgaagccgaaatggcacgcctacaggaggaacatggtgaccagcttctgtccatacgatgtcagcaccaggagcaggtggaggaccttactgcctcgcatgacgccgcactgctggagatggagaacaaccacaccgtggccattacaatacttcaggatgatcacgatcataaagtgcaagaactcatgagcacgcacgaactggaaaagaaagaattggaagagaacttcgagaaactccgcttgagcctccaggatcaggtcgacactctgacctttcaatcccagagcctcagggaccgcgcaagacgtttcgaggaggccctgcggaaaaacacggaggagcagctcgagatcgctctggctccttatcaacacctggaggaagatatgaagtcactgaagcaagtgcttgagatgaagaatcagcagattcacgagcaggagaagaagatcctggagttggaaaagctggctgaaaagaacatcatactcgaagagaagatacaagtgctccagcagcagaatgaggatctgaaagcccgaatcgaccaaaatacagttgtgactaggcagttgagcgaggagaatgctaacttgcaggaatacgtggagaaagaaacccaggaaaagaaaaggctatctcgaactaacgaggaactgctttggaagctccagacgggtgaccccacctcccctattaagttatcgcccacatcacccgtgtacagaggcagttcatccggccctagctcccccgctagagttagcactacccctaggtag

SEQ ID NO: 29912 - DNA, 2319 bp, synthetic construct
  source 1..2319: mol_type = other DNA; note = Synthetic coding sequence
atgcaggaacttgaagagttacggaaacagctcggaagcgtcgctacaggttctactctccaacagagtctcgagctgaaaagaaaaatgctaagggacaaacagaacaagaagaactccggccagcatttgcctatattccctgcgtgggtttacgagcgccctgctctgattggcgacttcttgatcggtgccggtatttccacagacaccgcgctgcccattgggacgcttcccctggctagtcaggagtctgcagtcgtcgaggatctgctctacgttctagtgggggtcgatggcaggtatgtgagtgcgcagccgctggctgggagacagagtcgaaccttcctggtcgaccccaatctggatttgagcattagagaactagtacaccgtatcctgccagtggctgcgtcatattctgccgtcacgaggtttatagaagagaaaagctcattcgagtacggtcaagtaaatcatgctctagccgcagcaatgcggacactcgtcaaagagcacctgatcctcgtcagtcagctggagcagcttcatagacaggggctcttatctttgcagaaactttggttctacattcagcccgcaatgcgcactatggatattctggcttctctagcgacttcagttgacaaaggcgagtgcttggggggatcaaccctttcccttctccacgaccgtagcttttcatatactggcgattcccaggcccaggaactttgtctttatctgacaaaggcagccagcgccccatactttgaagtgttagaaaaatggatctaccgaggtattatacacgacccttactccgagtttatggtggaggaacacgaacttagaaaagagcggattcaggaagactacaacgacaagtattgggaccaacgttacacaatcgtacaacagcagattcccagcttcctgcaaaaaatggcagacaaaatcctctcaaccggcaagtatttgaacgtggtgcgagaatgcggccatgatgtcacttgtcccgtggccaaggaaatcatttacactttgaaggagagagcctacgtggagcagatcgagaaggccttcaattatgcttctaaggtgctgctggattttctgatggaggagaaagagctggtggcccacctgaggtctatcaagcggtactttctgatggaccagggagactttttcgtccacttcatggacctggccgaagaagagttgcgaaaacccgtggaggacatcactcccccaaggctcgaggccctcttggaactggccctcaggatgagtacggccaacaccgatcctttcaaggacgacctgaaaattgacctaatgccacacgacctcataacccagttgctccgggtgctcgccattgagacaaaacaggaaaaagccatggctcacgcggaccctaccgagctggcactttctgggttagaagccttcagcttcgattacatagtaaaatggccattgtctctgattattaatcgaaaagccttgacgagatatcaaatgctgtttaggcatatgttttactgtaagcatgttgagcgtcagctttgttcagtatggattagtaacaaaactgccaaacagcactcactgcactctgcacagtggtttgccggagcttttacattgcggcagcgcatgttgaacttcgttcagaatattcagtattacatgatgttcgaagtgatggagccgacctggcacatcctcgagaaaaatctgaagagcgcaagtaacattgacgacgttcttggccatcacaccggattcctcgatacatgtctaaaagattgcatgctgaccaaccctgaactccttaaggtgttctctaagttgatgtctgtctgtgtgatgttcaccaactgtatgcaaaaatttacccagagtatgaaactggacggcgagttgggtggacagaccctggaacacagtacagttctgggcctcccagcaggcgcagaggagagggccaggaaagaactggctagaaagcacctggccgagcatgccgatacagtgcaacttgtcagcgggttcgaggccacgattaacaaattcgacaagaacttcagcgcacatttgctggatttgctagccagactgagcatctatagtacgagtgattgcgagcatggcatggcatccgtcatttcgcggctggacttcaacggcttttacacagaaagactcgaacgcctgtcagcagaacgctctcaaaaggcaaccccccaagtccctgtgttgcgaggccctccagcgccagcgcctcgggtggccgttaccgcacagtag

SEQ ID NO: 29913 - DNA, 1203 bp, synthetic construct
  source 1..1203: mol_type = other DNA; note = Synthetic coding sequence
atggactttaatatgaaaaagctggcatccgacgccggtatcttctttacacgggctgttcaatttaccgaagagaagttcgggcaggctgaaaaaacggaactggatgcacattttgaaaatctattggctagggccgattctacaaagaactggaccgaaaagatcctgcgccagactgaagtgctcttacagcctaatccatccgccagggtcgaagagttcctatatgagaaactcgacagaaaggtgccttcacgcgtgaccaacggggagctactggcccagtatatggccgacgccgcatcagagctgggaccaacaaccccttatgggaaaacgcttatcaaggtggcggaggctgagaagcagctgggcgcagccgagcgggacttcattcatacggcttccatttccttcttaacccctctcagaaatttcttggagggcgactggaaaactatctctaaagagaggaggctcctccaaaatcgaaggttggatctggatgcctgcaaggcccgtttgaaaaaggcgaaagccgctgaggccaaggcaaccaccgttcctgattttcaagagacccggccacggaactacatcctctccgcctcagctagtgccttgtggaacgatgaagttgacaaagctgaacaggaactgcgcgtggctcagaccgagttcgataggcaggcggaggtgacgcgcttgttattggaaggcatttcctccactcacgtcaaccaccttcgatgcctccacgagttcgtgaagtcccagaccacctactacgcccagtgttaccggcacatgcttgacctccagaagcagttgggcagcagccagggcgcaatcttcccagggacctttgtgggcactacagagcccgcatctcctcccctgtcaagcacttcaccgactacggctgcagcaacaatgccagtagtgccaagcgtagcctccctggctccacctggtgaggcctccttatgcctggaagaggtggcaccccctgcgtccgggacacgtaaggcaagagtcctgtacgactatgaagcggcagactcgtctgagctggcccttctggccgatgagttaatcactgtgtacagcctgcctggaatggacccagattggctcatcggtgagcgtggcaataagaaagggaaggtcccagtcacctaccttgagctgctgagttag

SEQ ID NO: 29914 - DNA, 1827 bp, synthetic construct
  source 1..1827: mol_type = other DNA; note = Synthetic coding sequence
atgcctttttggcctatcagatgtttgaaaaggagtagacgcatgccaaggggcggtgcaggagagcgggagaaggtgcctgcaaaccctgaggcactgctgttgatggcctcttcacaacgcgacatggaagactgggttcaagcaatacgtcgggtcatatgggctcctttaggcggaggtatatttgggcagcgcctagaagagactgttcaccatgagaggaaatacggccctaggctggccccacttctcgtggagcagtgcgtcgattttattcgagaacgcggacttactgaagaggggttgttccggatgcctgggcaggctaatctcgtaagagatctgcaggattctttcgactgtggtgagaagcccctgttcgacagcacgacagacgtccacacggtggcatcactgctgaagttgtatcttcgcgagttacctgagccagtggttccatttgccaggtacgaggatttcctgtcttgtgcccaactgctaaccaaagacgaaggagagggcaccctggagcttgcgaagcaggtatcaaacctgcctcaagctaattacaacctgctaagatacatatgtaaatttttagacgaagtgcaggcctactccaacgtgaacaagatgtctgtgcagaacctggccaccgtgtttgggcctaatatactgcgtccccaagtggaggatcctgttaccatcatggagggaacaagtctggtccaacaccttatgacggtgctcataaggaagcacagccagttattcactgcccctgtccctgagggacccacgtccccccgtgggggactccagtgtgctgtgggctggggttctgaggaggtaactcgcgatagccagggcgagccgggaggcccagggttgcctgctcatcgcacctcaagtctcgatggcgctgcagtggctgtcctctctagaaccgccccaaccgggccagggtcgcggtgcagcccgggtaaaaaagtccaaacactaccctcgtggaagtcaagtttcaggcagccgcgaagcctgtctggttctcccaagggcggaggctccagcttggaggttcctattatttctagcggagggaattggctcatgaacggactgagctctctgagagggcatcggagagcatcaagtggagacagactgaaggacagcggttcggttcagagactgtcaacctatgacaacgttccggctcctggccttgttccgggaattccgtccgtcgctagtatggcttggtccggcgcttcttcgtctgagtccagtgtgggaggaagtctgagctcctgcactgcttgtcgcgcttcagactcctcagctcgctcttctctgcacaccgattgggcactcgaacccagccctctcccaagttcctcggaagatccaaaatctctggatctggatcattcaatggatgaagctggagcaggagcttccaatagcgagcccagcgaacccgactcccctacacgggaacatgctcggaggtcagaggccctgcagggactggtaaccgagctgcgggcagagctctgcagacagaggactgaatacgagagaagcgtgaagcgaattgaggaagggtctgccgacttgcgcaaacggatgtcgagactagaggaggagctggaccaggaaaagaagaagtatattatgcttgaaattaagcttagaaattcagagagagcgagagaagatgccgaaaggcgcaaccagctcctgcaaagagagatggaagaattttttagtacactgggctctttgaccgtgggggctaaaggagccagagccccaaagtag

SEQ ID NO: 29915 - DNA, 708 bp, synthetic construct
  source 1..708: mol_type = other DNA; note = Synthetic coding sequence
atgtttagcgaagaatgcattatggatgtgattggatgtctcgaatacgatcccgcattgagtcagccccgtaaacaccgggagttcctcacaaagacggctaaatttaaagaagtgatcccaatctccgaccccgaactcaagcagaaaatccaccagacatatagggtgcagtacatccaagacatggtgcttccaaccccgtccgtctttgaggagaacatgctatctactctgcattctttcatcttctttaataaagtcgagattgttggcatgttgcaagaagacgaaaaatttctcaccgaccttttcgcccaattgactgatgaagccacggacgaggagaagagacaggaactagtgaattttctgaaggagttttgtgctttttcacagaccctgcagccccagaacagagacgcctttttcaaaaccctgagtaatatgggtatcctgcctgctctcgaggtaatcttgggaatggacgacacccaagtccgttccgctgcgaccgacattttctcctatctcgtggaatacaacccctccatggtccgggaattcgtgatgcaggaggcccagcagaatgatgacgtgtcgaagaaactcaccgagcagaaaatcacctcaaaagttaacatcatctgtacgaactccaaatatctgtatattggctcttataactgtttctactactctttttag

SEQ ID NO: 29916 - DNA, 3513 bp, synthetic construct
  source 1..3513: mol_type = other DNA; note = Synthetic coding sequence
gtgtacaagggaaggcatgtaaagacggggcaactcgctgccattaaggtgatggacgtaactgaggatgaagaagaggagatcaagctggagattaatatgttaaaaaaatattcacatcatagaaacatcgctacttattacggagctttcattaagaagagcccccctggccacgacgatcagttatggctggttatggaattttgtggtgcagggtcgattactgacctggtgaagaacaccaaaggcaatacattaaaagaggattggattgcctacattagcagagagatcctgagaggcttagcgcatcttcacattcaccacgtgatccaccgggacattaaaggtcaaaatgtgctgctgactgaaaacgctgaagtgaagcttgtcgactttggagtgagcgcacagctcgaccgtacggtcggaaggcgcaatactttcatagggacaccatactggatggccccagaagtgatagcgtgcgacgagaacccggatgccacctacgactaccgctccgatctctggagctgtggaataaccgctatcgagatggcagagggagcccctccattatgcgatatgcaccctatgcgggctctcttcttaataccgcgaaatccccctcccaggcttaagtccaagaaatggagtaaaaaatttttcagctttattgagggctgtctggtaaaaaattatatgcagcgcccttccacagagcagctgttgaaacatccgtttattcgcgaccaaccaaacgagcgccaggttcgcatccagctgaaagatcacatagatagaactagaaaaaaacgcggtgagaaggacgagacagaatacgaatactcaggctctgaagaagaagaggaggaagttcccgaacaggaaggcgagccatctagcatcgtaaatgtaccaggcgagagcactttgagacgcgacttccttaggttgcagcaggaaaacaaggaacgttcagaggccttaagaagacaacagcttttgcaggagcagcagctgagagagcaggaagagtacaaaagacaacttctggccgaaaggcagaagcggatcgaacagcaaaaagagcagcggcgaaggctggaggagcagcagcgaagagaaagggaagctcggaggcagcaagagcgcgagcagcggcgacgtgaacaagaggaaaaaaggagactggaagagttggaaagaaggcgcaaggaagaggaggagcggcgtcgggcagaggaggaaaaaaggcgcgttgagagggagcaggagtacatccgcagacaactcgaagaggaacagcgtcatctggaggttctccagcagcagctgctgcaggaacaagcaatgcttctgcacgaccatcgacgccctcacccacaacattctcagcaaccaccgcctccccagcaggaaagatctaaaccatcctttcacgctcctgaacccaaggcccattatgaacccgctgatagagcccgagaagtggaggacagatttcgcaagactaaccacagctcccccgaagcccagtcaaaacagacagggagagtgctcgagcctccagtgccatctaggagtgaaagtttctccaacgggaatagtgagtccgtccatcctgcgctgcagagacccgctgaaccacaggtccctgtgcgcacaacttcaagatctccggtcctgtcacggagggattcaccactgcagggcagcggacagcaaaatagccaggctggtcagcgtaattctacatcaattgagccaaggcttttgtgggagcgggttgagaagctggtgcctcgcccaggctcaggatcgagctctgggtcaagtaattccggctcccagccgggtagccatccaggttcccagtccggcagcggcgagagattcagggtcaggtctagtagcaaaagtgagggaagccccagccagcggctcgaaaacgcagtaaaaaagcccgaggataaaaaggaggtgtttaggcctctgaaacccgctgacctgacagctctggccaaggagcttagggctgtagaggacgtacgccctccacacaaggtaaccgactactcttccagtagcgaggagtctggaactaccgatgaggaggatgatgacgtggaacaagaaggtgccgacgagtctacctccggccctgaggatacgcgtgcagcgagttcccttaaccttagcaatggggagaccgagtctgtgaaaacgatgattgtgcacgatgatgttgagtccgagcccgctatgacgccgtctaaagaaggaacactgatcgtgcgccagacccagtctgcttcctctacactgcagaagcacaaatcctctagttcctttactccttttatcgacccacggctgttgcagatttccccctcgagtggaactactgtcacctcggtggtaggcttctcttgtgacggaatgcggccagaggccattcgccaggacccaactcgcaaaggctccgttgttaacgtgaaccccacaaatacacgaccccaatccgatacaccagagattagaaaatacaaaaagagatttaactccgaaatcctttgcgctgccctatggggagtgaatttgcttgtgggtacagaatcaggcctcatgcttctggatcggtcggggcagggaaaagtttaccccttaatcaatcgcagaagattccagcagatggatgttttggagggcctgaacgtgctggtgacgattagtggtaaaaaggataagcttcgagtatactacctcagctggttgcggaacaaaattctgcacaacgatcctgaggtggaaaagaaacagggatggacaacggtgggggatcttgagggatgtgtgcactacaaagttgtcaagtacgaaagaattaaattccttgtgatcgccctcaaatcatccgtggaggtctatgcctgggctccaaaaccatatcacaaattcatggccttcaagtcgttcggagagttggtccataaaccgctgctggtcgatcttaccgtggaagagggtcaacgattaaaagtaatctacgggagctgtgccggttttcatgccgtcgacgtggatagcgggtcagtgtatgacatatatctcccaacccatattcagtgctccatcaaaccccacgccatcatcattctacctaataccgacggcatggaactgcttgtttgttacgaggacgagggggtctatgtgaatacctacggacgtatcacaaaagacgtcgtgctacaatggggtgaaatgcctacaagtgtggcttacatacggtccaatcaaactatgggctggggcgaaaaggctatcgagatacgcagtgtggagaccggtcacctcgatggagtcttcatgcacaagagggcccaacgactcaagtttctgtgtgaacggaacgacaaagtgtttttcgccagtgtgcggtccggcggatcatcgcaagtgtatttcatgaccctgggtcgaacatcgttgctttcatggtag

SEQ ID NO: 29917 - DNA, 1476 bp, synthetic construct
  source 1..1476: mol_type = other DNA; note = Synthetic coding sequence
gtaatcattcaccgagtgctggaaaaacaggaagtcgaggtcttctaccccgactttggcaacattggcatagtgcaaaaatcaagccttcgcttcctgaaatgctgctataccaaactacctgctcaggccatcccctgcagcctggcatgggtgcgacccgtcgaggagcattggacaagtaaagctattttgcaatttcagaagctgtgtggcctgaagccgctggtgggggtggtcgatgagtacgtcgacggcatcttgaacattttcctgtgtgatactagctcaaacgaagatgtttatttccatcacgtcctcaggactgaaggacatgccatcgtgtgtagggaaaatatcagcagcaagggcttttcagagctaaatccattggcactgtacaccacaagctctgggggacccgaggatatagtactaactgagctggggtaccccagtcaacagcactatttcaacgaggaccgcaagattagcccccagagcaaggaatcagaactgaggattctgcaggatattaacgatgagaagtcgctctcgcacctgaaatccgaatccaaggagccacttaaggactcagaattcgaatcactgaagacttgtaataaatcctttgaagaggaccctaagtggagcaaccccgaacctaacgatctgaaggaagagaacgaagatgaaattccaactggcatgccctgcctcgaatccgtgacgatcggcgatgatatttgggatgaaaattggctgccactgcaggccaagatgggcaaggggggtgacgccgcttctcacctgtttacagcctctctcggcggaaaaaaccaatacagttcctgtaaagagatgccccagaaggactggtgtttctctacccccaaggacacctgggacgactcttggcagccttcaggactcgtaaacggaaccaaagtggaggtccataaacccgaggtcctgggcgcacaggagaaaaacacgggtacaaatcgcacccagaaacaacttgatatcaacggctcctccgactccagcacccttcccaagttggaagaattttgcacctccttaacgcagagcgaacagagtgccgacggtagccagtccgagcctaataattcacagacccagcccaaacaaattcaactcagtacagcagccccttgcagtacaacagccgtggacgattccgccgagaagcccagcgggagtgtggagtcttccccggagatcctgaaaaacgaagatttttcctcaagccgagcaattactctttacaaggacaagcggcaggaaagcgtcgaccagctatctctcatcttgtcctacgaatgtcagatctcccaaaaactgtatatccccaggagtacagccacagccgcattgggagccgcagctaggctcgccactagccggtccttgcttcattggtatcctagtgtaaaaaggatggaagcttag

SEQ ID NO: 29918 - DNA, 426 bp, synthetic construct
  source 1..426: mol_type = other DNA; note = Synthetic coding sequence
atgcctaccacctccagacccgcattagacgtgaaaggcggtacctctcctgctaaagaagatgccaaccaggagatgagcagtgtggcatattctaacttggccgtaaaggatcgcaaggccgtcgccattctccactatccaggagtggcatctaatgggacaaaagcctccggcgctcccacatccagcagcggcagccccatcggctctccgactactactccacccacaaaacccccatcttttaatctgcacccggcacctcacctgctcgcctctatgcacctgcagaagctaaactcccagtaccagggtatggcagcggctacccccggtcagcccggtgaggcagggccactgcagaactgggactttggcgctcaggccggaggagcagagtctctgtctcctagcgcgggatag

SEQ ID NO: 29919 - DNA, 1188 bp, synthetic construct
  source 1..1188: mol_type = other DNA; note = Synthetic coding sequence
atggcctccgctgcttcagtcaccagcctggcagatgaagtcaattgtcctatttgtcagggcactctgcgtgaaccagttacaattgattgcggtcataacttttgcagagcctgcctgaccaggtactgtgaaatccccggtcctgacctggaggaaagtcctacctgcccactctgtaaagagccatttagacctggttcattccgccctaattggcagcttgcaaacgtggtcgagaacatagagagacttcaattggtcagtaccttaggccttggggaagaggatgtctgccaggagcatggggaaaagatctatttcttctgtgaagatgacgagatgcagctgtgtgtggtgtgccgagaggccggagaacacgccacccatactatgaggttcctcgaagacgccgctgccccatatcgcgaacagatccacaagtgcttaaaatgtctgcggaaagagcgcgaggaaatacaggaaattcagtcccgcgagaataagagaatgcaggtgcttctgacacaggtgtccaccaagcgccagcaggtgatttccgaatttgcacacctccgaaaattcttagaggagcagcaatctatcctcctggctcagctggagtcacaggacggggatatcctgcgccagcgagatgaatttgatttgctggtggcaggcgagatctgccggttctcggcccttattgaggaactcgaagaaaagaatgaacgcccagctcgagaactgctaaccgacattcgctccaccctcattagatgcgaaacccgcaaatgccggaagcctgtcgcggtgtctcccgagctgggacaacgtataagggatttcccacagcaggctttgcccctgcagagagagatgaagatgtttctggagaagctgtgcttcgagttagattacgaacctgcgcatatcagccttgacccccagacttcacaccctaaactcctgttatccgaggatcaccagagggcgcagttttcctacaagtggcagaactcccctgataatcctcagagatttgatagagcaacttgcgtgctggcccatacagggataactggtggacgccacacatgggtttggatggccagagtgcctggagacagcgggtgctgtcaattctgcagccccccttcggttctgggaaccgaggtggccgcatag

SEQ ID NO: 29920 - DNA, 1344 bp, synthetic construct
  source 1..1344: mol_type = other DNA; note = Synthetic coding sequence
atggcaacagactcttgggctttggcggtggacgagcaagaggctgccgtgaaatctatgaccaacctccagattaaagaggagaaagtgaaagctgatactaacggaatcatcaagacaagtaccaccgccgagaagacagacgaagaggaaaaggaagaccgagcggctcagtctcttctcaacaagctgattcggtccaacctggtagataacaccaaccaggttgaagtcctgcagcgggaccccaactctcctctatattccgtgaagtcctttgaggagctccggctcccccagaatctgattgcccagtcccaatcgggaacaggcaaaactgctgcattcgttctggccatgcttagcagagtggagccctccgatcgctacccacagtgtctttgcttgtctccaacttatgagttagctctgcagactggtaaggtgattgaacagatggggaagttctatcctgagctgaaattggcttacgccgtcagggggaataagctggaaagggggcagaagatctcagaacagatcgtgataggcacccctggcacagttttagactggtgttctaagttgaaattcatcgacccaaagaagatcaaagtctttgtccttgatgaggctgatgtaatgatcgcaacccagggccaccaggaccaaagcattcggattcagcgcatgctccccaggaattgtcagatgctgctgttctcggctaccttcgaagactctgtgtggaaatttgctcagaaggtcgtcccagaccccaacgtcatcaaattaaaaagagaggaagaaaccctcgatactattaagcagtattacgtgttatgcagcagtagagacgaaaagtttcaggcattgtgcaacctctacggagctataactattgcacaggccatgattttttgccacacccgcaagacagccagttggctggcagccgaactgtccaaggaggggcatcaagtagctctcctgtctggtgaaatgatggtagagcaaagggccgctgtcattgagaggttccgagagggcaaggagaaagttctggtgacaactaacgtatgtgcaagaggtattgatgttgaacaggtttctgtagtgatcaactttgaccttccagtggataaagacggtaacccggacaatgagacctatctgcatcgtattggcagaactgggaggttcggaaagcgaggtctggccgtgaatatggtggattctaagcattccatgaatattctgaatcgaattcaggaacattttaacaaaaagatagaaaggttggacactgatgacctggacgagatcgaaaaaatcgctaactag

SEQ ID NO: 29921 - DNA, 630 bp, synthetic construct
  source 1..630: mol_type = other DNA; note = Synthetic coding sequence
atggcatcatctgacctagaacaactctgcagccatgttaacgagaagatcggtaacataaagaaaactctgagtttacggaattgcgggcaagaacccacgctgaagaccgtacttaataaaataggagatgagatcattgtgatcaacgagctgctcaataaactggagcttgaaattcagtatcaggaacagaccaacaatagcctcaaggagttgtgtgagtccctggaagaggattacaaagatattgagcacttaaaggaaaatgtacccagccatctaccgcaggtgacagtcacccaatcatggtatatgaaaagtcgcttaacctacaaccagatcaatgatgtcatcaaggagataaacaaggctgtcattagtaagtacaagatcttacaccagcctaaaaaatccatgaatagtgtgacccgcaacctgtatcacaggtttatcgacgaggaaaccaaggacaccaagggccgatactttatcgttgaggccgacatcaaagagttcaccacccttaaggcagataaaaagttccatgtattactgaatattcttcggcattgtcggcgactcagcgaagtcaggggtggcggtcttaccagatatgtaatcacctag

SEQ ID NO: 29922 - DNA, 1125 bp, synthetic construct
  source 1..1125: mol_type = other DNA; note = Synthetic coding sequence
atggacagcgtgaggagtgggccatttggacagctctttcggcctgacaactttatatttggccaaaccggcgctgggaataattgggccaagggacattacacagaaggcgctgagctggtcgacgctgtcttggatgtggtgcgcaaggagtgtgagcactgcgattgccttcagggtttccagctaacccatagtctgggaggaggaactggcagcggcatgggcactctccttattagtaaaattcgtgaggagtttccagaccgaattatgaacaccttctctgtcatgccttcaccgaaggtgtccgatactgttgtggagccatataatgccaccttgtcagtacaccagttggtggagaacaccgatgaaacttactgcatcgacaatgaggctctgtatgatatatgtttcagaacgctgaaattaacaacacccacttacggcgatctgaatcacctggtttccgctacaatgagcggtgttaccacatcccttaggtttcccggtcagctcaatgccgatctgcgcaagctggcggtgaacatggtgccctttccccgactgcactttttcatgcctggatttgctcccttgacgtcaagaggcagccagcagtatagggcactgaccgttcctgagctgacccaacagatgttcgatgctcggaatatgatggccgcatgtgatcctcgccacggccgatatctcactgtcgccactgtgttccgcggaccaatgagtatgaaggaggtggatgagcagatgctggccatccagtcaaagaattcttcctatttcgtcgagtggattcccaataatgttaaggtggccgtgtgtgacatcccccctagaggtctgaagatggcttctacatttatcggaaattcaaccgccatccaagagttgttcaagaggatctctgaacagttttcagccatgtttcgccgtaaggcgtttcttcattggtttacaggggagggaatggatgagatggaatttacagaggctgagtccaacatgaacgatctcgtgtccgaatatcaacagtatcaggatgccacagccaacgatggagaagaggccttcgaagatgaagaggaggagattgatgggtag

SEQ ID NO: 29923 - DNA, 2289 bp, synthetic construct
  source 1..2289: mol_type = other DNA; note = Synthetic coding sequence
atggctagtctgctgcaggatcaactaacaacggaccaagatcttttgctcatgcaggagggcatgcctatgcgcaaagtacggtcaaagagttggaagaagctcagatattttaggctgcagaacgacggtatgactgtttggcatgcacggcaggcgcgtgggtccgcaaagccctccttcagcatctctgacgtagaaacgataagaaatggtcacgactccgagctgcttcgctcactggcagaggagttacctctggagcagggtttcaccattgtgtttcacgggaggagatcaaacctggacttgatggcaaactctgtcgaggaggctcagatttggatgcgtgggcttcagttgctcgtcgaccttgtcacatctatggatcatcaagaacgcctcgaccagtggctgagcgactggttccaacgcggtgacaaaaaccaagatggcaagatgagctttcaggaggtgcagagactgctgcatctgatgaatgtcgagatggatcaagagtacgcattctcattattccaagccgcagatactagccagagcggcaccttagaaggggaagagtttgttcagttctacaaagcgcttacaaagagggcggaagtccaggagctgttcgagtctttctctgcggacgggcagaaattaaccctgctcgaatttctggatttcctgcaggaggagcagaaggaaagggattgtacgagcgaactcgcccttgagttgattgaccgctatgaaccatcagattccggaaagctccgtcacgtgcttagcatggatggcttcctgtcctacctatgctctaaggatggggatatattcaatcctgcttgcctacccatctaccaggatatgacccagccattgaaccactattttatctgcagttctcataatacataccttgtgggcgaccagctctgtggacagtcttcagttgagggatatattagggcactcaagcgtggttgtcgctgtgtggaagttgatgtctgggacgggccttcaggggagccagtggtgtatcacgggcacaccctcactagtagaattctgttcaaagatgtagtcgccactgtggcccaatatgcattccagactagtgactatccagtgatcctttcattggagacccactgcagctgggagcagcaacagaccatggctaggcacctgacagagatcctgggggagcagctactttcaaccacgctggatggcgtcctccccacgcaacttccgagtccagaagagttgcgacgcaaaatactggtcaaagggaagaagttgaccctggaagaggatctggaatatgaggaggaagaggcagagccagagcttgaggagtccgaattagcactggagtctcagtttgaaacagagccagaaccccaggagcagaacctgcagaacaaagataagaagaaaaagtcaaagccgatactgtgtccagctctgtcaagcctcgtgatctaccttaaaagtgtctctttccggtcgtttactcacagtaaggagcactaccacttttacgagatttcttccttcagcgaaactaaagctaaaagactgatcaaggaggcaggcaacgaattcgttcagcacaacacctggcaactgagtcgggtgtacccatccggactccggaccgactcatctaattataatccgcaagagctgtggaatgcgggatgccagatggtggctatgaacatgcagaccgctggtctcgagatggacatctgcgacggtcattttagacagaatggcggttgtggctacgtgctgaagccagattttctcagagatattcagtcctcattccaccccgagaaaccaatctccccgttcaaagcacaaaccctgctcatccaggtgatctcgggacaacagctacccaaagtcgataagacgaaagagggttccattgtagacccactggttaaggtacagattttcggggtgcgactggacacagcacgtcaagagactaactacgtcgagaacaacggcttcaatccttattggggtcaaacactatgcttccgggttttggtgcctgagctggccatgctgagatttgtcgtaatggactatgactggaagtcccgaaacgatttcatcgggcaatacaccctgccctggacctgcatgcagcaggggtaccggcatatccacctgctgtccaaagatggcataagtttgcggcctgcatcaatcttcgtgtacatctgcattcaagagggcctggagggagacgagtcatag

SEQ ID NO: 29924 - DNA, 1461 bp, synthetic construct
  source 1..1461: mol_type = other DNA; note = Synthetic coding sequence
atggctgagctgcagatgttgcttgaggaagagattcctggcggaagacgcgcactgtttgactcttacaccaacctagagcgcgttgccgattactgcgaaaataattatatccagtccgccgacaaacagcgagcattagaagagaccaaggcctacacgacccagtccctggcgtccgtggcataccttattaacacacttgctaataacgtactgcagatgctggatatacaggcgagccagctaagacgcatggaatcatccatcaatcacatctcacagacggtcgatatccacaaggagaaggtcgcaaggcgggagattggaatcctgaccaccaacaagaacactagcaggacgcacaagatcatagcccctgctaacctggagaggcccgtgcgctatatccgtaagccgattgattatacaatcctagacgatattggacatggggttaaatggctgctcaggttcaaagttagcacgcagaacatgaagatgggcggactgccaagaaccacaccaccgactcagaaacctccaagcccgcctatgtccggtaaaggcacacttgggagacacagtccttaccggacactggagcccgttaggcctcctgtggtgcctaatgactacgtcccctcccctacaagaaatatggccccatcccaacagtctccagtgcgaacggcaagcgtaaatcagcgcaaccgaacctactcttcatctggctcatccggcggaagtcatccaagtagcagatcatcgtctcgggagaactcgggaagcgggagcgtgggagtcccaatcgcggtacccacccccagtccaccatcagtgttccccgctccagcaggaagcgctggcaccccacccttgcctgcaacctccgccagcgcccctgcacccctggtcccagccacagtaccaagcagcactgctcctgacgcagctgccggtggggctcaaaccctggcagatggattcacatcacctaccccaccagtggtgtcttccacgcccccaaccggacaccctgttcagttttacagcatgaacagacccgcttctcgacatacccctccaactattgggggatctctgccttatcgaagacctccttccataacttcacaaactagcctgcagaatcagatgaacggtggccctttttactcccagaacccagtctcagatactcctcctcctcctcctcccgtggaagagccagtcttcgacgaatctccgccacctcctccccctcccgaagactatgaagaggaggaggctgccgtggtggaatacagcgatccctacgccgaggaggatcccccttgggcgcctaggtcgtacctggaaaaagttgtggcgatttatgactacaccaaggacaaggaggatgagctgtctttccaggagggcgctattatttacgtaattaagaagaacgacgattag

SEQ ID NO: 29925 - DNA, 2145 bp, synthetic construct
  source 1..2145: mol_type = other DNA; note = Synthetic coding sequence
atgctcagcccgaagatacgccaggcacgcagagctagatccaagagcttggtgatgggcgaacagtcaaggtccccaggccgtatgccctgtcctcatcgtttaggccctgtgttaaaagctggctggctcaagaaacaacggtccatcatgaaaaattggcagcagcgctggttcgtccttagaggtgatcaacttttttattacaaagacaaagacgagatcaaaccccagggcttcatttcgctccaggggacacaagtgactgaactaccccctgggccagaggaccccggtaagcacctgtttgagataagtcccggaggtgctggtgagcgggaaaaggttcccgcaaaccctgaggctttgctcctgatggcaagctcccaaagggatatggaagattgggtacaggctatccggagagtgatatgggccccactggggggtggcaccgcgcgacgatctcatgcccacccgcttgaacctctcccgccaggcatcttcggacagcggcttgaagaaaccgttcatcacgagcgcaagtacgggccacgtctcgccccactgttagtcgaacagtgcgtggacttcattagagagagaggcctcacagaggagggtctttttagaatgcctgggcaggccaatcttgtgagggacctgcaggattctttcgactgcggtgaaaaaccactcttcgatagtaccactgatgtgcacacagttgccagtctactgaagctttaccttagagagctgccggagcctgtggttccttttgcacgatatgaggactttctgtcctgcgcacagttgcttacaaaagatgagggagaaggcacactggaactagccaaacaggtgtctaatttgccccaagccaattataatctcttgaggtacatctgcaagttcctcgatgaagtgcaggcatattcaaacgtgaacaagatgagcgtgcagaatctggcaactgtgttcggccctaatatccttcggccacaggtggaggaccctgtcacgataatggagggaactagtttggtgcagcatttgatgacagttctgatacgcaagcatagccaactgttcacggcgccagtgccggaaggacccacgtctcctagaggaggactacagtgtgccgtcggctggggcagcgaggaagtcacccgggactcccagggggaacccggaggcccaggtctgcctgctcaccgcacgagttcacttgatggggcagcggtggctgtactgtcaaggactgctccgacaggcccaggttctagatgtagcccagggaagaaggttcagacactgcccagctggaagtcctcatttcgacagccccgtagcctctcagggagccctaaaggtggcggttcatcactggaggtccctatcattagtagcggtgggaactggctgatgaacggtttatctagcctgagaggccaccgcagagcatcttccggcgacagattgaaagacagcgggagtgtacagaggttatcaacatacgataacgtcccagctccagggcttgtcccaggaattcctagcgtggcttccatggcttggtccggagcatcctcttcagagagttccgtgggcggatcgttgagctcttgtactgcatgccgcgcatccgactcgagtgctagaagctccctgcatactgactgggcactggagcctagtccgcttccctcctcatcagaggatccaaagagcctcgacctagatcatagcatggatgaggccggagctggcgcatccaattccgagccatctgagccagattctcctactagggaacacgccagaagaagcgaggccttgcagggactcgtgactgagttgagagccgagctgtgccgacaaagaactgagtatgagagatctgttaagagaatagaagaggggtcagctgacctgaggaaaagaatgagtcggctcgaggaagaactggatcaagaaaaaaagaaatacatcatgttggagatcaaactacgtaactccgagcgcgcacgcgaggatgctgagaggaggaaccaactgctccagagagagatggaggagttttttagcactttagggtctttgaccgtgggtgctaagggagcacgggctcccaaatag

SEQ ID NO: 29926 - DNA, 381 bp, synthetic construct
  source 1..381: mol_type = other DNA; note = Synthetic coding sequence
atgtggactgcacggggtccgttccgcagggatcgctggtcgtcggaagacgaagaagccgcagggccatctcaggcactgtcaccattgcttagcgacactcggaagatcgtgtctgaaggagagctggatcaattggcccagatccggcctctgatttttaactttcacgagcagacagctataaaagattgccttaagatccttgaagagaaaaccgcagcctatgacattatgcaagaatttatggccctggagctgaaaaatttgcctggcgagtttaactccggcaatcagccctcaaatagggaaaaaaatcggtatcgtgacattctgccattccagcatcacggatacagcggccctaatgagcggacctag

SEQ ID NO: 29927 - DNA, 2442 bp, synthetic construct
  source 1..2442: mol_type = other DNA; note = Synthetic coding sequence
atgtctgagcagggcgatctgaatcaggccatcgcggaggagggcggaaccgagcaagaaaccgccactccggagaacggcatcgtcaagagcgagtcactcgacgaggaggagaagctggagctgcagcggagactggaggcacagaatcaggaacgccgaaagagcaaatctggcgcaggcaaggggaaactcaccaggtctctagccgtgtgcgaggaatcttctgccaggccaggtggggagagtctgcaggaccaggagagcatacacctccagctgtcttcattctccagcctgcaagaggaggataagtcacggaaagacgatagcgagcgcgagaaggagaaagacaagaacaaggataagacttcagaaaaacctaagattagaatgctgtctaaggattgctcccaggaatatactgatagcactggaatcgatctgcatgaattcctgatcaacactctcaagaataattcaagggacagaatgattctgctgaaaatggaacaggaaattatagacttcatcgctgataataataatcactacaagaagtttccccagatgtcaagctatcagagaatgctggtgcatcgggtcgcagcctacttcggtctggatcacaatgtcgatcagaccgggaaaagcgtcattattaacaaaaccagttctactcgcatccccgagcagaggttttgtgagcacctcaaagacgaaaaaggggaggaatcacagaaacggttcatccttaaaagggacaactcctctatcgataaggaggataaccagtccgtgtgtagtcaggaatccctgtttgtcgaaaatagcagactactggaggattccaatatttgcaatgaaacctacaagaagcggcagctgtttaggggcaatcgagatggaagcggaaggacatcaggatcccgacaaagctcttccgagaacgaattaaagtggtcagatcaccagcgcgcatggagctcaaccgactccgatagcagcaataggaatttgaagccagctatgacaaaaaccgcgtccttcggtgggatcactgtcctcactcggggagactccacctcatcaacccggagcactggcaagctgagcaaagccggaagcgagagctccagttctgctggttcttctggctctctaagtcggacccaccctcctttacaatctacacctttggtaagcggcgtggccgcaggcagccctgggtgcgtaccatatccagagaacggtattggcggtcaggttgcaccctcatccacctcctatatcttgctccccctggaggctgctacagggatacccccaggatcgatcctgctcaaccctcacacgggccagccatttgtgaatcccgacgggactcccgcaatctacaatccgcctacaagccaacagccacttaggtccgccatggtggggcagagccaacaacaacccccacaacagcaaccctcgccccaaccccagcaacaggtgcagccccctcagccgcagatggcaggtcctcttgttacccagtccgtgcagggactgcaggcctctagccagtctgtgcagtacccagctgtatctttcccgccacagcacctgctaccagtgtccccaacccagcactttcccatgcgggatgatgttgccacacagttcggccagatgacgctgtctcgtcagtcaagcggggagacgccagaaccacctagtgggccagtttacccaagctccctcatgcctcagccagcccagcaacccagctatgtcattgccagcaccggtcagcagttgccgactggcggattcagcggctctggtcctccaatcagccagcaggtgttgcaacccccaccatctccacagggtttcgtgcaacagccaccacccgcacagatgcccgtatattactatccctccggacagtatcccacctctacaactcagcaatacaggcccatggctcctgtgcagtacaatgctcaacgatcccagcaaatgcctcaggcagcgcaacaggcaggctaccagcccgtgcttagtggtcagcaaggctttcaagggctgataggagtacagcagcccccacagtcccagaacgtgatcaacaatcaacaggggacccctgtgcagtcagtgatggtcagctaccctactatgagttcttaccaggttcctatgactcagggctcacagggccttccacagcaatcatatcagcaaccaattatgctgccaaatcaggcagggcagggttcccttccggcaaccggaatgccggtttattgcaatgtgaccccaccaacacctcagaataacctgcgactgatcggaccccactgtccatcctcaactgtgcctgtgatgtcggcatcctgccggaccaattgcgccagcatgtctaacgcaggctggcaagtgaagttttag

SEQ ID NO: 29928 - DNA, 1467 bp, synthetic construct
  source 1..1467: mol_type = other DNA; note = Synthetic coding sequence
atgaacggcgctctcgaccatagcgaccaacctgatccggacgcaattaaaatgttcgtggggcagattcccaggtcgtggtccgagaaggagttgaaagagctgtttgaaccctacggtgcggtctatcagatcaacgtgttacgcgatcgctctcagaacccaccacagagtaagggctgttgcttcgttactttctatacgagaaaagcagccctggaagcccagaatgccctccacaatataaagaccctgcccggaatgcaccatcccattcagatgaagcccgctgattccgagaaaagtaacgctgtcgaagaccgaaaattgttcatcggcatggtgagcaagaagtgcaacgagaatgatattcgcgttatgttctcgcctttcggccagatcgaggagtgccgaattctgagaggaccggacggcttatcacgaggttgtgcttttgtcacgttcagtactcgtgctatggcgcagaacgctatcaaggctatgcaccagtcccagaccatggagggctgtagttcccctattgttgtgaagtttgccgatacgcagaaggataaggagcagcggcgactccaacagcagctagcccagcagatgcaacagttgaatactgcgacatggggcaacctgaccggactcgggggactgacccctcaatacttggctctgctgcagcaggcaaccagctcctccaatctgggggctttcagcggtatacagcagatggccggtatgaatgccctccagcttcagaacctggccaccctagctgccgctgcagctgctgcacagacttccgctacttctactaatgctaatccgctgagcaccaccagctccgctctgggggctctgacgtcaccggtcgcagcttccacccctaactctactgcaggagccgctatgaattcgctaacatctcttgggaccttacaggggctggctggggctactgtcggtctgaataatattaacgctctggcaggcaccatcaatagcatggctgctctgaacggcggactgggagccactggactgacgaacgggacagcaggcaccatggacgcacttacccaggcatactctgggattcagcagtacgcagccgcagctctgcctaccctctactcacagtccctgctgcagcaacagagcgctgccggaagccagaaggagggccctgaaggcgcaaacttgttcatttatcatctgcctcaagagttcggcgatcaggacattctacagatgtttatgcccttcggaaatgtcatcagcgccaaagtatttattgataagcaaactaatctttccaaatgtttcggattcgtttcctatgacaacccagtcagtgcacaagccgctattcaggccatgaatggcttccagattgggatgaaacgcctgaaggtccagctaaaaagatccaaaaacgatagcaagccatactag

SEQ ID NO: 29929 - DNA, 474 bp, synthetic construct
  source 1..474: mol_type = other DNA; note = Synthetic coding sequence
atggctacctccgctccgctgaggtccctagaggaggaagtcacatgcagcatttgtttggattatctgcgtgacccagtaaccatagactgtgggcatgtcttctgtcgctcctgtaccaccgacgtgcgaccaatttccggatcaaggcctgtgtgccccctgtgcaaaaaaccatttaaaaaggagaatatcaggccagtttggcagctggcttcccttgtggaaaacatagaacgattgaaggtcgacaagggacgacaaccaggagaagtcacgcgggagcagcaggacgctaagctctgcgaacggcacagagagaagctgcattattattgtgaggacgacgggaaactgctgtgcgtcatgtgtcgcgagtcaagggagcaccgccctcacacagccgtactaatggagaaggcggcacaaccacatcgggagaagatccttaaccacctgagcacattacggtag

SEQ ID NO: 29930 - DNA, 303 bp, synthetic construct
  source 1..303: mol_type = other DNA; note = Synthetic coding sequence
atggcctctgaagacattgccaagctagcagagacactcgcaaaaacccaggtggccggaggccaattgtcctttaaaggaaaaagtctaaagttaaacactgctgaagacgccaaggacgtaatcaaagagattgaggatttcgactctcttgaggcgctaagactcgaaggcaataccgttggggtggaggcggctcgggtgatagctaaagcccttgagaagaagagcgagctcaagagatgtcactggtcagacatgttcactgggagattgcgtactgagattcccccagccctgtag

SEQ ID NO: 29931 - DNA, 459 bp, synthetic construct
  source 1..459: mol_type = other DNA; note = Synthetic coding sequence
atgtcggtgacctatgatgacagcgtgggtgtagaggtcagcagtgattctttttgggaggtcgggaactataaacgcaccgtaaaaagaatcgatgacggccaccggctctgctctgatctgatgaattgcttacacgaaagggccaggattgagaaagcttacgctcagcaattgacagagtgggcgagacgatggcggcagcttgtagagaaggggcctcagtatgggactgtggaaaaggcttggatggccttcatgagcgaggccgagcgcgtctccgagctgcacctcgaggtcaaagcctctctgatgaacgatgactttgagaagattaagaattggcagaaagaagcttttcataaacagatgatgggaggtttcaaggagacaaaggaagccgaggatggtttcaggaaggcccagaaaccgtgggccaaaaaactcaaagaggtgtag

SEQ ID NO: 29932 - DNA, 543 bp, synthetic construct
  source 1..543: mol_type = other DNA; note = Synthetic coding sequence
atgtttgctagcgatctattgagagctctggattgctgtcctggtgccggtagtagtggcctcttgcctcaactgggacccagacaactgttggcctttactgtgaactgtcttggcaatcatagatatctgggctttttcgaggatctagaacagcgtcacaaggcacaagtgctggtggaagatattagtgacatcttggaagagcatgccgaaaagcacttccatccatacattgcgtactgcagcaacgaagtgtaccaacagcgtactctgcagaagttaatctcatctaatgcagcctttcgggaggctctcagagaaattgaaagacgtccggcatgtggcggtttgcccatgctgtccttcttgatcctccctatgcaacgtgtaacacgcctccccctcctgatggataccctctgcctgaaaactcagggacatagcgagcgatacaaagcagcaagcagagcccttaaggccatttcgaagttggtgagacaatgtaatgagggagcccatcgcatggagaggatggagtag

SEQ ID NO: 29933 - DNA, 2487 bp, synthetic construct
  source 1..2487: mol_type = other DNA; note = Synthetic coding sequence
atggacagcgaagcctttcagagtgcaagggacttcttggatatgaactttcaaagcctggctatgaagcacatggatctcaagcagatggagctcgacaccgctgccgcaaaagtagacgagcttaccaagcaactggaaagcctgtggagcgattcacccgcacctccgggtccacaggcgggaccaccaagcagaccccctcgatactcctcttcatccatccccgaaccatttgggagcaggggctcccccaggaaagcggctactgacggtgctgatactcccttcggccgatccgagtcagcccctacactgcacccatattcaccactctctcctaagggaagaccttcgtcacctaggactcctttgtacctgcagccagatgcctacgggagtctggatagggccacttctcctcggcctagagcgttcgatggcgctggatcatccctgggtcgagctccgagcccacgcccaggaccgggtcccctgcggcagcagggaccgccaacccctttcgactttctggggcgtgctggatccccgagagggtccccactggccgagggtcctcaggccttttttcccgagcgtggaccttctcctaggcccccagccaccgcgtacgacgctccggcatctgcttttggctcttctctattaggaagtggtggctcagccttcgctcctccactgagggcccaggacgacctcaccctccggaggcgacccccaaaagcctggaacgaaagcgatctggacgtggcctatgaaaagaagccatctcaaacagccagttacgagcgcctggacgtttttgcccgtccagccagcccctcactccaactcctgccgtggcgggaatccagcctagacgggctgggcggaacaggaaaggataacctgacctccgctacactacccaggaactataaggtgtccccattggcatccgatagaagatccgacgcaggtagttataggcggagcctcggctccgccggaccgagtggcacactgccgagatcatggcagcccgtaagtcggattccaatgccaccctcatcccctcagcccaggggggctccccgacagaggcccattcctctgagtatgatctttaaactgcagaacgcattttgggagcatggcgcatcaagagccatgctgccgggaagtcctctgtttactagggcaccgcctcctaaactccagccgcaaccccagccccagccgcaaccccagtcgcagccccagcctcaattacccccacagccacagactcagccgcaaaccccaactcccgcaccacagcaccctcagcaaacgtggcccccagttaacgagggcccaccaaagccgcctactgaattggagcctgagcctgagattgaaggattactcacgcccgttttggaggccggagatgtcgatgagggccctgtggccaggccactgtcccccacccggcttcagccagctctgccccctgaggcccagtctgtcccagagctggaggaagttgcccgagtgctggccgaaatccctaggccccttaagcgacggggaagcatggaacaggcgccagccgtggccctccctccgactcacaaaaaacaataccagcaaatcattagccgactatttcatcgccatggcggacctgggccaggcggtcccgaacctgagctttcccctattactgaaggtagcgaggctcgagctgggcctccagctccagcccctcctgctcctattcctccacccgctccgtcacaatcatctccacccgagcagccacagtcaatggagatgcgctctgttcttcggaaagccggtagtcccagaaaagcaaggagagcccgtctgaatcccttggtgctgctgttggatgccgctctgactggggagctggaggtcgttcagcaggccgtgaaagagatgaacgaccctagtcaaccaaatgaagagggcattaccgcgctccacaatgccatttgtggcgctaactatagtatcgtggattttctcatcaccgccggtgctaacgtcaattccccagattcacatggttggacccccctgcactgtgccgcaagttgcaatgacaccgtcatctgcatggccctagtgcagcatggtgccgcaattttcgccacgacattgagtgacggcgctaccgcgtttgaaaagtgcgatccttatagagaaggttacgccgactgtgccacctatttagccgacgtggagcagtccatgggcctgatgaatagtggcgcagtatacgctctgtgggactactctgctgaattcggggatgagctgtcattcagagagggggaaagtgtcaccgtgctccgtcgagatgggccagaggagaccgattggtggtgggccgcattacacggacaggaaggctacgtgcccaggaattattttggtttatttccgagggtgaaaccacagaggagcaaggtctag

SEQ ID NO: 29934 - DNA, 4455 bp, synthetic construct
  source 1..4455: mol_type = other DNA; note = Synthetic coding sequence
atgcggatccccgaccaaaaatacgtcactttaaagctgaacgatgtgatccgcttcggatacgacagcaacatgtacgtgctggagcgagtacaacatcgagtccccgaggaggcgctcaaacacgagaagtacacttctcagttgcaggtttctgtgaagggcctcgctcccaagaggtccgaagcattgcctgaacacacgccctattgtgaggcctccaacccaagaccggagaagggggataggcggccagggaccgaggcagcgagctacaggacgccgttgtatgggcagccttcttggtggggagaggatgatggaagcaccttgcccgacgcccagagacagggcgagccttacccagagaggccaaaagggccagtccaacaagacggggaactgcatggctttcgtgcgcctgcagaacctcagggctgtagctttaggcgcgagccctcttatttcgagatcccaaccaaggaaacaccacagccaagtcagcccccagaggtgcccgctcacgagatgccaacaaaagatgctgaggctggcggtggaggcgcagctccagtggtgcagagccacgccagcttcacaatcgaattcgatgactgctcccctggaaaaatgaagatcaaagaccacatcaccaaatttagtctcagacagcgccgtcctcccggtaaagaggcgacccctggcgaaatggtgagtgcagaaactaaagtggcagattggctcgtgcaaaatgacccaagtctcctgcatcgggtgggcccaggcgacgatcggcattccactaaatcggatcttccagtgcacacccgcacactcaaaggccataaacacgaagacggcacccagagcgacagcgaggaccctctcgccaaggctgcttctgccgctggggtgccattggaggcaagtggagaacaggttcgcctgcagaggcagatcaaaagagatcctcaagaactgttacacaatcagcaagccttcgtgattgagttcttcgatgaggatacccccagaaagaaacggagccagtcctttacacatagtccgtccggtgaccctaaagcagacaaacggagaggccctactccagctgacagagacagaccatcagtacccgctcccgttcaggccggtgggagaagctcaggcccacagcgcgctggatctctgaaaagggagaaaacagaggagcgcctggggtcaccttctcctgcaagcaggacccccgctcgtccctttggaagcgtggggagacgctcccgactcgcccaggattttatggcccagtgtctgcgggagtcttcaccagcggctagaccttctccagagaaagtccccccagttctgcctgctcctttaactccacacggaacatccccagtggggccaccgacaccaccccctgcgccaacagatccacaattgacaaaggccagaaagcaggaagaagatgactccttgagtgatgccggtacatatactatcgaaacagaggcacaggacacagaggtagaggaggcccgaaaaatgatcgaccaggtgtttggagtcctggaatcaccggagctgtctcgtgcaagtagcgccacctttagacctgtaattcgaggtgaccgggacgaatctgatgatggtggcgtggctcaacgaatggccctgctccaggaattcgcttctcggccactgggcgcagcccctcaggcagagcaccaggggctccccgtcccaggatctcccggtggtcagaagtgggtgagcagatgggccagtctcgcggactcctactcagatccaggcttaaccgaagacgggctgggccgtagagggggtgagcccgagggaagcctacccgtgcggatgcggcgtcgcctgccacaactgccttcggagcgtgcggattccccagccggtcccgagtctagcaggcggtccggccctggccctccggagcttgacagtgaacagccctctcgactatttggacaggaggagctggatcccgactccctgtcggacgcctcaggttccgacgggggacgcggacctgagccaggggtcgagccacaagattcaaggcgtaggtcgccccaggagggcccaacatggtctagaggccgacggagcccccgagcccctggagagcctacgccagcttctttttttattggcgatcagaacggggatgcagtgctctctcgaaagcctctcgctgctccaggcgatggcgagggtctgggacagacagcccagccatctccacccgctcgcgacggcgtttatgtgtctgccaacggtagaatggttattcaattaaggccagggagaagccctgaaccagacggaccggcaccagcctttttgcgacaggaaagtttcaccaaggaacctgcttcaggacctccagccccagggaaacctccccacatatctagccaccctctgctgcaggacttggctgcaacaagggcggctcgaatggactttcactctcaagacacgcacttgattctgaaagaaacagaaacagctcttgccgctcttgaagctcggctactgagcaactcagttgatgcagaatgtgaaggaggttccaccccacgccctcccgaggacgccctctcaggagactctgatgtagatacggcctccaccgtatctttgcgctcaggtaaatccgggccatccccaactaccccccaaccccttcgcgctcaaaaggagatgtccccatcaccacctgctgcccaggatccaggcggaaccgctctggtctctgccagagagcagtcttcagagaggcagcatcaccccctaggccctacagacatgggccgaggagagccagtgcgcagaagcgctattcgacgcggacaccggcctcgtggcagcctcgattggccctctgaggagagggggcctgtgttggctcaccttcccagtagcgacgtcatggcctccaaccatgagactccagaggctactggcgctgggaggctgggatctcggaggaagcctgccgctcccccaccttcaccagccgctagggaagagcagtctagatcctctgcgagttcgcagaagggcccacaggctctgacaagatcgaactctctttccaccccccgacctactagggcttccagattgaggagggctcggcttggtgatgccagtgacaccgaagccgcagacggggagaggggaagcctcggaaatccagagcccgtgggtcgcccagccgcagaacaggctaagaagttgtctagacttgatatattggccatgccccgtaagcgcgctgggtctttcaccgggactagcgatcctgaggccgctcctgcacggacttcattctctggacggagcgtcgaactgtgttgcgcttctcgaaagcctaccatggcggaggcaagagctgtgtcaaggaaggcggcaaatacggctacaaccactggtcctaggcagcctttctcgagggctcgctcaggtagcgcccgatacacctccaccacacaaacacccagggcaggttcctccagcagggcacggtctcgggcacctgggccaagggacaccgatgacgacgaggaagagccggatccctatggcttcatcgtgcagactgccgagattgcagagatagcacggcttagccagacactggtcaaggacgtcgccatcctcgctcaggagatccatgatgtggccggtgacggtgacactctcggatcaagcgaacccgcacatagtgccagtctcagtaatatgcctagcacccctgcctcgacaatttcagctcgagaggaactggtccagcgaattcctgaggcttccctgaacttccaaaaggtccctcccggatccctgaatagcagagatttcgaccagaatatgaatgatagctgcgaggacgctctcgccaacaagaccaggcctagaaatcgcgaggaagtgatattcgacaacctaatgctcaatccagtgagccaactgtctcaggccatcagggagaacaccgaacacctggctgaaaaaatgaagattttgtttcaaaatacaggtcgtgcctgggaagacctcgaagccagaatcaacgctgagaatgaggtcccaatcttgaaaacaagtaataaggaaatctcttccattcttaaggaactaagaagggtgcaaaaacagttagaagtaatcaacgccatcgtagacccatctggcagcctcgatctgctgaccggcaatcgttcactggcttcatctgctcaaccgggacttggaaagggcagagtggctgcccaaagcccaccatcccctgcgtccgctgaagcattgttgccggctctgccacttaggaattttccacagagggccagttgtggtcccccatcactcccagatcctaccttcctgcccgatgcagaacgcttcttaatctag

SEQ ID NO: 29935 - DNA, 150 bp, synthetic construct
  source 1..150: mol_type = other DNA; note = Synthetic coding sequence
atgtatccaaaccccctaatttattgtacatgttgggatccatggaacctgggaccaaggaagttgatcaagaccccacaactccccaggaagaatagcactggcagctccaaattgacccccctggtgcccgcaccaaaaaaccactag

SEQ ID NO: 29936 - DNA, 948 bp, synthetic construct
  source 1..948: mol_type = other DNA; note = Synthetic coding sequence
atggcttttcctgagccaaagcctcgcccacctgaactgccccagaagagactcaagacgttggattgtggccagggagcagtccgcgcagtgcggttcaatgtcgacggtaactattgccttacctgcggatcggacaaaactctgaagctgtggaatccactgcggggtacgctactgcgcacttattcaggccacgggtacgaagtgctcgacgccgcaggatccttcgacaacagctccctctgctccggcggaggagataaggcggtggttctatgggatgtggcatccggccaagtggtgcgcaagtttcgaggccacgccggaaaagtgaacactgtccaatttaatgaggaggccaccgtaatccttagcgggagcattgactcctctatacgatgttgggactgcagatctcgtagacctgaacccgtgcaaacccttgacgaagccagagatggggtttctagtgtcaaagtttccgaccacgaaatcctcgcaggctccgtcgatggacgagtgagacgatatgacttgcgtatgggccagcttttctctgactacgtcggctcccccatcacgtgtacatgcttttcccgggatggccagtgcaccctggtgtcttctctggactcaaccctgcgtttgctcgacaaagatactggcgagctcctcggcgaatacaagggacacaaaaaccaggaatacaagcttgattgttgtctctctgagagagacacgcacgtggtttcttgcagcgaagacggcaaggtcttcttttgggacctcgtggagggtgccctggccctggccttgccagtgggtagtggggtagtgcagagtctagcataccatcctaccgagccatgcttgttgacagccatgggaggctcagtacagtgctggagagaggaggcctatgaggcggaggatggagccggttag

SEQ ID NO: 29937 - DNA, 3015 bp, synthetic construct
  source 1..3015: mol_type = other DNA; note = Synthetic coding sequence
atgaaggccacaaccccccttcagacagtagatagaccaaaggactggtataaaacgatgttcaagcagatccatatggtgcataagcccggactctataatccaccctacagcgcccagtcgcatcccgcagccaaaacccagacataccggcctttgagcaagtctcactcagacaatagtcccaacgcatttaaagacgcttcctcaccggtaccaccgcctcacgtgcctcctcctgttccacccctgcgacccagagatcggagctccactgagaagcacgactgggacccgccagaccgcaaggttgacacccggaaattcaggtcagaaccacgttctatcttcgagtacgagcctggcaagtcatccattctccagcacgagagacccgcttctttataccagagctctatcgaccggtctttagaacgccctatgagctcagcttcaatggccagtgactttaggaagaggcgaaaatctgaaccagctgtcgggcctccacggggactcggcgatcagtccgctagtagaacctctcccggtagagtcgacctgccgggatcaagcacgacactaactaaatccttcacatcttcctcaccatcaagcccctcacgtgctaaaggaggagacgatagcaaaatttgccccagcctctgctcctatagcgggctaaatggtaatccgagtagcgagctcgactactgttcaacctaccggcaacacctggatgtccccagggacagcccacgtgctatttctttcaagaacggttggcaaatggcccgacagaacgccgagatttggtcatctactgaggaaacggtctctccaaaaattaaatccaggtcctgtgacgatctgcttaacgatgactgtgattccttccccgaccccaaggtcaagtccgagagcatgggatccttgctatgtgaagaggactcgaaagagtcgtgcccaatggcatggggctcaccctacgttcccgaagttaggtccaatgggaggtctcgaatccgacatcgtagcgcccgaaacgccccaggatttctcaagatgtacaaaaagatgcatagaatcaatcggaaagatctcatgaactcggaggttatctgcagcgtgaaatccaggatactccaatacgagtccgagcagcaacacaaagatctgttaagagcatggtctcaatgcagtacggaagaggtcccccgtgacatggtgcccacacgtatttcagagttcgagaaactgatccagaaaagtaaaagtatgcctaacctaggcgacgatatgctgagtcctgttactttggagccgcctcagaacgggctgtgtccaaaacggaggttttcaatcgagtatctgctcgaagaggagaaccagtctgggccaccagccaggggcagaagaggttgccagtccaatgccctggtgccaattcacatagaggtgacatctgatgaacagccacgcgcacatgtcgaattcagcgatagtgaccaggacggtgtagtgtctgaccactccgactacattcacctggaagggagcagcttctgcagtgagagcgacttcgaccatttctcgttcacatccagtgaatccttttacggaagcagccatcaccaccatcatcaccaccatcaccaccatcgacacctaatcagtagttgtaagggcaggtgcccggcttcatatacaaggtttacaaccatgcttaagcacgaaagggcccgacatgagaatacagaagagcctaggcggcaagagatggatcccggtctaagtaagctggccttcctagtgtcacctgtgccctttcggaggaaaaaaaacagtgcccctaaaaagcagaccgaaaaggctaaatgtaaagcttccgtctttgaggctctggattccgccttgaaggacatctgtgatcagatcaaggcagagaagaaacgtggctctctcccagataattccatattacaccgactcattagcgagctgctccctgacgtcccagaaaggaacagctctctccgggctttgaggcgctcccccctgcaccaaccgctgcaccccttaccccctgatggagccattcattgccccccttaccagaacgattgcggacgcatgcccagatccgctagtttccaagacgtggatactgccaacagctcttgccatcaccaggaccgaggcggtgcactccaggatcgagaatcacctaggagttattcgagcacattgacagacatggggaggtctgctccacgtgaaagaaggggtacccccgagaaagagaaactgcctgccaaggcagtgtacgatttcaaggctcagacgtccaaagaactgagcttcaagaaaggtgatactgtttatattttgagaaaaatcgatcagaattggtacgagggcgaacatcacggtcgggtgggcatttttcctatctcttacgtcgaaaaactcactccacctgagaaggcccaacctgccaggcctccgcctccagcgcagcccggtgaaataggggaggccatagcaaagtacaattttaatgcagacacaaacgttgaactaagtctgcgcaaaggagaccgcgtcattctgcttaaacgtgtggaccagaattggtacgaaggaaagatcccaggcacgaatagacaaggcatcttccccgtgagctatgttgaagtggtgaagaagaacacaaagggggctgaagactacccggatcctccgatcccacatagttattccagtgatcgtattcactctttaagcagtaataagcctcagcgcccagtgttcacacatgagaacatccagggcggtggggagcctttccaagcattatacaattacacaccacggaatgaggatgagttggagctgcgtgagagtgacgtgattgacgttatggagaaatgcgacgatggatggttcgttgggactagcaggagaacaaagttctttggaacgtttcctgggaattacgttaaacgcttgtag

SEQ ID NO: 29938 - DNA, 981 bp, synthetic construct
  source 1..981: mol_type = other DNA; note = Synthetic coding sequence
atggcagccgcagcggcagccgcagctgccacgaacggaaccggagggtcttctgggatggaggtggacgccgcagttccctccgtgatggcatgcggtgtgaccggtagtgtgagtgttgcacttcacccccttgtgatactcaacatttcggaccactggattagaatgcgctctcaggaaggccgtccggttcaagtgattggtgcactgattggaaaacaggaaggcagaaacattgaagtgatgaactccttcgaactgctttctcacactgtggaagagaagatcatcatcgacaaagagtattattatactaaagaggaacagttcaaacaggtcttcaaagagctcgaatttctaggttggtacacaaccggagggccaccagaccctagcgacatccacgtgcataaacaggtctgtgagataatcgagtctcccctgttcctgaagcttaaccccatgaccaaacacaccgacctgccagtatcggttttcgagagcgtgatagacatcattaacggggaagctacaatgctgttcgccgagcttacttataccctcgctactgaggaggccgaacggattggcgttgaccacgtcgccaggatgaccgctacggggtcgggcgaaaatagcaccgttgcggaacacctgatagcccaacactccgcaatcaagatgttgcatagtcgggtgaaattgattctagagtatgtgaaggcttcagaggccggtgaggtgcccttcaatcatgagatcctgagagaggcctatgctctgtgccactgcttaccggtactgagtacagacaaatttaagaccgacttttacgatcagtgcaacgacgtcgggcttatggcgtacctgggcaccatcacaaaaacatgtaacacaatgaaccagttcgtcaataagtttaacgtgctgtacgatagacaggggattggccgtcggatgaggggactattcttctag

SEQ ID NO: 29939 - DNA, 780 bp, synthetic construct
  source 1..780: mol_type = other DNA; note = Synthetic coding sequence
taattcactgcccaggccccttcggggaggggcgctgcggtgggatccggaacacggctcgcttcccttcggttgcttactgagttagagagccccgcatggtggccgtttagctccaagctctggaaaactccaccggagaccaaacctcgagaggatgtcagtatgacctcttgcgaaccttttggcaaggaggggatcttaattaaaataccagccgtgatttcccatcggactgagtcacacgtgaaaccgggtcgactgacagtgctggtgtctggattggagattcacgactcgtcctctctgctcatgcaccgcttcgagcgcgaggatgtggatgatataaaagtccattcaccctatgagatcagcatcagacaacggtttattggcaagccggacatggcttatcgcttaatctcagctaaaatgccagaagtgatacccattctcgaagtccagtttagcaagaagatggaactgctcgaagacgcactggtgctgcggagcgccagaacaagtagcccggctgagaaatcttgctcagtgtggcacgcggctagcggactgatgggaaggacattgcatcgggaaccacctgcaggcgatcaggaaggcactgctctccacctgcagacctctctgccggctttaagcgaggcagatacgcaggaacttacccagggttttcgccctatgtcactgtctacgcagactgtgcttgtgatgttatgttcagagtccgcaggagcactgtggcggcagagactctcatag

SEQ ID NO: 29940 - DNA, 1038 bp, synthetic construct
  source 1..1038: mol_type = other DNA; note = Synthetic coding sequence
atggctgccgcagaacctgcatcttccggacagcaagccccagcagggcagggccaagggcaacgaccgcctccacagccgcctcaggcacaggcccctcagcctccaccacctccccagcttggtggcgcaggcggaggcagtagccggcacgagaaaagcctcgggcttctcaccacaaaattcgtcagcttactccaagaagccaaggatggcgtactggacctgaaagcggctgccgacacattagctgtgagacagaagagaagaatctacgatatcacaaacgtcctggaggggatcgacctgatcgaaaaaaaatccaagaatagtatccagtggaagggcgtaggagcaggttgtaacactaaagaagtgattgatcgtctgcgctaccttaaagccgaaattgaggatctcgagctcaaggagcgggaactcgatcaacagaagctctggcttcagcaaagtattaagaatgtcatggatgactccataaacaaccggttttcttatgtgacccacgaagatatttgtaactgctttaatggagacacgctactggctatccaggcgcctagcggcacccagctggaggtcccaatacctgagatgggtcaaaacggacagaaaaagtaccagatcaacttgaaatcacacagtggtccgattcacgtgctcttgataaacaaggagagctcgagctctaaacctgtagtcttcccagtaccacctcccgacgatttaactcaaccctcttcgcaaagcctaacccctgtcaccccacagaaatcaagtatggcaactcagaacttacctgagcagcacgtctcggaaaggagtcaagctttgcaacagacatctgccactgacatcagttccgggagcatctcaggggatatcattgacgagctgatgtcctctgatgtatttccactgcttcgattgtcccctacccctgctgatgattataattttaatctcgatgacaacgagggagtctgcgacctgttcgatgtccagatcctcaattactag

SEQ ID NO: 29941 - DNA, 96 bp, synthetic construct
  source 1..96: mol_type = other DNA; note = Synthetic coding sequence
atgactgtgccgtggagaccaggcaagaggcgtattacctacaaggaggaagaagacttgaccctacagccacgcagctgtcttcagtgttcctag

SEQ ID NO: 29942 - DNA, 489 bp, synthetic construct
  source 1..489: mol_type = other DNA; note = Synthetic coding sequence
atgaacaaccagaagcagcagaagcccactttatctggccagcgcttcaagacgcgcaagcgcgatgaaaaggaacgcttcgacccgacgcagttccaggattgcattatccagggattaacggagactggcaccgatcttgaggcagtcgcaaagtttctggacgcctccggagctaagctcgattatcggcgttatgctgaaactttatttgacatcctcgtggccggaggtatgctggcgccaggtggtactttggccgacgacatgatgcggacagacgtgtgtgtgtttgctgctcaagaggacttggaaacaatgcaggcatttgctcaagtctttaacaaactgataaggcgatacaaatacctggagaagggcttcgaggatgaggtgaagaagctgttgctgtttcttaagggcttctcggaatccgaaagaaataagctggctatgctgaccggcgtgctgcttgcgaacggcacctag

SEQ ID NO: 29943 - DNA, 270 bp, synthetic construct
  source 1..270: mol_type = other DNA; note = Synthetic coding sequence
atggccgctgcaactggcgacccaggtctgagcaagctccagttcgccccattcagctcagctctggatgtgggattttggcacgagctcacccagaaaaaactgaatgagtatcgactggacgaagccccaaaggacattaagggatactattacaacggtgactccgccggactccccgctcggcttactctcgaatttagcgctttcgatatgtcagccccaaccccagcgcgatgctgcccggctatcggcaccttgtacaactag

SEQ ID NO: 29944 - DNA, 2025 bp, synthetic construct
  source 1..2025: mol_type = other DNA; note = Synthetic coding sequence
atgcagaccagtagtagtaggagcgtccacctttcagaatggcagaagaactacttcgcgatcacctcgggcatctgcaccggcccaaaagctgacgcttaccgggctcaaattctaagaatccagtacgcttgggctaactccgaaatctcccaggtatgtgccaccaaattgttcaaaaaatacgctgagaaatacagcgcgataatcgattccgataatgtggagtctggtctgaataattatgccgaaaacatcctgactttggcagggagccagcaaactgactcagataagtggcagagtgggttgagcatcaataacgtcttcaaaatgtctagtgtgcagaagatgatgcaggccggaaaaaagttcaaagattcgcttctggaacccgctctggcgtcagtggtgatccacaaggaggccactgtgttcgatctccctaagttttctgtatgtggttcaagccaggagagcgacagtttgccaaactccgctcacgacagagaccgcactcaagatttccccgagtcaaatcgcttgaagctccttcagaatgcccagccccctatggtcaccaatactgccagaacatgccccacgttttcggcccctgtaggagaaagtgccactgctaagtttcatgtcacacctctttttggcaacgtgaaaaaagagaatcattcctctgcaaaggaaaacatcggacttaacgtctttttgtccaaccagagctgctttcctgccgcttgtgagaacccacagaggaaatctttttacggttccggaacgattgacgccttaagcaatcctatacttaacaaagcgtgctccaagacagaagacaatggccctaaggaggatagtagtctccctacatttaagactgcgaaagaacagctttgggtggaccagcaaaaaaagtatcatcagccacaacgggctagcggctcgtcttatggtggcgtgaagaagtccctgggagcatcgagaagtcgaggaatcctgggaaagttcgtgccgcctatacccaagcaggacggcggagagcagaatggagggatgcaatgcaagccttacggcgcaggtcctacagaaccagcacaccccgttgacgaacgcctgaaaaaccttgaacccaaaatgatagaattgattatgaatgaaatcatggatcatgggcctcctgttaattgggaagacattgccggtgttgaatttgccaaggccactatcaaggaaatcgtcgtgtggcctatgctccgccctgacatcttcaccggccttaggggaccccctaaaggcattctgctctttggaccccctgggacaggaaagactttgatcggcaagtgcattgcatcacagtctggcgctacattcttttctatttcagcctcttctttaacttctaaatgggtgggagagggagagaaaatggtccgtgcattgtttgccgtggcgagatgccagcaacctgctgttattttcatcgatgagatcgactccctgcttagccagcggggagacggtgaacacgagagcagccgaaggatcaaaactgaatttcttgtgcagttggacggagccaccactagctcagaggatcgcatcctcgtagtgggagccaccaacagacctcaggagatcgacgaggctgcacgtagacgtctagtgaagcgtctttacattcctctgcctgaagcctccgccagaaagcaaatcgtaatcaatttgatgtcaaaggagcagtgctgtcttagcgaagaagagatcgaacagattgtccagcagagtgacgcattttccggagcggatatgactcagctctgccgtgaggctagcttaggacccatacgctcactacagactgccgacatcgctactatcacccccgaccaagtccgacctattgcttatattgactttgagaacgcattccgcacggttcggcctagcgtgagtcctaaagatctggaactctatgagaattggaacaaaacattcgggtgtggtaagtag

SEQ ID NO: 29945 - DNA, 1923 bp, synthetic construct
  source 1..1923: mol_type = other DNA; note = Synthetic coding sequence
atggaaaaccagctcgccaaatccaccgaagagcgcacattccaataccaagactccctcccttcactgcctgtgccatcactggaggagtcactgaagaagtacttagagtccgtgacaaggacttgttatcagatccggggactggatcccgatgctaaacgagggtttttggatctgacgagggaagggatccaggtgaaaccatttgcaaaccaggaggaatacaagaaaaccgaggagattgttcagaaatttcaatctggcattggcgagaagctgcaccagaaattgctcgaacgcgcaaaagggaaaaggaattggctggaggaatggtggctgaatgtcgcctacctcgacgtccgcatcccgtcacaactaaatgtcaactttgccggtccagctgctcacttcgagcactattggccgccaaaggaggggacgcaactggaacggggatccattaccttatggcacaacttgaactactggcagctgctgaggaaggagaaagtgcccgtgcacaaagtgggtaacacacccctggacatgaatcaatttcgtatgttgttttcaacttgcaaagttccgggaatcacacgcgatagcataatgaattacttcagaaccgaatctgaaggcagaagccccaaccacattgtggtcctttgtcgaggacgcgctttcgtctttgatgttatccacgagggctgcctagtcactcccccagagcttcttcggcaattgacctacatacacaaaaaatgccattctgagcccgacggccctggcatagctgcccttacctccgaggagcgcaccaggtgggccaaagctcgggagtacctcattggcttagatccagagaaccttgctttgctggaaaaaatccaaagttctctgttggtgtactccatggaggactcatctccacacgtaacgccggaagactactccgaaatcatagcagccatcctcattggtgatcccacggttcggtggggagacaaatcttacaatctgatctcattctctaatggagtctttgggtgcaactgcgatcacgcgccatttgatgcaatgattatggtgaatatctcgtattacgttgatgaaaaaatattccagaatgaagggagatggaagggctcagaaaaagtgcgagacatcccacttcctgaagagcttatcttcattgtggacgagaaagtgctgaatgatattaaccaggcgaaagcccagtacttgcgggaagccagcgatctgcaaatagccgcatatgccttcacttcatttggaaaaaaattgaccaagaataagatgctacaccccgacacgtttattcagctggccttgcaactggcttattaccgtctccatggtcaccccggatgttgttacgagaccgccatgacaaggcatttctaccacggcaggacggagaccatgaggtcatgtacagtggaagctgtcagatggtgtcagtcaatgcaagacccctctgtcaatctgcgtgaaaggcagcaaaaaatgctccaggcctttgcaaaacacaacaaaatgatgaaggactgtagtgcgggtaaaggctttgaccgccatcttctcggtctgttactgattgctaaagaggagggcctgcctgttcccgagttattcactgacccccttttcagtaaaagcggcggtggcggaaattttgtattgtcaacctccttggtgggatacttgcgagtgcagggtgtcgtcgtgcctatggtccacaatggatacgggttcttttaccacattagggacgatcgttttgtggtggcttgtagcgcctggaaaagctgcccggaaacagacgcggaaaaattagtccaactgactttttgtgccttccacgatatgatccaactcatgaacagtactcatctgtag

SEQ ID NO: 29946 - DNA, 474 bp, synthetic construct
  source 1..474: mol_type = other DNA; note = Synthetic coding sequence
atggcaacctccgccccactgcggagcctggaggaggaggtcacatgttccatttgcttggactatctacgcgaccctgtgacaattgactgcgggcacgtcttttgcagaagttgcacgaccgacgtgcgcccaatttcgggctcgcgtcccgtctgccccctgtgtaagaaaccttttaagaaggaaaacatccgacctgtgtggcaactggcatctctggttgagaacatcgagagactcaaggttgacaaggggagacagcctggggaagtgacaagagagcaacaagacgctaagctgtgtgaaaggcatcgggagaaactgcactattactgcgaagatgatggaaagcttctgtgtgtgatgtgccgggagtcccgagaacaccggcctcacaccgcagtcctgatggaaaaggcagcacagccccaccgagaaaaaatactcaaccatctctcaacactaaggtag

SEQ ID NO: 29947 - DNA, 432 bp, synthetic construct
  source 1..432: mol_type = other DNA; note = Synthetic coding sequence
tgaactcggcactttaaggaatctataaagttcatccacgagtgccgtttgcgcggtgaaagctgtctcgtacactgcttggctggtgtttcaagaagtgtcacgctggtcatcgcctatattatgaccgtgacagatttcggatgggaggatgccctgcatacagttcgtgctggacgctcctgcgcaaatccaaacgtggggttccagcggcaattacaagaattcgagaagcacgaggtgcaccagtaccgccagtggctgaaggaagaatatggggagtcgccactgcaagatgcagaggaagcgaaaaatatcctcggaaagtataaggaacaggggcgaaccgagcctcaaccaggagctagacggtggtctagctttcctgcgttggccccactgacatacgataattacacaactgaaacctag

SEQ ID NO: 29948 - DNA, 495 bp, synthetic construct
  source 1..495: mol_type = other DNA; note = Synthetic coding sequence
atggtgaactccgtgatcttctttgatatcaccgttgacggcaagccactgggcaggatctctataaaacaatttgctgataaaatacccaagacagcagaaaactttcgagctctaagtacaggtgagaaaggtttccgttacaagggtagttgtttccatcgcattattcccggttttatgtgccaggggggtgacttcacacatcctaacgggacaggggacaagtccatttacggagagaagttcgacgacgaaaatctgattagaaagcacacggggtcaggaatactttccatggctaacgcagggccaaacacaaacgggtcacagttttttatctgcactgccaagacagaatggctggatggaaagcacgtggcgttcggtaaggtgaaagagagagtgaatatcgtcgaagctatggagcactttgggtaccggaattctaagacgtcaaagaaaattaccatcgctgactgtggccagttctag

SEQ ID NO: 29949 - DNA, 468 bp, synthetic construct
  source 1..468: mol_type = other DNA; note = Synthetic coding sequence
atgagcgaaggggaaagccagactgtgctgagtagtggcagcgaccctaaagtagaatcaagttcaagcgccccagggctcacaagtgtgtcacccccagtgacctccactacctctgccgcttcacctgaagaggaggaggagtctgaggatgagtctgagattctggaagagtctccatgcggcagatggcagaagaggcgcgaggaggtgaaccagaggaacgtgcctggaatagactcagcttacttggccatggataccgaggagggagtggaggtcgtgtggaatgaagtgcagttcagcgagaggaagaattacaagctacaagaagagaaagttcgagcagtctttgataatctgatccagctcgaacatttaaacatcgtcaaattccacaaatattgggccgacatcaaggaaaataaggcgagggtaatttttataaccgaatacatgagttcttag

SEQ ID NO: 29950 - DNA, 837 bp, synthetic construct
  source 1..837: mol_type = other DNA; note = Synthetic coding sequence
atgtggcctttcccatcaagatctctgtttccaccccctactcaggcctggctgcagaccgttagcagcgatcctgaggctcagggttggggcgcttggaacgaaactaaggagatcttgggccctgagggtggcgaagggaaagaagagaaagaagaagaggaggacgcagaggaggatcaggatggggacgcaggttttttactgtcccttctggagcaggaaaacctagcggaatgtcctctgccagaccaggaactcgaggccatcaagatgaaggtatgtgccatggaacaggcggaaggtactccaagaccacccggtgtgcagcaacaggcagaagaggaggaagggaccgctgcaggtcaactgttaagtcccgaaacagtgggctgcccactgtcagggacaccggaggagaaagtagaagccgaccatcgcagtgtgtacgtgggtaacgtagattatggcggaagcgccgaagaactcgaagctcatttctctcgatgcggggaagttcaccgcgtaacaattctgtgcgacaagttctctggacaccctaaagggtatgcttatatcgagttcgctaccaaaggcagtgttcaagcagccgtggagctagaccagtcgctctttcgtggaagagtgatcaaggtcctgccgaagaggaccaatttccctggcatctcttcgacagacagaggagggctgaggggccaccccggatctaggggggctccatttcctcactcaggcctccaggggagacctcggcttcgcccacaggggcagaatagggcacgcggaaagttctccccctggttcagcccctactag

SEQ ID NO: 29951 - DNA, 132 bp, synthetic construct
  source 1..132: mol_type = other DNA; note = Synthetic coding sequence
atgtcagagcaaggcgatctgaaccaggccatagctgaagaaggaggtaccgagcaagaaaccgccacaccagagaatgggatcgtaaagtcagaaagcctggacgaggaagagaaactggaactgcaatag

SEQ ID NO: 29952 - DNA, 390 bp, synthetic construct
  source 1..390: mol_type = other DNA; note = Synthetic coding sequence
atggcagacgaggaattagaggctttgcgcaggcaacgtctagccgagctccaggccaaacatggcgacccaggggacgccgcacagcaggaagccaaacatcgtgaggctgagatgagaaacagcattttagcccaggtattagaccagtccgcaagagctaggctctctaatcttgctctcgtgaaacctgaaaaaaccaaggccgtggaaaactacctcattcagatggccagatacggacaattgtcggaaaaggtttcactggacagtctggaggaactttactgctacctcctgtaccagaatatggccagtaagggacagctgcacctgcactggataaccgagtttcttctcaccctgcgcaggaactgttggcgggagtag

SEQ ID NO: 29953 - DNA, 2286 bp, synthetic construct
  source 1..2286: mol_type = other DNA; note = Synthetic coding sequence
atgaggaagcaggaggtgaggacagggagagaggctggtcagggacacggcacaggctcacctgccgaacaggtcaaggcactgatggatctcctagccggtaaaggctcacagggatcacaggccccacaggccctggatcgcacacctgacgcccctctgggcccttgctctaacgacagtagaatccagcgccaccgaaaagcattactatctaaggtcggagggggacccgagttgggcggaccttggcaccgactcgcatctttgcttttggtcgagggtttgaccgatctgcagctgagggaacacgactttactcaagtcgaagctacaagaggcggaggccacccagctcgcacagtggccctcgatagactgttcctcccgctctctcgagtgtcagtaccgccaagggtctctatcacgatcggggtagccggaatggggaagactacgcttgtgaggcactttgtgaggctctgggcgcatggtcaggtcggaaaggacttttctttagtcttacccctcacattcagagacctgaatacacacgagaaactctgcgccgatcggctgatttgttccgttttcccacatgtaggcgaaccatccctcgctgtggccgtgcctgctagggccctcctgatcttagatggattggatgaatgtcggactcctctcgatttctcaaatactgtcgcatgtaccgatccaaaaaaggaaatccccgtcgaccatctgattacaaacatcatccgcggaaatttgtttcctgaggtctctatctggatcacttcgcgaccgtccgcaagcgggcagatacccggtgggctcgtcgaccgaatgactgagatccgcggatttaacgaggaggagatcaaagtttgtctggagcagatgttccctgaagaccaggccctcctcggatggatgctgtcccaggtgcaagcggatcgggctttgtatctgatgtgtactgtaccagctttctgtagactcaccgggatggccctcggacatctgtggcgttcccggactggaccacaggacgctgagctgtggcctccccgaactctatgtgaactgtactcttggtatttccgcatggccttgtccggcgagggacaggaaaagggcaaagcctcaccaaggattgaacaggtcgctcacgggggtagaaagatggttggaactctaggtcgacttgccttccacggtctattaaaaaagaagtacgttttttatgagcaggacatgaaggccttcggcgtcgacctggccctcctgcaaggagccccttgttcctgcttcctgcagagagaggagaccctggcatccagtgttgcttattgcttcacccacctctcactgcaggagttcgtggcagctgcatattactacggagcctcacggagagctatttttgatctcttcacggagtctggcgtgtcctggcctcgcctcggatttctgacccactttcggagcgccgctcaacgggctatgcaggcagaggacggacgccttgacgtcttcttgaggttcctcagcggcttactgtcccccagagtgaatgccctgctggccggaagcctactggctcagggagagcatcaggcatacaggacccaggttgccgagctgctgcaggggtgtcttagacctgacgccgcagtgtgcgctcgcgctatcaatgtgttgcattgtctccatgagctccagcatactgagctagccagatctgttgaggaagcaatggagagtggcgcattagctagactcaccgggcctgcccatagagcagcactcgcgtacctgttgcaggtgagtgacgcctgtgctcaagaggcaaacctctcactcagtttaagccagggggtgctccaatccctcctgccccagttgctgtattgtcgcaagctgagactcgacactaaccagttccaggaccccgtcatggagcttttgggttctgtcctttcaggcaaggactgccggattcagaagatctctctggccgaaaatcagatctccaataagggagcgaaagcgctagcaagaagcttgctggtcaacaggtcactgacctccttggacctccggggtaattccatcggcccacagggagcgaaagccctcgcagacgccttgaagattaacagaactctgacatctttacgcgtgaaatttatgtaccataaaattgactgcttccggagagtccccgaagcggacgcatgtaacccatctactctcgggggacagggccgatggattacttag

SEQ ID NO: 29954 - DNA, 474 bp, synthetic construct
  source 1..474: mol_type = other DNA; note = Synthetic coding sequence
atggcaacttccgcccctctgcgcagtctcgaagaggaggtgacttgttctatttgtctggattatctgcgggaccctgttacaatagactgtggacatgtattctgtcgttcatgcactactgacgttagaccgatctcaggttcccgccctgtgtgtcctctgtgcaagaaaccattcaagaaggagaacattcggcctgtctggcagcttgccagcctcgtcgagaatatcgagagactgaaggtggataaagggaggcagccaggggaagtaaccagagaacaacaggatgccaagctctgtgagagacaccgtgagaaacttcactattattgcgaggatgacggcaaactattgtgtgtgatgtgccgagaatcgcgcgagcaccggcctcatactgccgtgctgatggagaaagcagctcagccacaccgagaaaaaatcttgaaccacctgtctaccctgaggtag

SEQ ID NO: 29955 - DNA, 1473 bp, synthetic construct
  source 1..1473: mol_type = other DNA; note = Synthetic coding sequence
atgacgattggtaggatggagaacgtcgaagtgtttaccgcagagggcaaaggcagaggtctgaaggccacaaaggagttctgggcagctgatattatcttcgccgagagagcttacagtgccgtagtgtttgactccctggtcaatttcgtctgtcatacatgtttcaagcgacaggaaaagttgcatcgttgcggtcagtgcaaattcgcccattattgcgatcgtacgtgccagaaagatgcttggcttaatcataaaaatgaatgctccgcgattaagagatacggtaaggtgcccaatgaaaatattagactcgcagctcgaattatgtggcgcgtagaaagagaaggtactgggctgactgagggttgccttgtctccgtggacgacctccaaaaccacgtagagcacttcggcgaagaggaacagaaagatctccgtgtggatgtcgacacctttttgcagtattggcccccacagagtcagcagttcagcatgcagtacatatctcatatctttggggtgatcaattgtaatggttttaccctcagcgaccagcggggactgcaagcggtgggcgttgggatcttccctaatctgggcctagtcaatcatgattgttggcccaattgtaccgtaatcttcaataatggtaaccatgaagcagtgaagagcatgttccacactcagatgcgcatagagcttcgagctctggggaaaatatcagagggggaagaattgactgttagttacatcgatttcctgaacgtttctgaagagagaaaacgacagctgaagaagcaatattatttcgattgtacctgcgaacattgtcaaaagaagttgaaggatgacttatttctcggtgtcaaggacaatcccaaaccctcgcaggaagtggtgaaagaaatgattcaattttctaaggacaccctcgagaaaattgacaaagcaaggagcgaaggcttataccacgaggtcgttaaattgtgcagggagtgcctggaaaagcaggagcctgtatttgcagatactaatatctatatgctgcggatgttaagcatcgtgagtgaggttcttagctatcttcaggcctttgaagaggcttctttctacgctagacgtatggtagacgggtacatgaaactttaccatcccaacaatgcacagttaggcatggcggtcatgagggctgggctgactaattggcacgctggcaacatagaggtgggtcacggaatgatctgtaaggcctatgccattctacttgtgacccacggcccaagtcatccgataacaaaagaccttgaggctatgcgggtgcagacagagatggagttgcgcatgtttagacagaacgagttcatgtactacaagatgagagaggcagcattaaataaccagccaatgcaggttatggctgaaccaagtaacgaaccatctcccgctctattccacaaaaaacaatag

SEQ ID NO: 29956 - DNA, 1491 bp, synthetic construct
  source 1..1491: mol_type = other DNA; note = Synthetic coding sequence
atgtggggcagattcctcgcgcctgaggcctccgggcgagatagcccgggtggcgcacggtcctttcctgcaggtcctgattattccagcgcttggctcccagctaatgaatccctgtggcaggcaacaacagtcccatccaaccatcggaataaccatatcagaaggcattccattgcgtcagactcaggggacactgggatcggcacatcctgctccgactccgtggaggaccacagtactagctctggcaccttatctttcaagcctagccagagcctgatcaccttgccaacagcccacgtgatgcccagcaatagcagcgcgtccatatccaaactgcgagaatctctgaccccagacgggagtaaatggagtacgagtctgatgcaaacgctgggcaaccattcgcgaggagagcaagattctagcctggatatgaaggacttcagaccgttgaggaagtggtcaagcctctccaaactgacagccccagacaattgtggccagggtggaactgtgtgccgcgaggagtcccgcaacggactggaaaaaattggcaaagcgaaggcactgacgagccagttgcgcactatcggcccaagttgcctgcatgactccatggagatgttacgcctggaagataaggaaattaataagaaacgctcttccactctcgactgcaaatacaagttcgagtcttgctctaaggaagactttcgagcctcaagtagcacactgcgacgccagcctgtcgatatgacatacagtgctttaccggagtccaagcctatcatgacatcttctgaggcattcgagcctccaaagtacctgatgctaggtcagcaggccgtgggtggcgtgcctattcagccgtccgtgcgaactcagatgtggctcacggaacagctccggactaacccactagaagggagaaacacagaagactcgtattccctggccccatggcaacagcagcagatcgaagatttccgacagggaagtgagacaccaatgcaggttctgacaggatcctcgcgccagtcttatagtccgggataccaagacttttctaaatgggagtctatgcttaagatcaaagaaggcttactgcgacagaaggagattgtgattgaccggcaaaaacaacagattactcacctgcacgagcgaatccgtgataacgaactccgggcacagcacgcaatgctcgggcattacgttaattgcgaagattcttatgttgcttcactacagcctcagtatgagaacacttccctccaaacaccattttccgaggagagtgtctcacacagccagcagggcgagttcgagcaaaaactggcctccacagaaaaagaggtcctccagctgaatgaattcctcaagcagagactctctttattctcggaagagaagaaaaaactggaagagaaggttggcttctccaacaaggtggagctgggacagcagcattttctcagtatctag

SEQ ID NO: 29957 - DNA, 1083 bp, synthetic construct
  source 1..1083: mol_type = other DNA; note = Synthetic coding sequence
atggccgagctccaacagctacaggagttcgagatccccactggccgagaggctctgcggggtaatcacagcgcgcttcttagggttgcagattattgcgaagacaattacgtccaagccacagacaagagaaaggccctggaggaaacgatggcatttacgacccaggccctggcaagcgtggcttatcaagtcggcaacctggcaggtcacactcttcgaatgttggacctgcagggagccgctcttcggcaggtcgaggcacgcatggtgaatatgcatatggagaaagtcgcgcgacgagaaatcgggactctggcgaccgtgcagcgcctgcccccagggcagaaggtaattgcaccggagaacttaccaccgctaaccccatactgccgcaggcccttaaattttggctgcttggacgatatcgggcacgggataaaggatctcagcacccagctgtcccggaccgggacactgtctcgtaagtcgatcaaggctcctgccacccccgctagcgcaacacttggtaggcccccaagaattcctgagccagtacatctccctgtggtgccagatgggcgattgtcggccgctagtagcgctttcagccttgcctctgccggtagcgctgagggtgtagggggagcacccacacccaaaggacaagcagctcctccagcaccaccgcttcccagtagtctcgacccgccacctccgccagctgctgtcgaggtgttccaacggcctccaacactggaagaactcagtcctccgcctccagacgaggagctgcctttacccctggatctgccccctcccccacccctggatggagacgaactcggtttgccaccgccacccccaggtttcggtcctgacgaaccctcctgggtgcctgcatcatacctggagaaagtcgtgactctgtatccctacacctcccagaaagacaacgaactgtctttctctgagggtactgttatctgtgtcactagacgatactcggacggttggtgtgagggtgtgtcctccgagggcaccggcttttttccaggtaactatgttgaaccatcctgttag

SEQ ID NO: 29958 - DNA, 201 bp, synthetic construct
  source 1..201: mol_type = other DNA; note = Synthetic coding sequence
atgctgcggtgcggccagatgatcttcgcacaggccctggtctgccggcacctaggtcgggattggcggtggacccagcggaaacgacaacccgatagctacttcagtgtgctgaacgccttcatcgatcgcaaagactcctactattctatccatcagattgctcagatgggagttggcgagggaaaatcgattgggtag

SEQ ID NO: 29959 - DNA, 1476 bp, synthetic construct
  source 1..1476: mol_type = other DNA; note = Synthetic coding sequence
atggaacagccccctgctccgaagagcaagcttaagaaacttagtgaagactccctgaccaaacaacccgaggaagtctttgatgttcttgaaaagttgggggaagggagctatgggtctgtgtttaaagccatacacaaggagtccggccaggtcgtagccattaaacaggtccccgttgagtccgacctgcaggagatcatcaaggagatttccataatgcaacagtgcgacagtccttacgtggtaaaatactacggatcttacttcaagaacaccgacctgtggattgtcatggaatactgcggcgctggatctgtgagtgatatcattcgtctccgaaacaagacactcatcgaggatgagattgcaaccatcctgaagtcaaccttgaagggcttggagtaccttcacttcatgcgcaagatccatagagatatcaaggctgggaacatcctcttaaacacagagggacacgccaaactggcagattttggagtcgcaggtcagctgactgacacaatggctaaaagaaacacagttattggaactcctttttggatggccccagaggtgatccaggagattggatacaactgtgtagccgatatttggtctttaggcataacctctatagagatggcggagggaaagcctccgtacgcagatatccacccaatgagggccatctttatgattccaacaaacccacctcccaccttccgaaaacccgagctgtggagcgacgactttaccgacttcgtgaaaaaatgtctggtcaagaacccggaacagcgggctacagccactcagcttctccagcacccttttattaaaaacgcaaaacccgtttcgatcctccgcgacctgatcacagaggctatggagatcaaggccaaaagacacgaggagcaacagcgagagctcgaggaggaagaggaaaacagcgatgaagatgagctggacagtcataccatggtgaagacttcagtggaatcagtcggcacaatgcgcgctacttctactatgtctgagggagctcagaccatgatcgaacacaactccacgatgctcgagagcgatctagggactatggtcatcaacagcgaagatgaggaagaggaagacgggactatgaaacgcaacgccacgagcccacaagtgcagcgcccatccttcatggattatttcgacaaacaggacttcaagaataaatcacacgagaattgcaatcagaatatgcacgaacccttccccatgtctaagaatgtgtttcccgataactggaaagtgcctcaggacggcgacttcgacttcttgaagaacctctcactagaagaactgcagatgcgcctgaaggctttagatcctatgatggaacgggagattgaagaattgcggcaacggtatacagcaaaacgtcagccgatattggacgccatggacgccaagaagcgcagacaacagaacttctag

SEQ ID NO: 29960 - DNA, 126 bp, synthetic construct
  source 1..126: mol_type = other DNA; note = Synthetic coding sequence
atgtccagcaagggcagttcaacagatggcagaactgatctggccaatggtagtctgtctagttctcccgaagagatgagcggcgcagaggagggaagagaaacaagttctggaattgaggtttag

SEQ ID NO: 29961 - DNA, 945 bp, synthetic construct
  source 1..945: mol_type = other DNA; note = Synthetic coding sequence
atgcctaatgtcgcggaaaccgaaaggtctaatgattcaggtaatggagaacacaagagtgagcgaaagagcccggaggagaatctgcaaggagcagtgaaatcattctgcacctctgcctccggggcacctctgggtcccaaaggtgatggtcactatccctggtcctgccccgtcactcatactagagaaaagatttacgcaatctgttccgactatgccttcctcaatcaggccaccagtatttataagacgcctaacccgagcaggtctccttgtctgcctgatagcacttccttatccgccggtaataactcatctcgatatattgggatcccaacctctactagcgaaataatctacaacgaggagaactctctggaaaacctatccaacagcctgggcaaactgccattggcctgggagatcgacaagtcagagttcgatggcgtaacgactaactctaagcacaaatctgggaatgcgaaaaaacaggtgtccaaaaggaagacatccgacaagaagggacggtaccagaaggagtgtccacagcactcaccactggaggatataaaacaaaggaaggttctggacctgaggaggtggtactgcatcagtaggcctcaatataagacatcctgtggcatcagcagtctgatcagttgctggaatttcctatatagcaccatgggtgcaggaaatcttccaccaatcacccaggaggaggccctacacattctagggttccaaccccctttcgaggatattaggttcggccctttcaccggaaatacaacgctgatgcggtggttccgccagatcaatgatcacttccatgtgaagggatgctcatatgtgctctacaaaccacatggtaaaaacaaaacagctggcgagacagccggtgatttgtcccaccatcggaaactgaacatcgggagctag

SEQ ID NO: 29962 - DNA, 1500 bp, synthetic construct
  source 1..1500: mol_type = other DNA; note = Synthetic coding sequence
atgcctgaaatcagggtgactcccctgggcgctggacaggacgtgggtcggagctgcatattggtgagcatcgccggtaaaaacgttatgctcgattgtggaatgcacatggggttcaatgatgatgtggatgacgaacttgaaatcaaagcatattatgccggtcacgtgctaggagctgcaatgtttcagatcaaggtaggctccgagagtgtggtgtacactggtgattacaatatgactccagaccggcacctcggtgccgcttggatcgataaatgcagacccaacctgctgattacagaaagcacctatgctacaaccatccgtgacagcaagaggtgtcgcgagagggattttttaaagaaagtgcacgaaactgtggagcggggtgggaaggtcctgattcctgtatttgccctggggagggcgcaagagctatgcatactcctcgagactttctgggagcgaatgaatcttaaggtgcccatttactttagtactggcttgacagaaaaagctaatcactactataaactgtttattccctggaccaatcagaagatccggaagaccttcgtccaacggaacatgttcgagtttaagcacattaaagcgttcgacagggcttttgcggataatccgggacccatggtggtttttgcaacacctggcatgctccacgctggacaaagcctccagatatttcgtaaatgggccggtaatgaaaagaatatggtgatcatgcccggttactgcgtccaggggacggtgggacacaaaatcctttccgggcaaaggaagttggagatggaaggcaggcaggtgctggaagttaaaatgcaggttgagtacatgtcgttttccgcccatgctgatgccaagggaatcatgcagctggtaggccaggcggagccagagagcgtactcctggtacacggtgaagccaaaaaaatggagtttctgaaacagaaaatcgagcaggagctgcgcgtgaactgttacatgcccgcaaacggagaaactgtcaccttgccaacaagcccaagtatccctgtggggataagcttgggacttctgaaaagggaaatggcgcaagggcttctgccagaggcaaaaaagcccaggcttctccacggtactttgataatgaaggactctaatttcagactcgtgtcttctgaacaagctttgaaagagttggggcttgccgagcatcagctgcgtttcacgtgtcgcgtgcaccttcatgacacaaggaaagaacaggaaacagcccttcgtgtgtactcccaccttaaaagtgtgctgaaagatcactgcgtgcagcacctgccagacgggtccgtcacagtggaatcagtactccttcaggccgcagccccaagcgaagacccaggcacgaaggtcttgttggtctcatggacttatcaggatgaggagctgggcagcttcctcacttccttactcaaaaaaggcctaccccaagctcccagctag

SEQ ID NO: 29963 - DNA, 396 bp, synthetic construct
  source 1..396: mol_type = other DNA; note = Synthetic coding sequence
gggacaatcagctgtagcactggcaccctccaacgccgaaatctaggacccgagcggcagaccggccttctgctgctcggcatgaaagagaaccaagagcttaagacaatccaggccaatctctccaggcagcgggtagaacatcagtgtttatcctccgaggagctcaagcagaggtttcctaatatccgtctgccaaggggcgaagtggggttgctggacaattcggggggtgtgatatatgcctataaagccctccgcgcactacaggatgctataaggcagctcgggggtattgtccgcgatggagaaaaggtagtggaaatcaatcctggcttgctggttaccgtaaaaactacgagtagatcataccaagcgaagagcctcgtcatatag

SEQ ID NO: 29964 - DNA, 687 bp, synthetic construct
  source 1..687: mol_type = other DNA; note = Synthetic coding sequence
atgagcagagagcggggatccaggtccgaggaaccaggcgctggaaatcgggaatccggatctcgcgaaccgggactcgccgcagccgcaatgtcaaccgtggacttggcaagggtgggggcttgtatcctcaaacacgctgttactggtgaggccgtcgagctgaggtccctatggcgagagcacgcttgtgtggtagccggactcaggcgatttggatgcgtggtgtgccgctggatagctcaagacctgtcaagtctggctggtctcttggatcagcacggcgtgagactggtaggggttggccctgaagcactaggtctgcaggagtttctcgacggggactacttcgcaggggagttatacctcgatgagagcaaacagctctacaaagaactgggctttaaaaggtacaattcactttcaatcctcccagcggctctcggtaagcccgttcgcgatgttgccgcaaaggccaaggccgtggggattcagggcaatctaagcggtgacttgcttcagagcgggggactcctggtggtatctaagggaggtgataaggtgctcttacactttgtgcagaagtcacctggagattacgtacccaaggagcatatcctgcaggtgctgggcatttccgccgaggtgtgtgcaagtgacccccctcagtgtgacagggaggtgtag

SEQ ID NO: 29965 - DNA, 654 bp, synthetic construct
  source 1..654: mol_type = other DNA; note = Synthetic coding sequence
atgaacttcagcgaggtatttaaactgtcctccctactgtgcaagttctccccggacggcaagtatctggccagttgcgtgcagtaccgactcgtggttagggatgtaaacacactccagatactgcagttgtacacgtgcctggaccagatccagcatattgagtggagtgcagattcactctttatcctgtgcgcaatgtacaagcgaggactggtgcaggtctggtccctggagcagcctgaatggcattgcaagatcgacgaaggatccgccggactcgttgcgtcttgttggtctccagacggcaggcacatcttgaatacgactgagttccacctgagaatcactgtgtggagcctttgtaccaagagcgtgtcatatatcaagtatccaaaagcttgcctacagggtattacctttacccgggatggtcgatacatggcacttgcagagcggcgagattgtaaagactatgtgagcatcttcgtgtgctccgattggcagctgctccgttacaaaattctgctgtactctttagatgggagactgctgtccacctactcggcgtatgagtggagccttggtataaaatccgtggcatggagtcccagtagccagtttttggcagtgggctcatacgacggaaagtag

SEQ ID NO: 29966 - DNA, 483 bp, synthetic construct
  source 1..483: mol_type = other DNA; note = Synthetic coding sequence
atggaagcagagcggcctcaggaggaggaagacggggagcaaggccctccccaggatgaggaaggttggcctccaccaaacagtacgacccgcccttggcggtcggccccacccagcccacctcccccaggcacccggcacacagcattagggccacggagtgcgtccttactgagtctccagactgagctgcttctggatctggtcgcagaagcccagtctcgacgccttgaagagcagagagcaactttctatacaccacagaacccttcatcactggctccggcaccactacgccctctagaagatcgcgagcagctctatagcacgatactgtcccatcagtgccaacggatggaagcccagaggtcagaacccccattgcctcccggaggccaggaactgctcgaactgctgctgcgggtccagggtggcggaaggatggaggaacaacgatcaagaccgcctactcacacatgttag

SEQ ID NO: 29967 - DNA, 951 bp, synthetic construct
  source 1..951: mol_type = other DNA; note = Synthetic coding sequence
atggaggaaaataatctgcaatgttccagcgtggtggacggcaactttgaagaagtgccgagagaaacagccattcagttcaaacctcccttatatcgccagcggtaccagttcgtcaagaacctggtggatcagcacgaacctaaaaaggtggctgatctggggtgtggcgacactagcctgctgagattgctaaaggtgaacccatgcatcgaactgctcgtaggggtggatatcaatgaggacaagctacgatggcgcggagactctttggccccttttctgggggactttctgaagccacgcgatctcaacttgaccataaccttgtatcatggaagcgtggtggaacgggattctcggttactgggctttgatcttattacatgcattgagctgatcgagcacttggacagtggcgacctggcaagattccccgaagtggttttcggatatctctcaccctctatgatcgtcatttctacaccgaactccgagttcaaccccctattccctagtgttacacttcgtgatagcgatcataagttcgagtggacgcgcatggaatttcagacttgggccttatacgtggccaacagatatgattactctgtggaattcaccggagtgggggagcctcctgccggtgccgaaaacgttggatattgtacccagataggtatcttcagaaaaaatggcggaaaagctacagagagctgtctgagtgaacagcacgaccagcacgtttataaggctgtgttcaccacatcatatcccagcttacaacaggagcggttcttcaaactggtgcttgtcaatgaagtctcacagcaggtggagtccctccgggtctcccatctgcctcgtcggaaggagcaggccggagagagaggggacaaacccaaggacattggcggatctaaagcccctgtgccatgtttcgggccttag

SEQ ID NO: 29968 - DNA, 1056 bp, synthetic construct
  source 1..1056: mol_type = other DNA; note = Synthetic coding sequence
atgtggacaccaaggcccgcactgcatgtgcacgtcattctgtacagccccattcaccgttgttatgcaagggccgaccccactatgggacgaatttgggttgacgcagccgttccctgcctggaagagtgcggcttcttgcttcactttcgggatgggtgctatcacctggagacaagcacccaccacttcctctctcatgtagaccggctgtttagccagccatcaagccagactgccttccatatgcaggtgcggccagggggtctcgtggcactatgcgacggagaaggcggaatgctatatccacagggaacgcacctattactgggcatgggctgtaatcctatgaggggtgaggagtggtttattttacagcattgtcctacctgggtcagcttgcgcagtaagactggacgtttcatttccgtgatctatgatggcgaggtacgggctgcatcggagcgcctgaacaggatgagcctgttccagttcgaatgtgatagcgagagtccaacggtccaactcaggtctgctaacggctattatctgagtcagcggcgtcaccgtgcagtgatggccgacggccacccactcgagagcgacacttttttccgcatgcattggaactgcggacgaattatattacagtcatgtaggggaaggttcttgggcattgccccaaacagtctcctgatggccaatgtgatcttgcccggaccaaacgaagaatttggaatcctgttcgctaacagatcttttctcgtcctgcgagggaggtacgggtacgtgggctccagttctggccacgacctgatccagtgcaatcaggaccaacctgaccgaatccatcttctgccctgtcgacctgggatctaccactttcaggggggtatcctcctggtaaataatatcctatggcacctttctcccctgggccaggtctgcccccagttactgtaccgggcttcaggcgagcagctgactcactgtacaggccctcagtggctgttgcacgcttctcggccaaagtggcatccagttggccgtcaatag

SEQ ID NO: 29969 - DNA, 333 bp, synthetic construct
  source 1..333: mol_type = other DNA; note = Synthetic coding sequence
atgcaaatttcaagcgagaaggaagaggatgacaatgagaaacgtcaggacccgggtgataattgggaggaggggggaggcggtggcggtggcatggagaagtcctctggcccatggaacaagaccgctcctgtccaagccccacctgccccagtcattgtcactgagactcctgagcccgcaatgacttccggggtatacagaccccctggcgctaggctgactaccacacggaaaactccacagggccctcccgagatttactctgatactcaatttccctcattgcagtccacggccaagcacgtggaaagccggaagtacctcaagtag

SEQ ID NO: 29970 - DNA, 972 bp, synthetic construct
  source 1..972: mol_type = other DNA; note = Synthetic coding sequence
atggaaggccacgatcctaaggagcccgagcaactgcgaaaactcttcatcggagggctgagctttgagaccactgatgattctttaagagaacacttcgagaagtggggaaccttgacggactgtgttgtcatgagagaccctcagactaaaagaagcagaggcttcggattcgttacatactcatgtgtggaagaggtggacgctgccatgtgcgccagaccacacaaggtcgatggcagggtcgtggaacccaagcgcgcagtgagtcgggaggattcagtcaaacccggtgctcaccttactgttaagaaaatctttgtcggcggtatcaaggaggacaccgaagaatacaacctgagggattacttcgagaagtatggaaagattgaaaccatcgaggtgatggaggatagacaaagtggcaaaaagagggggttcgccttcgtcaccttcgacgaccacgacactgtggataagattgtcgtgcagaagtaccacacaattaacggacacaattgcgaggtcaagaaagctctgtccaagcaggagatgcagtccgctggcagccaaagaggcaggggaggtggtagtggcaattttatgggacgtggcggtaactttggtgggggaggaggtaatttcggtcgtggtggcggaaattatggtggaggacccggatactcctctagagggggatacggaggaggagggcctggttacggaaatcagggtggtggatacggtgggggagggggatacgatggttataatgaaggcggtaacttcggcggagggaattacgggggaggcggtaattataacgactttgggaattattccggccagcaacagtcaaactacggccctatgaaggggggatcatttggagggaggtcatccggttctccttacgggggtggctatggcagtgggggtggaagtgggggttatgggtctagaagattctag

SEQ ID NO: 29971 - DNA, 291 bp, synthetic construct
  source 1..291: mol_type = other DNA; note = Synthetic coding sequence
aacattcaattggtcgctgatggctgttgtaacctgcagaagcagatccaaattacacagctcttcggggtgcctgtcgttgttgctttaaacgtctttaaaacagacactcgggcagagattgacctggtctgcgagctggcaaaacgtgcaggggctttcgacgcggtcccgtgctaccactggtcagtgggaggcaaaggtagcgtcgatctcgcacgagcagtgcgggaggccgcaagcaaacgctcgcgctttcaatttctctatgacgttcagcctttcagctag

SEQ ID NO: 29972 - DNA, 483 bp, synthetic construct
  source 1..483: mol_type = other DNA; note = Synthetic coding sequence
atgaccgacgtaccagccacatttactcaggcagagtgcaacggagacaagcccccagaaaacggtcagcaaactataaccaagattagcgaggagcttactgacgtcgactcccccctgcctcattaccgtgtggaaccatcactggaaggcgcattaaccaaggggtcccaagaagaacgcagaaaactccagggtaacatgttacttaatagtagcatggaggataaaatgctgaaggagaaccccgaggagaagcttttcatcgtgcacaaggcaatcaccgatctgagcttgcaggagacatctgctgatgagatgactttccgcgaggggcaccagtgggaaaaaatccctctctctgggagcaaccaagaaatcaggagacagaaggagcgtattaccgagcagccactgaaggaggaggaggacgaagacagaaagaataaaggccaccaggctgccgagatagagtggctctag

SEQ ID NO: 29973 - DNA, 480 bp, synthetic construct
  source 1..480: mol_type = other DNA; note = Synthetic coding sequence
atggctaccagcgcgccactgaggtcactcgaagaagaagtcacttgctcaatctgcctggattatctgcgagaccccgtaacgatcgactgtggtcatgtgttttgtagaagctgcactactgatgtgcgcccaatatcgggcagcaggcctgtgtgtccattgtgcaagaagccttttaagaaagaaaatatcaggccagtttggcagctcgaaaaaatcctcaaccacctgtctactttgcggagggatagggacaagatccagggattccaggcaaaaggagaagcggatattctcgcggctttaaagaagttgcaggaccagagacagtacattgtggctgagtttgagcagggccaccaattcctgcgtgagcgggaagagcaccttctggaacaactggccaagctggagcaggagctgactgaaggcagggaaaaatttaagtcaagaggcgtgggggagctcgctagatag

SEQ ID NO: 29974 - DNA, 432 bp, synthetic construct
  source 1..432: mol_type = other DNA; note = Synthetic coding sequence
atggactcaagccagcagaaaacctttcgcggacatgatgcccctgtgctgtccttgtcctttgatccaaaagatatcttccttgcatcagccagctgcgacggcagcgtgagagtttggcaaattagcgaccaaacttgtgctattagctggcctctcctgcagaaatgcaacgacgtgatcaacgcaaaaagtatctgccggctggcgtggcagccaaagtcaggaaaactgctggcaatcccagtcgagaaatccgtcaagttgtaccggagagagtcatggtcccaccagttcgatctgtctgataacttcatcagccaaactttaaatatcgttacatggtccccctgcggccagtatctcgctgctggttctataaatggcctgattattgtatggaacgttgagacaaaagattgtatggaatag

SEQ ID NO: 29975 - DNA, 2109 bp, synthetic construct
  source 1..2109: mol_type = other DNA; note = Synthetic coding sequence
atgactgagagatgcagcctgtggtctgcactgtctgccgcagcctgttgcttctaccgcggttctttcgtgcaggtgcagtttagtaaggagaagtatattctcgactctagcccggagaaactccacaaggagctggaagaggaactgaagctcagcagcacagacctccggtcccatgcctggtatcatggccgtattcccagagaagtgtccgaaaccttagtgcagaggaacggcgacttcctgatcagagactccttgacatccctcggtgattacgttctcacatgtaggtggcggaatcaggctctgcattttaagatcaacaaagttgtggtaaaggccggagaatcctacactcatatacagtacctcttcgaacaagaatcctttgaccacgtcccggctctcgtcagatatcatgtgggcagtagaaaagctgtgtctgagcagtcaggggctataatctactgcccagtgaacagaacttttcccctgagatacctggaggcctcttatggattgggacaagggtcatcaaagcccgcttcccctgtaagtccaagtggacctaaaggctctcacatgaaaaggcgctccgtgacaatgaccgatgggctgaccgctgacaaggttacgcgcagcgatggatgtccaacaagtactagcttacccaggccgagagattccatccgatcatgcgccctgagcatggatcagattccagacttgcactcccccatgtcgcctatctccgagtccccctcatcgcccgcatatagcacagttacccgcgttcatgctgcacctgccgctcccagcgccacagctctgcccgcaagtcccgtcgcacgtagaagcagcgagcctcaactgtgccctggaagcgctccaaagacccatggagaatctgacaagggaccacacacttccccctcccacaccctgggcaaagcctcccccagccctagcctgtcatcgtatagtgatcctgatagcggacactactgccaacttcagcctcctgtccggggatcgcgcgagtgggcagccactgaaacaagcagtcagcaggcgagatcatacggagaacgactgaaggaactatctgaaaatggcgcaccggagggagattggggtaaaacttttaccgtacctatcgttgaagttaccagttcatttaaccccgctacattccagtctctgctgattccacgcgacaatcgaccgctcgaggtgggtttgctacgcaaagtgaaagaactcctggcagaggtggacgcaagaacactggcacgccatgtcactaaagtggactgtctggtggcacggattttgggagttaccaaagagatgcagactctaatgggagtacgctggggaatggagttgctgacactgcctcatgggaggcagctgaggcttgacctgctggagcgttttcatacaatgagcatcatgttagctgtggacattctgggatgtacgggctcagctgaagaacgagccgcactgctgcataagaccatacaactagccgctgagcttcggggaaccatggggaatatgttttcatttgctgccgtaatgggagcccttgatatggctcagatttcccgactggagcagacatgggtcacactgcggcagagacatacagagggcgctattctgtatgagaagaagcttaaaccgttccttaagtctcttaatgagggtaaggaaggccctcccctgtccaatacaactttcccgcacgtcctgccccttatcaccctgcttgagtgtgacagtgcgcctccggagggtcccgagccatggggatcgacggagcacggggtcgaagtggtgctcgctcatttagaggctgctaggacggttgctcaccatggaggactctaccatactaacgcagaagtgaaactgcagggatttcaggcccgacctgagttgttggaggtcttctcaactgaatttcagatgcggttgctttggggtagccagggagcttcgagctcccaggcacggcgttacgagaaattcgacaaggtgttaaccgccctttctcacaagcttgaacctgctgtccgctccagtgagctgtag

SEQ ID NO: 29976 - DNA, 585 bp, synthetic construct
  source 1..585: mol_type = other DNA; note = Synthetic coding sequence
atgaccgaagacagccagaggaattttcgcagcgtctactacgaaaaggtgggttttcgcggagtggaggagaagaaatcactggagattttgctcaaagacgacagactgggcattctgccaccacatcacgagtcacacgccaaagtgatgatgtataggaaggagcaatatctcgatgtgctgcatgccctgaaggtggtcagatttgtttctgatgccactccccaagccgaagtctatttgcggatgtaccagttggagtcaggtaagctacccaggagcccttcatttcctctagaacctgacgatgaagtgtttctggcaatcgccaaggcgatggaggaaatggtggaagacagcgtggactgctattggataacgaggaggtttgtcaaccaattgaacactaagtacagagactccttaccacaactaccgaaggcttttgaacagtacctgaacttagaggacggtcgactcctcacccacctgcgcatgtgttcagccgctccaaagctgccttacgatctgtggttcaaaagatgctttgctgggtgcctccctgagtcgagtcttcaatag

SEQ ID NO: 29977 - DNA, 2334 bp, synthetic construct
  source 1..2334: mol_type = other DNA; note = Synthetic coding sequence
atggaacccaaggaggccacagggaaagagaatatggtcaccaaaaagaagaatctggcattcctgaggagcaggctctacatgcttgaaagacggaagaccgatactgtggttgaaagctccgtgagtggggatcactctggcacgcttcgccgatctcaatcagatagaaccgaatataaccaaaaattgcaggagaaaatgaccccccagggggagtgtagcgtggctgaaacactgacacccgaggaggagcaccacatgaaacggatgatggccaagcgcgagaaaataattaaagagttgatccagactgaaaaggactacctgaatgatttagagctgtgcgtgagagaggtggtgcaaccgctgcgaaacaaaaaaaccgataggctggatgtcgatagcctcttctccaacatagaatccgttcaccagatttctgcgaagttgctgtctttactggaggaggctacaaccgacgttgaacctgctatgcaggtgataggtgaagtattcctacagattaagggcccactggaagatatctataagatttactgctaccatcacgacgaggcacatagtattctggagtcttacgaaaaagaggaggaactgaaggagcacctttcccactgtattcagagcctcaagaagatttacatgcaggaaggaaaaccgaatctcttggacatgggcagtctgatgattaagcctatccagagagtgatgaaatatccgctcctcttgtgtgaactgagaaactccacacccccttcccaccccgactaccgggctctggacgacgcattcgccgctgtgaaagatattaacgttaacatcaatgagctcaagcggagaaaggatttggttttgaagtataagaagaatgatgaggatgaaagtcttaaggataagctcagtaagttaaatatacactccatctctaagaaatccaagcgcgtgaccaaccatctcaaaattcttacacgtggtgaatcccaagttaaggataacacatttaaccgtgaagaaaagttgttcagagcactcgagaagacagtccggctgtgtgttaagaatatctctctatgtcttcaacacatacaagacgctatgccactggccctgcagagcgtgatggaccttcaggaaatctcttataataaggacgatgaaatggactatagcgagactctgtccaatgctctaaatagctgtcatgacttcgcgagccatcttcaacgactcattctaacccctttgtcagccttgctgagcctcttccccggtccccacaagctgatacaaaaaagatacgacaaactgctggattgcaactcttacctgcagcgctctaccggggaggagagtgatctggctaaaaaggagtacgaggcactcaacgcccaactggttgaggagctgcaggcattcaaccaagctgcccgaaaaatcctgctgaattgcctttgttcattcatcaccttgttacgagatctgatgttggtcgcccaacaggcctacagcaccttggtgcccatgcctctgctggttagctctattagtgagatccagaatcaagtgctcgaggaaatccagaacctgaattgtgtcaaggagaactcagctacattcatagagagaaaattgtcctttgagaaaaaaaaacccgtgcagatactccctgagatgcctcatcaaacagatatacatcggtccaagctgctcagcacttactcagcagaggaactgtaccaggcgaagcggaagtgtaacgctactcaggaatatgatatcaacttgctagaaggcgatttggtggccgttatagaacagaaagatcctctcggaagcacgtcccggtggcttgtggacactggcaacgtcaaaggatatgtgtactcttcttttctgaagccctataatcccgcaaagatgcagaaagtggatgctgagaacagattctgcgacgatgatttcgaaaatattagcctttttgtatcctctagaccagcctcggacagtgtgaccgggacctctgagtcttccataggcgactcttcctcaagcctgagtgggacttgtggtaagtttgagactaacggcactgacgttgattcctttcaggaagtcgacgagcagattttttacgccgtgcatgcctttcaggctcgcagcgatcacgaactgagcctgcaggagtaccagcgtgttcacatcctaaggttttgtgatctcagcggaaataaagaatggtggctggctgaggcccaaggacagaagggttacgtccccgcaaactacctcggaaagatgacgtatgcatag

SEQ ID NO: 29978 - DNA, 543 bp, synthetic construct
  source 1..543: mol_type = other DNA; note = Synthetic coding sequence
tagtcccagccaaagagttttgagaattctcccggagacctgggcaatagctctcttcccaccgcgggatataagcgagcccagacaagtggaattgaggaagagacggtaaaagagaaaaaacgcaaaggaaataagcagtcgaaacatgggcctggcagacctaagggtaacaagaatcaagaaaatgtgtcacatctaagcgtgtctagcgccagcccaacaagctccgtggctagcgcagctgggtctataacctctagcagccttcagaaatcgcccactctattgagaaacggaagtcttcagtctctgagcgtgggttcctcgccggtaggaagcgaaatttctatgcaatacagacatgacggagcctgtcctactacaagcatctataatagcaacgatgttgcggtcagcttccctaacgtggtctccggctcgggcagttccactcctgtctccagttcacatctgccgcagcaaagctctggacacctgcagcaggtaggcgctttatcgccctccgcagtgagctcgtag

SEQ ID NO: 29979 - DNA, 384 bp, synthetic construct
  source 1..384: mol_type = other DNA; note = Synthetic coding sequence
atgacaacgaaaaacctcgaaacaaaggttacagtcacatcttctcccatacggggtgccggagacggcatggaaacagaagagccccctaagtcggtagaagtcacctccggagtccagagccgcaagcaccactctctgcagtctccgtggaaaaaagctgtgccaagcgagtctcccggagtgctccagctggggaaaatgctgacagagaaagccatggaggtgaaggctgtacggattctggtgccaaaagccgcaatcacccacgacatccccaacaaaaataccaaagtgaagtctctcggccaccataagggtgaatttctgggtcagagcgaaggggtgatcgagcctaacaaggaactctccgaagtgaaatag

SEQ ID NO: 29980 - DNA, 1683 bp, synthetic construct
  source 1..1683: mol_type = other DNA; note = Synthetic coding sequence
atgagtgagcactctcgtaactccgaccaggaagagttacttgacgaagaaataaatgaggacgaaatcctagctaacttgtctgccgaagagctgaaggaactgcaaagcgagatggaagttatggccccagatccaagcctgccagtgggcatgattcagaaggatcagaccgataagccccctaccggcaattttaatcataaatcacttgttgactatatgtattgggaaaaggccagcaggagaatgctggaagaggagagagtgccagtgaccttcgtcaaaagcgaggagaaaacccaggaggagcacgaggaaatcgaaaaaaggaataaaaatatggcgcagtacctgaaggagaaactcaataatgaaattgttgccaataagcgtgagtccaagggttcttccaatattcaggagacagacgaggaagatgaggaggaagaagacgacgatgacgacgatgaaggagaggacgacggggaggagtctgaggaaactaatcgggaggaagaaggtaaggccaaagagcaaattcggaactgcgagaacaactgtcagcaggtaacggacaaagcctttaaagaacagcgcgataggccggaggcccaagaacagagcgagaagaagatctccaaattggaccccaagaaactcgccctggatacctcttttcttaaagtttcaactcgcccaagcggcaaccagacagatctcgacgggtctcttaggagagtgcgcaagaacgatcctgacatgaaagagctcaacctaaataacatcgaaaatattcccaaagaaatgctgcttgactttgtgaacgcaatgaagaaaaacaaacatatcaagacattcagcttggccaacgtcggtgcggacgagaacgtggccttcgcgttggctaatatgctgcgtgagaacagatccatcaccactttgaatattgagagcaactttatcacaggaaagggtattgtggcaattatgcgctgtttacagtttaatgaaaccctcacggagctccggttccacaaccaaagacacatgctggggcatcacgctgagatggaaatagccaggttgctcaaggccaataatacgctgctaaaaatggggtaccactttgagcttccaggccctcggatggtggtcacgaacttgttgacccgcaaccaggacaagcagcggcagaaacggcaggaagagcaaaagcagcagcaactgaaggagcagaagaaactgatcgctatgttagaaaatggcctgggcctgccgcctgggatgtgggagctcctgggcggacctaagcccgacagccgcatgcaggaatttttccagccccctcctccgcgaccgcctaatccccaaaatgtgcctttttctcagcggtccgaaatgatgaagaagccttcccaagctccgaagtacaggacggaccctgacagcttcagagttgtcaaactcaagaggatccaaaggaagtccaggatgcccgaggcccgagaaccaccggaaaagaccaacctgaaggacgtgataaagacactgaagcccgttcccaggaaccgccctcccccactggttgagattaccccgcgagaccaactgcttaatgatatccgccattcttccgtcgcctacttgaaacctgttcaattaccaaaagagcttgcctag

SEQ ID NO: 29981 - DNA, 51 bp, synthetic construct
  source 1..51: mol_type = other DNA; note = Synthetic coding sequence
atgtgtaccagtgagacctttcaggccctagatacctttgaggctcgatag

SEQ ID NO: 29982 - DNA, 513 bp, synthetic construct
  source 1..513: mol_type = other DNA; note = Synthetic coding sequence
atgccgatcctcctgttcctgattgacacctctgcatcgatgaaccaacggtcacacctcggtacaacatacttggacacggccaagggggcagtagaaacttttatgaaattgagagcacgggaccccgcttctaggggagacagatacatgctggttaccttcgaagaacccccttacgctatcaaggccggttggaaagagaatcatgcaacatttatgaacgaactaaaaaatctccaggccgaagggctcacgaccctgggtcaaagtctgagaactgcgttcgaccttttaaatctgaatcgtctagtaacgggaatcgacaattacgggcagggcaggaatcctttctttcttgaaccggctatcatcatcaccatcactgatgggagtaagttgaccactaccagcggcgtgcaggacgaggcagtgcatatcctatgtgtattgcaagaatgcctcatctcagtgtggagcccttggtgccggaagtataaagtgggctggtag

SEQ ID NO: 29983 - DNA, 204 bp, synthetic construct
  source 1..204: mol_type = other DNA; note = Synthetic coding sequence
atgtccaggcggaggtttgattgcagaagtatttccgggttgctgacaaccacaccccagattcctatcaagatggaaaacttcaataacttttacatcttgacctctaaagaactcgggaggggcaaatttgctgtggtccgccagtgtatttccaagagcaccggacaggagtacgccgcaaagtttctcaagaagcgctag

SEQ ID NO: 29984 - DNA, 1107 bp, synthetic construct
  source 1..1107: mol_type = other DNA; note = Synthetic coding sequence
atgttgtccaaacgagggtgtcacgccaggatctacgctgacttccccattaggcgactcatcagccagcgaagcagcctggagaccttggaagatatcgaggagaatgctcccctgagaagatgcaggacactttctggcagccctcggcctaaaaattttaaaaaaattcattttataaagaatatgcgtcagcatgataccagaaatggtaggatcgtgctcatttccgggaggcgatcgttttgcagcatattttctgttcttccttacagagattctacacaagtcggagatctgaaactggacggcggacgtcaatcgacgggagctgtgagtctgaaggagattattgggctggaaggggtggagttgggggctgacggtaagacagtcagctatacccagtttcttttgccaacgaatgcatttggcgctagacgcaatacaattgactcaaccagcagtttttcgcagttcaggaacctgtcgcaccgtagcctttcaattggcagggcctcaggtacccagggcagtctggacaccggatctgacctaggagatttcatggattatgatcctaacctgctggacgacccacaatggccctgcggtaagcacaagagggtcctcattttccctagctacatgactacagtcatagattatgttaagccttccgacctgaagaaagatatgaacgagacttttaaagaaaagtttccgcatatcaagctgaccctttcaaagataaggagtctgaagagagagatgagaaagttagcccaggaggattgtggactcgaagagcctaccgtcgctatggcatttgtctacttcgaaaagcttgccctgaagggcaagttaaacaagcagaatcggaaactgtgcgctggtgcctgtgtgctgcttgcagccaagattggctcagacttaaagaagcatgaggtgaagcacctgatcgacaaactggaggagaagttcagactcaaccgtcgtgagttgattgcttttgaattcccggtgctggtcgccttagaatttgccttacatttacccgaacacgaggttatgccacattatagacgcttagtccagtcctcgtag

SEQ ID NO: 29985 - DNA, 795 bp, synthetic construct
  source 1..795: mol_type = other DNA; note = Synthetic coding sequence
atgacagatgtgccagcgacattcacacaggctgagtgcaatggagataaacccccagagaacggacaacagacaattaccaagatctctgaggaacttaccgatgtggacagtccccttcctcactacagggtggaaccctccctggagggcgcattgacgaaggggtcgcaggaagaaaggcgaaagctgcagggaaatatgctcttaaacagtagcatggaggacaagatgcttaaagaaacctctgcggatgaaatgaccttcagagagggccatcagtgggagaagattcctctgagcggctctaatcaagaaatccgaaggcagaaggaacgtattacggaacagcccctgaaagaagaggaagacgaagaccggaagaataagggacatcaggccgctgagattgagtggctgggtttccggaaaccgtcccaagcagacatgctgcactctaagcatgacgaagagcagaaagtgtgggatgaagaaatcgatgacgacgacgacgataattgtaacaacgacgaagacgaagtgcgagtgatagaattcaaaaagaaacatgaagaagtatcccaattcaaagaggagggcgacgcttcggaagactctcctctgtcgtcagccagtagccaggcggtaacccctgacgagcagcccaccctgggaaaaaagtccgatatatcaagaaatgcatactcacgctacaatacaatatcttatcgtaagattcggaaagggaatactaaacagcggatcgatgaatttgagtcgatgatgcacttgtag

SEQ ID NO: 29986 - DNA, 4302 bp, synthetic construct
  source 1..4302: mol_type = other DNA; note = Synthetic coding sequence
atgtggtcgctcaccgcttccgagggcgagtctaccactgcccacttctttctgggtgccggtgacgaggggctggggacacgcggaatcgggatgcgccctgaagagtccgatagtgagctgctcgaagatgaggaggatgaggtcccccctgaacctcagattattgtcggcatatgcgcgatgacaaaaaagtcaaagtccaaacccatgactcagattctggagcgtttgtgcaggttcgattacctgaccgttgtgatactcggggaagacgtcatattgaacgaaccagtggagaattggccctcttgccactgtttaatcagttttcactccaaaggctttccccttgacaaggcagttgcctacagcaagttgcggaatccgtttttaataaacgacctggccatgcagtattatattcaggacaggcgggaagtgtacaggattttgcaagaggagggtatcgatttgcctagatacgcagtgttaaaccgagaccctgctcgaccagaagaatgcaacctgatcgaaggcgaggatcaggttgaggtcaacggagctgtgtttcctaaaccctttgtcgagaagcccgtcagtgcagaggaccataatgtgtacatctattatccatcttcagcgggtggcggatcccaacggttgtttcgcaagatcggttccaggagcagcgtatactctccggaatcctccgttcggaaaaccggtagctatatttatgaggaatttatgcccaccgacggtactgatgtaaaagtgtacaccgtgggccctgactatgcccacgctgaggcgaggaagtcccccgctctagacggcaaagtcgagcgcgactcagaaggcaaagagatccgttatcctgtgatgttgacggccatggagaaattagtggctagaaaggtctgcgtggcatttaagcagaccgtgtgcgggtttgatctgcttagagctaatggtcatagctttgtctgtgacgtgaacggattttcttttgtgaaaaactcaatgaaatattatgacgattgcgcgaaaatcctcggcaacaccataatgagagaattagctccacagttccagatcccatggtctatacccacagaggcagaggacatccccatcgtgccaaccacctctggaaccatgatggagctgcggtgtgttatagctattatcagacatggtgatagaaccccaaaacaaaagatgaaaatggaagtgaaacaccctagattcttcgccctttttgagaagcatggaggctataaaactgggaagctcaagctgaaacgccctgagcagctgcaggaggttctagatattacccgtctgcttctcgccgagctcgagaaagagccgggaggcgaaattgaagaaaaaacggggaagctcgagcagctgaaatctgtgctggaaatgtatgggcatttctctggaattaacaggaaagtgcaactgacttattacccccatggtgtgaaagcaagtaacgaggggcaggatcctcagcgcgagacactggctccgtcgctccttctggtgctcaaatggggcggagagctgacccccgcaggacgagtgcaggctgaggagctgggcagagctttccgctgcatgtatccgggagggcagggcgattatgcaggcttcccgggttgtgggctccttcgtctgcacagcacttttcggcacgacttgaagatctatgcctcggatgaagggagagtgcagatgacagcggctgcttttgcaaaaggcttgttggctctggagggagaactgacacccattctcgtacagatggtgaaaagcgccaacatgaacgggctcctggactcggacggagactctttgtcctcgtgtcagcatagagtgaaagcccgactccaccacatcctgcagcaggatgcgccatttgggccagaagactatgatcagttggcaccgactaggtccacaagcctccttaacagtatgacgattatacaaaacccggtgaaagtgtgcgaccaggtcttcgctttgatcgaaaatttgacgcaccaaatacgcgagcgcatgcaggatccacgctccgtggaccttcagttgtaccattcagaaaccctagagctgatgcttcagcggtggtcgaagctcgagcgagactttagacaaaagtccggaagatacgatatatcaaagatcccagacatctacgattgtgtcaagtacgacgtccagcataacggatctctgggtctccaaggaaccgcggagcttctgcgcttgtcaaaggccctggccgacgtcgtgataccgcaggagtacgggatctctagagaggaaaaattggagatagccgtgggcttctgtctccccctgctgagaaaaatcctgcttgatcttcagaggacccacgaggatgagtccgtgaacaagttgcacccactgtgctatctgcggtactcccgtggagtgctgtcaccagggagacacgtgagaactcggttgtattttacttcagaatcacacgtccactcactcctctctgtatttaggtatgggggactgcttgacgagacacaggacgcccagtggcaaagggctcttgattaccttagcgcgatctcagaattgaactacatgacccagatagttataatgctatatgaagataatactcaggaccccctgtctgaggaacgtttccatgtagagctccattttagtcctggcgtaaaaggagtggaagaagaagggtccgcccctgcgggatgtggctttcgaccagcctcttcggagaacgaggaaatgaagaccaaccaggggagtatggaaaacctgtgcccgggaaaggccagtgacgagccggatagagctcttcagaccagcccgcagccccctgaagggccaggtttgcctaggcggagcccattaatacggaaccgcaaagccggaagtatggaggtattgagcgagacctcttcgtcccgcccaggtggctacaggctgtttagctcctcccggcctcccaccgaaatgaaacagtcagggttggggtcacaatgtactggtctgttctctacaacagtgctcggtggatcttcttctgctccaaacttgcaagactatgccagatctcacggcaaaaagctgccaccggctagtttaaagcaccgtgacgaactgctttttgtgccagcagtcaagagattttcagtttcctttgccaagcaccctaccaatggattcgagggatgctcaatggtcccgactatctacccactggagaccttgcacaacgcactgagcctgcgacaggtgtccgaattcctttcaagagtctgtcagcgtcataccgacgcccaggcgcaggcctccgcagccctgttcgactctatgcactcaagccaggcctcggataacccattcagtccccctcgcactctgcatagcccccctctacagctccagcaacggtccgaaaaacctccttggtatagtagtggaccaagtagtactgtaagttcggcgggaccgagctctccaacaactgtggatggaaactcccagttcggcttcagcgaccagccgtccttgaattcacacgtggctgaggaacatcagggtctgggattacttcaggaaacgccgggatctggggctcaagagctcagtatcgagggagaacaagaactgtttgaacccaatcagtctccacaggttcctcctatggaaacttcccaaccttacgaagaagtgagtcaaccctgccaagaggtgccggacattagtcagccttgtcaggatatctccgaagccctgagtcagccttgtcagaaagttccagacatctctcagcagtgccaggagaatcacgacaatggcaatcacacatgccaggaagtaccacatattagccaaccatgtcagaagtcctcccagctgtgtcagaaagtctccgaggaagtgtgccagctgtgtcttgagaattctgaggaggtgagtcagccctgccagggcgtttcagttgaggtcgggaaactcgtccataagttccacgtcggggtgggatcactggttcaagagaccctggtcgaagtgggatcccccgcagaggagattcctgaagaggtgatccaaccctatcaggaattctccgtcgaggtgggcaggctagcgcaagagacttcagctattaacctccttagtcaggggatccccgagattgataagcctagccaggagtttccggaggaaatagatttacaggcccaggaggtgccggaggaaattaattag

SEQ ID NO: 29987 - DNA, 810 bp, synthetic construct
  source 1..810: mol_type = other DNA; note = Synthetic coding sequence
atgtttcccgctttggaaacacacctgaagcagactatacccgacccatatgaggatttcatgtaccggcatctccaatactatgggtacttcaaagctcagcgagggagtttgcctaacagcgctacacatcagcacgtacggaagaacaaccctcagtgccttctgaatggctctctaggagaaaaagacgatttaatccccgacactctccaaaaagagaagctgctgtactctcatatgctgagcctgcctcatctgcgatccagacagcttttgtacgacgagttagatgaagttaacccacgactacgggaaccacaggagctgttctccatactttcaacgaagcgccctctccaggcccctcgctggcccatagagtgcgaggtgatcaaagaaaatatacaccacattgagtgggccccaccacagcctgagtatttttaccaacccaagggcaatgaaaaggtccccgaaatcgttggggaaaagaagggcaccgtcgtctatcagctggactctgtgcccatcgaagggtcgtatttcacctcttcccgcgtggggggaaagcgtgggatcgtgaaggaattggccgtgaccctgcagggcccagaggacaacacactgctcttcgagagtcggttcgaatctgggaacctgcagaaagctgtgagggtggatccaatgagtatgaattctccatgcgaactgacgagcaccctgaccaatacacttagcggctttatcttcgttttcaggacgccggagaagatgctgcccatcgcctcaccacttagtacatgctag

SEQ ID NO: 29988 - DNA, 975 bp, synthetic construct
  source 1..975: mol_type = other DNA; note = Synthetic coding sequence
atgccactccaggtttctgattattcttggcagcagacaaagacagcggtcttcctctcgctgccattgaaaggggtgtgtgtgagagacaccgacgtcttttgcactgaaaattacctgaaggtgaacttcccaccatttctattcgaagcttttttatacgccccaatcgacgacgagtcatcaaaagcaaagatcggaaatgatactatagtctttacactgtacaaaaaggaggccgctatgtgggaaacccttagtgtaacaggggtggataaggagatgatgcaacggatccgggagaagtccatcttgcaggcccaagagagggctaaggaagctacggaggctaaggccgctgctaagagagaagaccagaagtatgccctaagcgtgatgatgaagattgaagaagaggagaggaagaaaattgaagacatgaaggagaatgagaggattaaggccaccaaggctctggaagcgtggaaagaataccagaggaaagccgaggaacaaaagaaaatccagagagaagaaaagctgtgccagaaggaaaagcaaatcaaggaggagaggaagaaaatcaagtacaaatccctcaccagaaacctcgccagtaggaacttggctccaaaggggaggaactctgaaaacatttttactgaaaagctgaaggaggacagcatccctgcacctcgctctgtggggagtatcaaaattaacttcactccgagggtgtttcccacggccctgagggagagtcaggtggccgaggaggaggagtggctgcacaaacaggccgaagccagaagggctatgaacacggacattgcggagctgtgcgaccttaaagaggaggaaaagaatccagaatggttaaaggacaagggtaagcccgagcgctgcctcaagatccctgtcaccgtcattcatctggtcgtgggcctgtcttcagttatgcgtgggcagatttag

SEQ ID NO: 29989 - DNA, 162 bp, synthetic construct
  source 1..162: mol_type = other DNA; note = Synthetic coding sequence
atgcagacatcttccagccgaagcgtgcacctcagcgaatggcaaaaaaactattttgcaatcacaagcgggatttgcaccggaccaaaggctgacgcataccgagcgcagattttgagaatccagtacgcttgggctaattcggaaatatcgcaagtgtag

SEQ ID NO: 29990 - DNA, 2079 bp, synthetic construct
  source 1..2079: mol_type = other DNA; note = Synthetic coding sequence
atggtgacaaccctcgggcctaaaatggccgctgagtggggtggcggagtcgggtactccggcagtggcccagggagatcacgctggcggtggtctgggtccgtctgggtgaggagcgtgctgctccttctgggaggactgcgggcatctgctacctctactcctgtctccttgggatcatcacccccttgccggcatcatgtccctagcgatactgaagtgataaataaagtgcacttgaaagcaaaccacgtcgttaaacgggacgtggatgagcatttgagaattaagacggtgtacgacaagtcagtggaagaactgctccccgaaaaaaagaacttagtcaaaaataaactgttcccacaagcgatatcctacctggagaaaacttttcaggtgcgaagacctgccggtacaatcttattgagtcgccagtgtgcaacaaatcagtacttaagaaaagagaacgatccgcaccggtattgcactggggagtgcgccgctcacaccaaatgcggaccggtcattgtgcccgaagagcacctgcagcagtgtcgggtataccggggtggaaaatggccacacggggctgtgggcgtgcccgaccaggagggcatcagcgatgcagactttgtgctctatgttggcgcactggcaacagagcgatgctcccatgaaaacattatatcttacgccgcatactgtcagcaagaagctaacatggatcggccaattgcagggtacgctaatttatgcccaaacatgatctccactcagccacaggaatttgtaggcatgctgtctaccgtcaagcacgaggtcatccatgcccttggattcagtgcgggtttatttgccttctaccatgacaaagatggcaaccccctgacttcccgctttgctgacggactgcctcccttcaattacagcctcggactttatcaatggtcagataaggtggttcggaaggttgaaaggctgtgggacgtgcgagataataaaatcgttcgacacactgtctacctgctcgtgaccccgagggtggtcgaagaagcacggaaacattttgattgccccgtgctcgaggggatggaattggagaatcagggtggcgtgggaaccgagctgaatcattgggaaaagcgtctgctcgagaacgaagccatgacaggttcgcacacccagaacagggttctgagcaggatcacactggcactcatggaagataccggatggtataaagcaaactactccatggcggaaaagctggactggggtagggggatgggctgcgatttcgttaggaagtcatgcaagttctggattgaccagcagcggcaaaagagacagatgctgtccccttactgtgacacgctgcggtctaatcccctccagctgacgtgtcggcaggatcaaagagctgtggcggtttgtaacctccagaagtttcccaagcctctgccgcaagagtatcagtactttgacgaactgtctggcatccctgccgaggatttaccctattacggcggtagcgtagagatcgcagattactgtcccttcagccaggagtttagctggcacctctccggcgagtatcagagaagtagtgactgtcgcatcctcgagaaccagccagagattttcaagaactatggagccgaaaaatacggtccgcattccgtttgtctgatccagaagtcagcctttgtcatggagaagtgcgaacgcaaattgagctatcccgactgggggagcgggtgctaccaagtctcctgcagcccgcaggggttgaaggtgtgggtgcaagacacgagctatctatgctccagggcgggacaagttctgcctgtgagcattcagatgaatggctggatccacgatggtaatctcctgtgtccctcctgttgggatttttgcgagctctgtccaccagagacggatcctcccgcaacaaatctcaccagagcactgccattggatctatgttcttgctcatcaagtcttgtagtaaccctttggctactactgggcaacctgtttccattgctagccggatttttactgtgcatttggcactag

SEQ ID NO: 29991 - DNA, 3021 bp, synthetic construct
  source 1..3021: mol_type = other DNA; note = Synthetic coding sequence
atggattccagccaacaaaagaccttccgcggacatgacgctcccgtgctgagtctcagctttgatcctaaggacatcttcttggcttctgcaagttgtgacggcagcgttcgggtgtggcagatctccgatcagacctgcgcaatatcctggcctttattacagaagtgtaacgacgtgataaacgcaaaatcgatctgccgcctggcatggcagcctaaatctggaaaactgctcgccattcccgtggagaagtctgtcaagctgtataggagggagtcttggagccaccagtttgatctgagtgacaatttcatcagccagaccctcaatatcgtcacatggtccccctgtgggcaatacctagccgcaggatccatcaatggcctgattattgtgtggaatgtggagaccaaggattgtatggagagggtcaagcacgagaagggctacgcaatctgtggactggcatggcatcccacatgcggaagaatctcatatactgatgcagagggaaatttgggcttactcgaaaacgtctgtgatccatcaggcaagacatcctcatctaaggtgtcaagtagggtagagaaggactacaacgacctgtttgacggtgacgatatgtctaatgctggcgacttcttgaacgataatgcagttgagatcccaagctttagtaaggggattattaatgacgatgaggatgatgaagatttgatgatggcctcgggcagacccaggcagaggtcacacatcctggaagacgacgagaacagtgtggatatctccatgctgaagacaggatcatcgctgttaaaggaagaagaagaagacggccaggagggctcgattcacaacctgccgctggtgacctctcagaggcccttttatgatgggcctatgcccacacctcgccagaagccattccaatctggcagtactccgcttcacctgactcatcgtttcatggtgtggaattcaattgggattatccggtgctacaatgacgaacaagataatgcaattgacgtagaatttcatgatacatctatccatcatgcaactcatctgagcaataccttaaactatactatcgccgacttatcacacgaagcaatcctgcttgcctgcgagtctactgatgaactggcttcaaagttgcattgtctccacttctcctcttgggatagttccaaagaatggatcatcgacttgccacagaatgaggacatcgaggcaatctgcctcggacaagggtgggcagccgctgcaacctcagcccttctcttacggctgttcaccattgggggagtgcagaaagaagtgttttctctggcaggaccggtcgtgtctatggcaggacacggggaacaactttttattgtgtatcaccgcggaactggatttgatggcgaccagtgtcttggggtgcaacttctggaactgggaaagaagaaaaaacaaatactgcatggagaccccctgccccttactcgaaaaagctaccttgcatggattggattcagtgccgaaggtaccccctgttatgtcgattcggagggaatcgtgaggatgctgaatagagggctgggcaatacctggacaccaatttgcaatacacgcgagcactgcaaaggcaagtccgaccattactgggtcgtcggcatccatgagaacccgcaacagcttagatgcataccatgcaagggcagcaggttccccccaactctgccgaggccagccgtggccatcctgtctttcaaattgccatactgtcaaatcgcaacggaaaaagggcagatggaggaacagttctggagaagcgtcatttttcacaatcatttagactatttagccaaaaacggttacgagtacgaggagtctaccaaaaatcaggcgacaaaggagcaacaggaactgctgatgaagatgcttgctcttagttgtaagttagagagggagttccgatgcgtggagttggcagatctcatgacccagaatgccgttaatctggcaattaagtatgcctccagatctaggaaactgatcctggcccagaagttgtcagagttggcagtggagaaggccgcagagctaactgccacacaggtggaagaagaagaggaggaggaggattttagaaagaaattaaacgccggatattctaatacagccaccgaatggagccagcccaggttcaggaaccaggtcgaagaggatgcagaggacagcggagaagccgatgatgaggagaagcctgagatccataagcctggccaaaactcatttagcaagagcacaaattccagcgatgtgtccgcaaagtccggagctgtgacattctcctcccaaggtagggtgaatcccttcaaagtctcagcttcttcgaaagagcccgctatgtctatgaattccgccaggtccacgaatatcctggacaacatgggcaagagcagcaaaaaatccaccgccctctcaagaacaacaaacaacgaaaagtcccccataataaagcccctaatccctaagcctaagcccaaacaggccagtgcagccagttacttccagaagcgaaactctcagaccaataagacagaagaggtgaaagaagaaaacctcaagaacgttctttctgagactccagccatttgtccaccccaaaataccgagaaccagcgcccaaagaccggatttcagatgtggctggaagagaaccgttcaaacattctttcggataatcccgatttttccgatgaggcagacatcatcaaagagggaatgatcaggttcagggtcctttccaccgaggaacgcaaagtttgggccaacaaagccaaaggtgaaacagcaagcgagggcaccgaggccaaaaaacgcaagagggtcgtcgacgaatctgacgagaccgaaaaccaggaagagaaggctaaggaaaacctaaatctgagcaagaagcagaagccattagacttcagcacaaaccaaaagctgagtgcgttcgcctttaaacaagagtag

SEQ ID NO: 29992 - DNA, 540 bp, synthetic construct
  source 1..540: mol_type = other DNA; note = Synthetic coding sequence
atgactgaggactctcagcggaattttcggtcggtgtactatgaaaaggttggatttcgaggggttgaagaaaaaaagagcctggaaatcctgctcaaggacgacagattggacaccgagaaattatgcaccttttcgcagagatttcctttgcccagcatgtacagggcacttgtgtggaaagtgttactcggtatcttaccccctcaccatgaatcccatgcaaaggttatgatgtataggaaggagcaatatctggacgttctgcatgcgttaaaagtggtaaggttcgtgtctgacgccacaccgcaggccgaagtgtatctacgaatgtaccagttagaaagcggaaagctgcccaggtctcctagtttccctctggaacccgacgatgaagtgtttctcgcgatagcaaaggccatggaggagatggtggaggactccgtcgactgctattggatcactcgccgtttcgttaaccagctgaacacaaagtacagagatagcctaccccagctggaggggattaatgtaggatag

SEQ ID NO: 29993 - DNA, 3189 bp, synthetic construct
  source 1..3189: mol_type = other DNA; note = Synthetic coding sequence
atgatctccaaaggcggatcggaagccctgctgcagaccctcgtcgacacggccagaaccgctcccccagattacgacattcttctgccactgttcagactcttggcgaaagtcggactgcgcgacaagaagataggacggaaggctttggagttagaggcgctagacgtcactttgatcctggctaggaaaaatctctcccacggtcaaaatctgctacattgtctctgggcactcagagttttcgcctcatccgttagtatgggcgcaatgctgggcatcaacggcgctatggagcttttatttaaagtaattacaccctatactcggaaaagaacacaggcgattagggctgcgacggaggtgctggcggcacttctgaaatccaagtccaatggtcggagagcagtaaatcgtggttatgtaacgagcctactgggactgcatcaggattggcattcacacgacacagcgaatgcatacgtgcagattagaaggggccttttgttgtgtcttcgccatatcgccgcacttcgatcaggcagagaagccttcttggcagctcaagggatggaaatcctcttctcgaccacacaaaactgcctcgatgataaatcgatggaaccggtcattagcgtcgttctgcagattttacggcagtgttatcctacatcacctctgcccctagtaacggccagcagtgcctatgctttccctgtgccaggctgcatcaccacggaaccacctcacgacctccccgaggaggattttgaagacgatggtgacgacgaagttgacaaggatagtgataccgaagacggaaaggtcgaggacgatgatctggagaccgacgtcaataaactgtcaagtaagccaggactggaccggccagaggaagaattaatgcagtatgaggtcatgtgcttggaactctcctattccttcgaggagctccagtccaagctgggagatgatctcaatagtgaaaagactcaatacgccaaccaccaccacatccctgcggcagcctctagcaaacagcattgctatagcaaagatcagagctcctgtggccaggaacgtgagtacgccgttcagacatctttgctgtgtagagtgaaaaccggcagatccactgtccaccttggaagcaaaaaaaatcctggcgtgaacctctatcagaacgtccagtcaaacagccttcgtcgagattcttccgaatccgaaatccctgatattcaagcgtcgcccaaggccgatgcgtgggacgtcgatgcaatcttctgtcctcggatgtcagcttctttcagcaactcgactaggacccgggaagtggttaaggtgattgacaagctgctgcaaacccacctcaaacgggtgccttttcacgacccgtatctctacatggcgaaggctcgaaggacttcaagcgtagtggacttcaaaatgatggcgtttccagatgtctggggacattgccctccaccaacaacacagcccatgctggaacgcaagtgcggagtgcagagaattcgcattttcgaggacattcggagactcatacagccaagcgatgtgattaataaggtagtgttctcccttgatgaaccctggcccttgcaggacaacgcctccaattgtctcagatttttcagcaaatttgaatctggaaatttgcggaaggccatccaggtacgagagttcgagtatgaccttctagtgaacgctgacgtcaattctacccaacaccagcagtggttttatttcaaagtgtccggtatgcaggctgccataccttatcactttaacataattaattgtgagaagccaaacagccaatttaactatgggatgcaacccactctgtacagcgtgaaagaggccttgcttgggaagcccacatggattcgaactgggcatgagatctgttactataagaatcattacaggcagtctactgctgttgctggaggggcttcagggaagtgctactatactctgacgttcgccgtaactttccctcacagcgaagacgtgtgctatctggcctaccactacccttatacctacacagccttaatgacgcacctagacattctcgagaagagtgttaacctaaaagaggtgtattttagacaagatgttctgtgccaaactctgggcggaaatccgtgtcctttagtgaccatcactgctatgccagagtccaacagcgacgaacacttagagcagtttcggcacaggccatatcaggtaataaccgccagggtgcaccccggagaaagcaacgcgagctgggtgatgaagggaacccttgagtttctcgttagttccgatcccgtcgctaggctcctccgggaaaacttcatatttaaaatcattcccatgctgaaccccgatggcgtgattaatggcaaccaccggtgtagcctctcaggcgaagacttgaaccgtcagtggctcagccccagtgcccaccttcagcctaccatatatcatgccaagggcctgctgtaccacctgagctccataggtcgatcccctgttgtgttttgcgactttcacggccactcccagaaaaaaaacgtgtttctttacggctgttccataaaggaaacgctgtggcaggccgcatgcacggttggcacctctaccatactggaggaagtgaactatagaacgctgccaaaaattcttgacaaattagcgccagccttcactatgagctcctgctcattccttgtcgaaaaatccagggcctcaactgccagggtggtcgtctggcgggaaatgggagtatccagatcatataccatggagagcagttattgtggctgtaaccagggtccgtaccaatgtactcagaggttgctggagcgaaccaaaaatgaaagggcccatcccgtggacggactgcagggtttacaattcgggacaagagaactggaggagatgggtgctatgttttgcctgggtctcctcatcctggagctgaaatcggcctcgtgttcacatcagctcctggcccaggcagcgacactgctctccgcagaggaggacgcattggaccagcatctgcagcgactgaaaagttcaaatttcctgcccaagcacatctggttcgcataccactttttcgcaatcacaaattttttcaagatgaatcttttgcttcatgtcagtccatag

SEQ ID NO: 29994 - DNA, 738 bp, synthetic construct
  source 1..738: mol_type = other DNA; note = Synthetic coding sequence
atggccgctgcgccaccctcctactgtttcgtggctttccctccacgtgcgaaggatgggcttgtggtctttggtaagaatagtgccagacctagggatgaggtgcaggaagtggtgtacttttcggccgctgatcatgagcctgagtctaaagtcgagtgcacctacattagcattgatcaggtcccacgcacttacgccatcatgattagccggccagcatggctatggggagccgaaatgggtgctaatgaacacggggtgtgtattgccaatgaagcaataaacacccgcgaacccgcagcggagattgaagcgctgctggggatggatttggtgcgcttaggactcgagcggggagagaccgcaaaagaggcccttgacgtgattgtatcactgcttgaggagcatgggcaggggggtaattacttcgaggacgctaattcttgtcacagcttccagtctgcatatctcatcgtagaccgcgatgaagcgtgggtactggagactatcggtaaatactgggcagccgagaaggttacagagggtgtgagatgcatttgttcacaactgtcacttacaaccaagatggatgccgaacacccagaactccgcagctatgcccagtcccaaggctggtggacgggtgagggggaattcaactttagcgaggtattcagtcctgtcgaagaccacctggattgtggcgctggtaaggatagtctggaaaagcagtag

SEQ ID NO: 29995 - DNA, 99 bp, synthetic construct
  source 1..99: mol_type = other DNA; note = Synthetic coding sequence
atgtctgaacagggggatttgaatcaagccatagccgaagagggtggcacagaacaggaaaccgccacccctgagaacggtatcgtcaagagtgagtag

SEQ ID NO: 29996 - DNA, 132 bp, synthetic construct
  source 1..132: mol_type = other DNA; note = Synthetic coding sequence
taagtgctgggatcacctaaacccgaggagattccgttaacatggatccagcctgggaccactgtgctcaactgttcccacgattttctgagcgagtctctcataattatccgtagaatggccatattttag

SEQ ID NO: 29997 - DNA, 339 bp, synthetic construct
  source 1..339: mol_type = other DNA; note = Synthetic coding sequence
atgttcgccaagttaaagaaaaagattgccgaggagacagctgtggctcagcggccaggcggtgccacgcggatccctagatccgtgagtaaggaatctgtcgcatctatgggagcagattctggagatgattttgccagcgacggctccagctctcgtgaagacctctcctcccagcttttacgccgtaacgagcagattagaaaacttgaggcacggctttcagattacgcagaacaggtgaggaacctacagaagattaaggagaagctcgagattgccctcgaaaagcaccaagattcaagtatgagaaaatttcaggaacagaatgagacatag

SEQ ID NO: 29998 - DNA, 579 bp, synthetic construct
  source 1..579: mol_type = other DNA; note = Synthetic coding sequence
atgggaaagggctgtaaagtggtagtctgtggcctgctctctgtagggaaaactgccattctggaacaactgctctatggtaaccataccattggcatggaggactgcgaaactatggaagacgtgtacatggccagcgtcgagactgaccgaggagtaaaagagcagctgcatctctacgatactagaggtcttcaagagggagttgagctgcctaaacactacttcagctttgctgatggatttgttctggtatactctgtcaacaatctcgagtcatttcagagggtggaactgctaaagaaagaaatcgataagttcaaggacaagaaggaagtcgcaatcgtggtcctaggcaataagattgacctctcagagcagagacaggtggacgccgaggtggctcagcagtgggcgaaatccgagaaggttcggctctgggaggtaactgttaccgatcggaaaaccctgatcgaacccttcacactgctggccagcaaactgtcccaaccacagagcaaatcgtcctttccacttccgggacgcaagaataagggaaacagcaacagcgagaactag

SEQ ID NO: 29999 - DNA, 1458 bp, synthetic construct
  source 1..1458: mol_type = other DNA; note = Synthetic coding sequence
atggcccctcgtctgcaacttgagaaagccgcatggcgatgggccgaaaccgtcaggcctgaggaggtaagccaggaacacatagagaccgcctatagaatatggctcgagccatgtattagaggagtctgtaggagaaactgcaagggtaacccaaattgtttggtgggcatcggcgaacacatttggttaggagagattgatgaaaatagctttcataacatcgatgaccccaactgcgagaggaggaagaagaatagcttcgtgggcctaaccaatctgggcgcaacatgttacgtgaatacttttctgcaggtgtggttccttaacctggagctgcggcaggccctctatctgtgtcctagcacttgcagcgattacatgctcggagatggtatccaggaggaaaaagactacgaaccccagactatctgcgagcatttacagtacctgttcgctttgttgcagaacagcaacaggcggtatattgatccgtctggctttgtgaaagcccttggactagacaccggccagcagcaggatgcccaagagttttcaaagttgtttatgagcctgctagaagatactctcagcaaacagaagaatccggacgtgcggaatatcgttcagcagcagttttgtggagagtacgcctacgtgaccgtttgtaaccagtgcggccgagagagtaagttattgtccaaattttatgagctggaattaaacattcagggacataaacagcttacagattgtataagcgaattcctgaaggaagaaaaattagaaggagacaacaggtacttctgcgagaactgccagagcaaacagaatgcaactcgcaagattaggctgctgagcctgccctgtactctcaacctacagctcatgaggtttgtgtttgacaggcaaactggccataaaaagaaacttaatacatacattggttttagtgaaatattggatatggagccctatgtcgaacataaggggggatcctacgtctatgagctttccgctgtgctgatccatcggggagtgagcgcttatagcggccactatattgcccatgtgaaggacccccagagcggagagtggtacaagttcaacgacgaggacattgagaaaatggaaggcaaaaaattgcagttgggaatagaagaggatttggccgaaccctcaaagtcccagaccaggaaacccaagtgcggcaagggcactcactgcagccggaacgcttacatgctggtgtacaggctgcagacccaagagaaaccgaatactacagttcaggtgcccgcatttctccaagagctcgttgatagggacaattctaagttcgaggagtggtgcatcgagatggctgaaatgcgcaagcagagcgtcgataagggaaaagcgaagcacgaagaggttaaagagctgtaccagcgactgcccgctggggcaggcctgtag

SEQ ID NO: 30000 - DNA, 1119 bp, synthetic construct
  source 1..1119: mol_type = other DNA; note = Synthetic coding sequence
atggatgttctctcgcccttgtcctttatcaaggtatctcatgtgcgcatgcagggtattctcctgctggtgtttgcaaagtaccagcatctgccctacatccagattctatccacaaaatctacacccaccgggctgtttgggtactggggtaacaaaggcggtgtcaacatctgtctcaagctctacggatattatgtctccatcattaactgccatttaccaccccacattagtaacaattatcagcggcttgaacacttcgacaggattctcgagatgcagaattgcgaagggagggatattccaaacatattggatcatgacctcatcatctggtttggcgatatgaacttccgcatcgaggacttcggactacatttcgtgagggaaagtattaagaacagatgctatggcggtctatgggagaaagaccaactgagcatcgctaagaagcatgacccactgctgcgagaattccaggaaggcaggctgttgttccccccaacttacaaatttgatcgcaatagtaacgactatgataccagtgagaagaagcgaaagcctgcctggacagacaggattctctggcgactgaagagacagccatgtgcgggaccggataccccgattccaccagcctcccattttagcctctcacttcgcggatactcatctcatatgacctatgggatttctgatcacaaacccgtttccggaacctttgacctcgaactgaagccacttgtcagtgcgcctctgattgtattgatgccagaagatctgtggaccgtagaaaacgacatgatggtgagttactcttccacctctgatttcccatctagtccatgggattggataggcttgtacaaggtggggctccgcgatgttaacgattacgtgagctacgcctgggtgggtgactctaaagtgagttgctccgataacctgaaccaggtgtatatcgatatatccaatatccccaccacagaagacgagttcctactgtgctactacagcaactccctgcggtccgtggtcgggatctcacggccatttcaaataccaccgggatctctaagagaagatcccctcggggaggcccagccccagatctag

SEQ ID NO: 30001 - DNA, 1548 bp, synthetic construct
  source 1..1548: mol_type = other DNA; note = Synthetic coding sequence
atgtccgaaggggagtcccaaacctccgtgtctcccccagttacttcaactacatcagccgcttcccccgaggaagaggaggagagcgaggacgagagtgaaatactcgaagagtctccttgcggtcggtggcaaaaacgacgagaggaagtgaaccagcggaacgtccccggtattgatagtgcatacctcgccatggataccgaggagggagtggaggtggtatggaatgaggtgcagttcagcgaaaggaagaactacaaactccaggaggagaaagtgcgagctgtcttcgataatctgatccaactcgagcacctgaacatcgtcaagtttcataagtattgggcggacatcaaggaaaacaaggctagggtgatatttataaccgagtatatgagcagcggttccctgaaacaattccttaaaaagactaagaaaaaccataaaacgatgaacgaaaaggcttggaagcgctggtgtacccagattttgtctgcactcagttacctgcatagctgtgacccaccaattattcatgggaatctcacatgtgacaccatattcatacaacacaatggactcataaagatcggaagtgttgctcccgacacaataaataaccatgtgaagacttgtagggaagaacaaaaaaacctccattttttcgctcctgagtacggtgaggtcactaatgtgacgaccgccgtagacatctactccttcggaatgtgtgccctggagatggccgtgctcgaaattcaagggaatggggaatccagctacgtgccacaagaggcgatcagttccgccatccagctgttggaggaccccttgcagagggagtttattcagaagtgcttgcaatctgagccggctagacgcccaactgctagggaactcttgtttcacccagccttgtttgaagtacccagtctgaagctgctggcggctcactgcatcgtgggccaccagcacatgatcccagaaaatgccctcgaagagattactaagaacatggacacctcagcggtgctggccgagatcccggcagggccagggagggaacctgtccagacactgtactcccagtctcctgccctggaactagataagtttctcgaggatgttagaaatggaatctatccactcaccgcgttcggcctcccacgaccccagcagcctcagcaggaagaggtaacctctcccgtggtccccccttccgtgaaaaccccaacaccagaaccagccgaagtggagactcgcaaggtagtgctcatgcagtgtaacattgagtccgtagaggaaggggtcaagcaccatttgacgctgctgttaaaactggaggacaagttgaacagacacctctcctgcgacctgatgccaaatgaaaacatccccgagctggcagcagaactggtacagctgggcttcatctccgaagcagaccagtcaagactgacatctctgctggaagagacactcaacaagtttaatttcgctcggaactccacactcaattcagccgctgtcacggtcagttcatag

SEQ ID NO: 30002 - DNA, 435 bp, synthetic construct
  source 1..435: mol_type = other DNA; note = Synthetic coding sequence
atgagctcaccacttgctagcttgtccaagaccaggaaggttcctctgccaagtgagcccatgaatcccggacgacggggaattaggatttacggagacgaagacgaggtagatatgctctccgacggatgtgggtccgaagagaaaatttccgtcccttcctgctacgggggtataggagctccggtatcccgccaggttccagcttcacatgatagcgaactgatggccttcatgacaaggaaattgtgggacctggagcaacaggtcaaggcgcagactgacgaaattctctccaaagaccagaaaattgcagctctcgaagatctggtgcaaacattacgtccccatccagcagaggcgaccctgcaaagacaagaagaactggagactatgtgtgtgcagctgcagcggcaggttagagaaatggagtag

SEQ ID NO: 30003 - DNA, 1047 bp, synthetic construct
  source 1..1047: mol_type = other DNA; note = Synthetic coding sequence
atgcctgctcccccttgcgctagctgccatgcagccagggccgcactgagacgacccctctctggccaggctctttgcggtgcctgtttctgcgctgcattcgaagccgaagtgctgcataccgtcctggcgggacggctcctgccacccggagccgtggttgccgtgggagcttcaggcggaaaagacagcaccgtgttggctcacgttctccgggctctggcccctcggctcggcatttcccttcagctggtggctgtcgatgagggcatcgggggttaccgggatgccgctctcgccgcagtcaggcgccaagccgcaaggtgggagctgcccttgactgtggtggcatatgaggatttgtttgggggttggaccatggacgccgtggccagatcgacagctgggtctggcagatcacggagttgctgcacattctgcggagtgcttaggcgcagagccttggaagaaggcgcacggcgagtcggcgctactcacattgtgactggacataacgccgacgatatggcagagactgttctgatgaacttcttgcgaggcgatgccggacgactggctagaggagggggacttgggtccccaggggagggaggagccttgcccagatgcagacctctccagttcgcatcccagaaggaagtggtgttgtatgcacattttcggcgtctcgactacttttctgaggaatgcgtgtacgcacctgaggcctttcgcggacatgccagagaccttttgaagaggctcgaagccgcaagaccctccgcagtattggatctcgtccatagtgctgagcgcctagcactggcccctgctgcccgacccccacgccctggagcctgcagtcgctgcggggcattggcctccagggcactatgccaagcttgcgctctcttggacggactcaacagaggacggcctaggctagcaattggcaaggggaggagagggttggatgaagaggctacacccggtaccccaggagacccggcacgccctccagcttctaaagctgtcccaactttttag

SEQ ID NO: 30004 - DNA, 321 bp, synthetic construct
  source 1..321: mol_type = other DNA; note = Synthetic coding sequence
atgcctgaggatcaggtcggtaagctcgaggccacagagaacactatcagcgcaatggccgctgccgctgcagaacagcagcagttctacctgctcctgggaaatcttctgtcccctgataatgttgtgcggaagcaggcggaagaaacctacgagaatatcccaggacagtcaaagattacattcctgttacaagccattcgcaataccacagccgctgaagaggctaggcaaatggccgcagtcttactaaggcgattgttatcctcagcattcgacgaggtgtacccagccctaccatccgatgtgcaaaccgcatag

SEQ ID NO: 30005 - DNA, 198 bp, synthetic construct
  source 1..198: mol_type = other DNA; note = Synthetic coding sequence
atggagctgcgctgcggcggtcttctattctcgtctagattcgattctggcaaccttgcacatgtcgagaaagtcgagtccctatcctctgatggggaaggggtagggggtggcgctagtgccctcacttccggcattgccagtagcccggattacgagttcaacgtttggacccgccctgactgcgccgagacatag

SEQ ID NO: 30006 - DNA, 1371 bp, synthetic construct
  source 1..1371: mol_type = other DNA; note = Synthetic coding sequence
atggcggattctctcgaatcaacccccctcccttctcctgaagacagactggcgaagcttcaccccagtaaggagctgctcgagtactatcagaagaagatggccgagtgcgaagcagagaacgaggatctgctgaagaagctcgagctctataaggaagcttgcgaggggcagcataaactggaatgcgacttgcagcagagggaggaagaaatagctgagctacagaaggcattgtcggacatgcaggtgtgtctgttccaggagagagagcacgtgcttagattatactccgagaacgatcgccttcggatcagggaattggaggataaaaaaaaaatccagaatctgctggccttagtgggcactgatgctggagaagtcacctacttctgcaaggagccccctcataaggtaacaatactgcagaaaacgatccaggccgtcggcgagtgtgaacaatctgagtcatccgcatttaaagctgatccaaagatttccaaaagacgaccatcccgggagcggaaggagtcgtcagagcattaccagcgcgacatccagacattgatccttcaggtcgaggcgctccaagcgcagttaggagagcagaccaagctgtcaagggagcagattgagggcctgatcgaagacagaaggatacatctggaggaaatacaggtgcaacatcagagaaaccagaacaagatcaaagagctgactaaaaatctgcaccacacacaggaattactctatgagtctaccaaagatttcttgcagctcagaagcgagaaccagaataaagagaagtcatggatgctggagaaggacaatctgatgagcaaaatcaaacagtacagggtccaatgtaagaagaaggaggacaaaattggaaaagtcctaccagtcatgcacgaatctcaccacgcgcaatctgagtacataaagagcctaaaagataaactggttcaggaaaaaaaattatccaatatgtaccaagaacagtgtatatccctggaggaagagctagccaggatccgtgaggaggaagggatgcgtcgggaaatcttcaaggatcgtacaaataagatggggaagcgattgcagattatgaccaaaagatatgaagcacttgagcggaggagaatactggaggtggagggtttcaaaacagatataaaagttttgcggcaaaaattgaaggacctagagcagatgttgtataaggctaccgtgaacgctagggccaatcaagaccttgccctgctttgtgaggtaagggattctaaccgaagagcacacaagatccagggggaacttaaaaacctgaagagcaaagtgttcggcctagaaaatgaactccgcctgtgctag

SEQ ID NO: 30007 - DNA, 1275 bp, synthetic construct
  source 1..1275: mol_type = other DNA; note = Synthetic coding sequence
atggatcagccatcaggacgaagctttatgcaagtgctgtgtgaaaaatactctccagaaaactttccttatagacgcggacccggtatgggcgtgcacgtgcccgctaccccacagggaagcccgatgaaggatagactgaacttgccatcagtcctggtgctgaacagctgcggtattacctgtgcaggagatgagaaagagatcgccgcattttgtgcacacgtgtcagaactggatctgtccgacaataagctggaggactggcacgaggtgagtaaaattgtgtctaacgtgcctcagctggagttcttgaatttgtccagcaacccattgaacttatctgtgctagagcgcacctgtgcaggatcattttccggagtgcgcaaactcgtgctgaataacagtaaagcctcttgggaaaccgtacacatgatcctccaggagctgccggatctggaggaactgttcctgtgtctgaatgactacgaaaccgtgtcttgtccatcaatctgttgccacagcctgaaactcctgcacatcacagataataacttgcaggattggacagagattcgcaaactgggtgtcatgtttccatcacttgacactctggtgctggctaataatcacctgaatgccatagaggagccagacgactctctcgctagattgtttcctaatcttcgatctatttctctgcacaaaagcggcttgcagtcctgggaagacatcgacaaattgaactcgttccccaagctcgaggaggttagacttctaggaatccctctcctgcaaccttacaccacagaagagcggaggaaactggtgatagcaaggctgccctcggtctctaaactaaatgggtccgtcgtcactgacggggagcgcgaagatagtgaaaggttctttataaggtattacgttgacgttccacaggaggaggtgccttttaggtaccacgaactcatcactaaatacggtaagctggagcctctggcagaggtcgatctcagaccccaaagctcagcgaaagtggaggttcacttcaatgaccaggtcgaagagatgtccatccgtctcgaccagaccgtcgctgagttgaagaagcaactgaagacccttgtccagctgcctacttccaacatgctactgtactacttcgatcacgaggcaccatttgggccagaggagatgaagtacagcagtcgcgcactgcattcatttggcatccgtgacggagataagatctacgtggagtcaaagaccaaatag

SEQ ID NO: 30008 - DNA, 264 bp, synthetic construct
  source 1..264: mol_type = other DNA; note = Synthetic coding sequence
atgagtattagcagcgacgaagtaaactttctagtgtacaggtacttgcaggagagcgggttcagtcattccgctttcacattcggaatcgaaagtcacatctcacagagtaacatcaacggggctttggttccaccagccgcactaatttccatcatccagaaagggctgcagtacgtagaagcagaagtttcgattaatgaagacgggacccttttcgatggaagacccatcgaaagcctgtctctcatcgacgctgtctag

SEQ ID NO: 30009 - DNA, 360 bp, synthetic construct
  source 1..360: mol_type = other DNA; note = Synthetic coding sequence
atggtccgcacaaaaacatggacactaaaaaaacactttgtggggtaccccactaattcagatttcgagctgaagacagctgagctgcccccactgaaaaacggggaagtgttgttagaggcactgtttctgactgtggacccttacatgcgggtggtcgagagtaaaaatgtcgcactccccaaaggaacaattgtgctcgcaagccctgggtggacaacgcatagtatcagtgacggtaaggatctagagaaactgcttacagagtggcctgataccatacccctttcacttgctctcggaactgtcggaatgcctggcctgaccgcctacttcggactgcttgaaatctgtgggtag

SEQ ID NO: 30010 - DNA, 23907 bp, synthetic construct
  source 1..23907: mol_type = other DNA; note = Synthetic coding sequence
atggatcagccccagtttagcggtgcgcctagattcctgaccaggcccaaggcattcgtagtgtctgttgggaaggacgctactctctcctgtcaaattgtgggtaaccccacccctcaagtctcctgggagaaggaccaacaaccagtcgccgctggcgctcgctttcggctagcgcaagacggtgacttatatcggctgacgattctggaccttgctctgggagatagcggccagtacgtgtgcagagccaggaacgccatcggtgaggcttttgccgcagttggtctgcaggttgacgctgaagccgcatgcgctgagcaggcccctcatttcctcctcagaccaacgtccatacgggtgagggaggggagcgaagccactttcagatgccgtgtggggggaagccctcgcccagcagtgtcctggtccaaggatgggaggagactaggagagcccgatggcccaagagtgcgcgtggaggagctgggtgaggccagcgccctgagaattcgtgcagcacgccctcgagatggcggtacatacgaggttcgagcggaaaatcccctgggtgccgcttcggcggctgcagcactcgttgtggactctgacgcagctgacaccgcttcccgccctggcacaagtacagccgcactgctggcccacctccagagacgacgcgaggctatgagggccgagggagcccctgcctcgcccccttccaccggtactcgcacatgtacagtgactgagggcaaacacgcacggttgtcttgctacgtaactggtgagccgaagcctgagacagtctggaaaaaggacgggcagctcgtgaccgaaggcaggaggcacgtggtgtacgaggacgcacaggagaatttcgtcctgaagattctgttttgtaaacagtctgaccgcggactctacacctgtacagcctctaacctcgtgggtcagacatattcctctgtcctggtggtcgtcagggagccagcggtcccattcaagaaacgcttgcaggatctggaggttagggaaaaggagtcagccacttttctctgtgaggtgccccagccttccaccgaggccgcatggttcaaagaagaaacaagactttgggcctcagccaaatatggcatcgaagaggaaggcactgagcgcagacttacagtgcggaatgtcagtgccgatgacgacgctgtctacatttgcgaaaccccagaaggcagccggaccgtggctgagcttgcagtgcagggcaatctgctccgcaagctgcctagaaaaactgcagtcagagtcggagacacggccatgttttgcgtagagttagccgtgccagtggggccagtccattggctgcgtaatcaggaggaggtcgtggccggaggtcgggtggcgatttctgcggaggggactcgtcacacactcactattagccaatgctgtcttgaggatgtgggacaggtggcctttatggcaggcgactgtcagacctccacacagttttgcgtctctgcccctagaaaacctcccctgcagcctccagtcgacccagtggtcaaggccaggatggagtcatcggtcattctgtcttggtctcctcccccacacggagaaagaccggtgactatcgatggctacttggtcgagaaaaaaaaattgggcacctatacctggatccgatgccatgaggcagagtgggtggccacaccggagcttacggtggccgatgtcgccgaagaaggcaatttccagtttagagtgtctgccctcaacagctttggccagtctccctacttagagttccccggaaccgttcacctggctccgaagctggctgtgcgtacccccttgaaggcagttcaggcagtggagggaggagaggtgactttctccgtggacctaacagtggcctcagcgggtgaatggtttcttgatgggcaggcacttaaggcaagctcagtatacgagattcattgcgacaggacacggcataccctgaccattcgggaggtgccagcctctcttcacggcgctcagctgaagttcgtggcgaatgggattgagtcaagcatccgcatggaagttcgtgcggctcccggtctgacggctaacaagccacctgctgccgctgctcgagaagttttggcacgcctgcatgaagaagcccagctcttggcggaactgagtgaccaagctgccgcagtgacgtggctaaaagacggtaggaccctgagcccaggtcctaagtatgaagtgcaggccagcgcgggtcgccgagtcttactcgttcgcgacgtagccagagacgatgctggcctgtatgagtgcgtgagcaggggcggtagaatcgcctaccaactgtcggttcaaggcctagcaagattcttacataaggacatggccggttcatgtgtcgacgctgttgcaggtggccctgcccagtttgagtgtgaaacaagtgaggcgcacgtccatgtgcactggtacaaggacggcatggaacttggacactccggcgagaggttcctccaggaagatgtgggaacccggcaccggctagtggcagccacagtgactcgccaagacgaggggacatactcgtgtcgcgtgggcgaggacagtgtggatttcagactgagagtttcagagccgaaggttgttttcgcgaaagaacaactggctaggcgcaaacttcaggctgaggcaggcgctagtgcaacactgagttgtgaggtcgcccaggcacaaactgaggtcacttggtacaaagacggtaaaaagctgtcatccagctccaaagtgtgtatggaggcaactgggtgtacccgcagattggtggttcaacaggccggacaagctgacgctggggaatactcctgtgaggccggagggcagcgccttagcttccacctagatgtcaaagagcctaaagttgttttcgctaaagatcaggtcgcgcactccgaggtgcaggcggaagccggagcaagtgccacgctgagctgtgaggtggcacaagcacaaaccgaggtcatgtggtataaagacggcaagaagcttagcagtagtctaaaagtacacgtcgaagctaagggatgtaggagacggctggtggtgcagcaagcaggtaagacagacgcgggtgactacagctgcgaggcccgagggcaacgggttagctttcgcctccatattaccgaacccaaaatgatgttcgccaaagagcagagcgtacataacgaggtgcaggctgaagcaggcgcaagcgccatgctttcctgcgaagtggcccaggcccaaaccgaagtgacatggtataaggatggcaagaaactgtcctcatcaagtaaggtggggatggaagtcaaggggtgcaccagaaggctggtgctcccgcaggccggtaaagccgacgccggagaatattcttgtgaggctggcggtcaacgcgtgtcgtttcatctgcatataactgaacctaaaggcgtgtttgcaaaagagcagtctgtgcacaacgaggtgcaggccgaggccggaaccaccgctatgctcagctgtgaagtggcccagccccagaccgaagtcacatggtataaagacgggaagaaactgagctcctctagcaaggtccgaatggaagtaaaggggtgcaccaggcgcctcgttgttcagcaggttgggaaggctgacgcaggagaatattcgtgcgaggcgggaggccaacgggtgtctttccagctgcacattactgagcctaaagccgtgtttgcgaaagagcagctggtccacaacgaggttcggaccgaggcaggcgcttcagctactctgtcttgtgaggtggctcaggctcagacagaggtgacttggtataaagacggtaaaaaactaagttcttcttccaaagtcaggatcgaggccgctggctgtatgcgccagctcgtggtgcaacaagcaggccaggcggacgccggtgagtatacgtgtgaggctggcggacagcggctgtccttccacctcgacgtgagtgagccaaaggccgtgttcgccaaggaacaacttgcacaccgcaaggttcaagccgaagccggagccatcgctacattgtcttgtgaggtggctcaagcccaaacagaggtaacctggtacaaagacggcaagaagcttagcagctcttccaaggtcaggatggaagctgttggctgtacccggcgactcgtcgttcagcaagcctgtcaagctgacacaggcgagtactcttgtgaagccggagggcagcggctgagcttctccctggacgtggcagagcccaaagtggtcttcgcgaaagaacagccagtacaccgggaagtgcaagcccaggcaggagcaagcacgacactgtcgtgtgaggtcgcacaggcacagacagaggtaatgtggtataaggacggaaagaaactcagctttagcagcaaggtcaggatggaggctgtcgggtgtacccgccgactagtggtacagcaggcaggccaagctgtggccggtgagtatagttgtgaggccggttcacagaggctctcttttcacctgcacgtggctgaacctaaggcggtgtttgccaaggaacagcccgcatcccgagaggtccaagctgaggcagggacttctgccaccctctcttgtgaagtggcgcaagcacagacagaggttacttggtataaggacggcaaaaagttaagtagctccagtaaggtgcggatggaggccgtcgggtgcacgagacgactcgttgttcaggaggccggacaggcagacgctggcgaatactcctgcaaagctggggatcaacggctgagtttccacttacatgttgcagaaccaaaggtcgtcttcgccaaggagcagccagcccacagagaggtgcaggcagaggccggtgccagcgcaaccttatcttgtgaggtcgcccaggctcagaccgaagtcacatggtacaaggacggcaaaaaactgagctcatcaagtaaggtgcgagtcgaggctgtgggctgcacgcgaagactggtcgtgcagcaagccggacaggccgaggccggagaatatagctgcgaggccggaggccagcagctctcgttccggttgcaggtagctgagttggagccccaaatatcagagagaccatgccgccgagagccactcgtggtcaaggagcacgaggatattattctgaccgcgacccttgcaactccttccgccgcaactgtgacgtggcttaaggacggagtcgagatacggaggtccaaacgacatgaaacggcatcacaaggggacacacataccctgaccgttcacggcgctcaggtacttgattccgccatctacagttgccgcgtaggagctgaagggcaggattttcccgtgcaagtggaggaagttgccgcaaagttctgccgccttctggaacccgtgtgcggagagttggggggtactgtcaccctcgcatgcgaattgagtcccgcatgtgcagaagtagtgtggcgatgtggaaatactcagctccgcgtgggcaaaaggtttcaaatggtagcggagggaccagttaggagccttacagtgctggggcttagagctgaagatgcaggcgaatatgtgtgcgagtccagggatgatcacacatcggcccagctcactgtcagcgtacctcgggttgtgaagttcatgtccggcctttccacagtcgtagccgaggagggaggagaggctaccttccagtgcgtcgtttcaccatccgatgtcgcggtcgtgtggttccgggacggcgcactactacagccttcagagaagtttgcaatctcacagagtggagctagccattcattgacaatcagcgatcttgtgcttgaagatgctggccagattactgtggaagctgagggcgcttctagttccgctgctctccgggttcgagaagctccagtattgttcaagaaaaaactggagccacaaaccgtggaggaacgcagttccgttacactggaagtagagctgacaagaccatggccggaactaaggtggactagaaatgccactgcattagcccctggaaagaatgtcgagatccatgccgaaggtgcgagacacaggctggtactacataacgttgggtttgccgatcgtggatttttcggatgtgagactcccgacgataaaacacaggccaagctgactgtggagatgagacaggttcgcttggtgagaggactccaggccgtcgaggcgagagagcagggaactgccaccatggaggtgcagctcagccatgcggatgtcgacgggtcttggaccagagacggcctgcgcttccagcaaggtcccacatgccacctcgctgtgcgaggacctatgcatacactgacactttccgggctgcgccctgaagattcgggtcttatggtcttcaaggctgaaggggtccacacgtccgccagactggtcgtgaccgagctgcctgtctcattttcccggcctctgcaggacgtcgttactactgagaaagagaaagttacgctggaatgtgagttgtcacgacctaacgtggacgtgcgatggctgaaagacggggtcgagttaagggctggaaaaacaatggcaatcgctgcacagggagcatgtagatccctcacaatctatagatgcgagttcgccgaccagggagtgtacgtctgcgatgctcacgatgcccagagttccgcttctgtgaaagtgcaaggacggacctacactttgatctacaggagggtgctggctgaggatgccggagagattcagtttgtcgcagaaaatgccgaatctagagcgcaactgagggttaaagaactgcccgttaccttggtccgaccattgcgggataagattgccatggaaaaacacagaggggttctggaatgccaagtcagtagagccagtgcgcaggtgagatggttcaagggatcgcaggaactgcaaccagggcctaaatatgagctggtatccgacggactatataggaaactgatcatcagcgatgttcatgccgaagacgaggacacatacacttgtgatgccggagacgtcaaaacttccgctcagttcttcgtggaggagcagtccatcaccatcgtcaggggactccaagatgtaaccgtgatggagcctgcgccagcatggtttgaatgtgagacatctattccctcggttcgccctcccaagtggttgcttgggaaaaccgtgttacaagcaggcggtaacgtcgggctcgaacaagaaggcaccgtgcaccggttgatgcttaggagaacttgcagtactatgaccggtccggtccacttcaccgtcgggaaaagtcgaagctccgctaggttagtggtgtctgatattccagttgtgctgacgcgacccctggagcccaagactgggagagaacttcagtccgtggtgctgtcttgtgactttcgcccagccccaaaggccgtgcagtggtacaaagatgacacgccccttagcccttccgaaaagtttaaaatgtccctcgaaggccagatggctgagctgcgaattctgcggttgatgccagctgatgctggagtctatcggtgccaagcgggaagcgcacacagctcaacagaagtgactgttgaagcgcgagaggttactgtgacaggtccactccaagatgcagaggcaaccgaagaggggtgggccagcttcagctgcgagctgagccacgaagacgaggaagtggagtggtcactgaacggcatgccactgtataacgacagctttcacgaaatctctcataagggcagacgtcataccctggtcctgaagtcaatccagagggccgacgcagggattgtgcgagccagtagtctgaaggtgtccacctccgcgagacttgaagtgcgggttaaacctgttgtatttcttaaggcactggatgacctttcagccgaggagcggggaaccctcgccctgcagtgcgaagtgagtgaccctgaagcacatgttgtgtggagaaaggatggagtccagctgggcccatctgataagtacgatttcctgcacactgccggtacacgcggtctggtggttcatgatgtgagcccagaggacgccggactgtatacttgccacgtgggaagcgaagagactcgcgcacgcgtgcgggttcacgacctgcacgtaggcatcactaaacgactgaaaacaatggaggtgctggagggagaaagttgctctttcgaatgcgttctcagccacgagagtgccagtgatcccgctatgtggactgttggcggtaagaccgtagggagctcttcacgctttcaagcaacgcgacaaggccgtaagtacattttggtggtaagggaggccgcaccatccgatgccggtgaagtagtgtttagcgtgcggggtttgaccagtaaggcaagccttattgtgagggaaagaccggctgctataatcaagccgctggaggatcagtgggtcgctccgggtgaagacgtcgagttgcgctgtgaactgtctcgtgcaggcaccccagtacactggctcaaggataggaaggccattagaaaatctcagaaatacgatgtggtttgtgagggtacaatggccatgctcgttataagaggagcttccctcaaggatgccggagaatacacctgcgaggtggaagcctcaaagtcgacagcaagtctgcacgtcgaagagaaggccaactgttttactgaagaattgaccaaccttcaggtggaagagaaggggacagcagtatttacttgcaaaaccgagcatccagctgctacagtgacatggcggaagggcctgctggagctgcgggcaagcggaaaacaccagcctagccaggaaggcctgaccctgcggctcaccatttcggctctcgagaaggctgacagcgacacttatacttgcgatatcggtcaggcccagtcccgcgctcagctacttgttcagggccgtcgcgtgcacataattgaagatctggaagatgtggacgtgcaagaaggatctagcgctacgtttagatgcagaatttctcctgccaattatgaacccgtacactggtttcttgataaaaccccattgcacgctaacgagctaaacgaaatagatgctcaaccaggcggatatcatgtgctgacactaagacagctagccctgaaagacagcggtaccatctacttcgaagcaggcgatcagcgggcatctgccgcactaagggtgacagaaaagccctcagttttttctcgagagttgactgatgccaccatcactgaaggagaggacttaacccttgtgtgcgagactagtacttgcgacatacctgtctgctggaccaaagacggaaagacgctgcgtggcagcgccagatgccagctctcgcacgaggggcacagggcccaactgcttataacaggggcaacactgcaggatagtggtagatataagtgtgaggcaggaggtgcatgctcatcttctattgtgagggtccatgccaggccagtaagatttcaggaggcactgaaagacctggaggtccttgaaggcggtgctgctacactgcgttgcgtcctatcatccgtcgcagctcctgtcaagtggtgttacggaaataacgtgctgcggccaggcgataaatactcactccgacaagagggcgctatgctagagttggtcgttagaaatttgcgtccacaggactcgggacgctattcttgtagctttggcgatcagaccacgtcagcaaccctaaccgtcacagctttacctgcccagttcatcggcaaactacgaaataaagaggcgacagaaggcgcaacagccaccctgcgctgcgaactgtccaaggccgctccagtggagtggcggaaaggctcagagacccttagagacggggaccgctattgccttagacaggacggagccatgtgtgagctgcagatcagaggtctcgctatggttgatgcggcagagtactcttgcgtgtgcggggaggagcggacaagcgcctccctcactatccgacccatgccggcacatttcattggaaggttgagacaccaagagtccattgagggcgctacagctacgctgcgttgcgaactgtctaaggcagcaccggtggagtggaggaaggggcgtgaaagcctgcgtgacggggacagacactctctgagacaagatggcgctgtgtgcgagctgcaaatctgcggcttagctgttgccgatgcaggggaatacagctgcgtgtgcggagaggagcggacttccgccacactgacagtaaaagctcttcctgcaaaattcacagagggactgcggaatgaagaagccgtggagggcgcaaccgcgatgctttggtgcgagttgtctaaagtagcgcctgtcgaatggcgaaagggcccagagaaccttcgcgacggggatcgctacattctgcgacaggaaggcacccggtgcgagcttcagatatgcggcttggctatggccgacgcaggcgaatatctctgtgtctgcgggcaagaacggacatcagctacgctgaccatccgcgctctgcctgctaggttcattgaagatgtgaagaatcaggaagcccgagaaggtgccactgccgtgctacagtgcgaactgaattcagctgcccctgtagaatggcgcaagggttcggagacactccgcgatggtgacaggtatagcttgcgccaggacggcacgaaatgtgaacttcaaatccgaggcctggctatggccgatacaggggagtattcctgtgtgtgcggccaagaacgtaccagtgctatgctgaccgtccgagcgctgcccatcaagtttacagagggcttaaggaacgaagaggccacagaaggagctactgccgtgcttagatgtgagctgagtaaaatggctcctgtggaatggtggaagggtcacgagacactgcgagatggggataggcatagcctgaggcaagatggcgcacgatgtgagctgcagatcagagggctcgtcgcggaggacgccggtgaatatctgtgtatgtgcggaaaagagcgaacgagcgcgatgcttactgttcgtgccatgccctcaaagtttattgaggggctcagaaacgaggaggccacagagggagatacggcaactctctggtgtgaactgagtaaggctgccccagttgaatggagaaaggggcacgagacgctcagggacggggacagacactctctccggcaagacggaagccgatgtgagctgcagatccgtggtctggccgttgtcgatgcgggagagtactcttgcgtgtgtggccaagagaggacatctgcaacgctcacagtgcgcgctctccccgctaggtttattgaagacgtgaaaaatcaggaggctagggagggggctacagccgtgctccagtgcgagctgtccaaggccgcacctgtagagtggcggaaaggctcagagactctacggggaggcgacagatactccttgagacaggatggcaccaggtgcgaattacagatacacggcctaagtgtggctgataccggggaatactcatgtgtttgtggacaggagcggacaagtgccaccctcacagttcgggctccccagccggtcttccgggaaccactccagagtcttcaggccgaagaaggctcaaccgctacccttcagtgtgaattgtccgagcctactgccaccgtcgtgtggtccaaaggcggactccagttgcaggcaaacggccgtcgcgagcctcggctccagggatgcactgccgagcttgtccttcaagatctgcaacgagaggacaccggagagtacacgtgtacatgcggatctcaggcaacttctgccactctgactgtaaccgccgcacccgtacgctttctaagggagctacagcaccaggaggtcgatgagggtggcactgctcatttgtgctgcgagctcagtagagctggtgcttctgttgaatggagaaaaggcagcctgcagctgttcccgtgcgccaaatatcaaatggtccaagatggagccgctgcggaacttcttgttagaggtgtggagcaggaggacgccggtgactacacttgcgacacaggacacacccaaagtatggctagtctgtccgtaagagtgccacgcccaaagtttaaaacccgcttgcaaagtctggaacaggaaactggcgatatcgcacgcctctgctgccagttgtcagatgctgaatcgggcgcagtggtgcagtggctgaaagaaggtgtggagctgcacgctgggcctaaatacgagatgcgaagtcaaggagctaccagggaacttcttattcaccaactggaagctaaggatacgggagagtacgcctgtgttaccggtgggcagaaaactgccgcatcgctgagagtgacagagcctgaggtcacgatagtcaggggactcgtcgacgcagaagtgaccgctgatgaggacgtagaattcagttgcgaggtgtccagagccggtgccaccggcgtgcagtggtgtcttcagggattaccgctgcagagcaatgaggtgacagaagtcgcagttagagacggcaggatacatactctgcgattaaagggcgtgactccagaagacgccggaactgtgtctttccacttgggcaatcacgccagttccgctcagctaacagtgcgcgcacccgaagtcaccatcctggagccactccaggatgttcagctcagcgagggtcaggacgcgtcattccagtgcagattgagtagggccagcgggcaggaggctcgttgggctctcggcggagtgcctttgcaggctaacgagatgaatgacatcaccgtagagcagggaacgttacaccttctgaccctgcacaaggttaccctcgaggacgcgggtacagtcagcttccacgtgggaacctgctcatcggaagcacagctgaaggtaacagccaagaataccgtggtgcggggactcgagaatgtcgaagctttggaaggcggagaagctctctttgaatgtcagctctcacagcctgaggtcgcagcccacacctggctactggatgacgagcccgtgcatacatctgagaatgccgaagtggttttctttgagaacggtctcagacatctgcttctgttgaagaacctccgtccccaggatagctgccgcgttacatttttagccggtgatatggtcacatctgcgttcctgaccgtccgcggttggcgtctggagatccttgagccgctgaagaatgccgctgtgcgagctggggctcaggcctgcttcacttgcaccctaagcgaagcagtgcccgtgggtgaggcatcttggtatatcaacggcgctgccgtccagcccgacgattccgattggacagtgaccgcagacggatcacaccatgccctgcttttgcggagcgcccaaccacaccacgcaggagaggtcacctttgcttgccgagacgctgtcgcatcagctcggctcacagttcttggcctcccagatccacccgaggatgcagaggtggttgcaagaagctcccatactgtcacattgtcttgggccgcaccgatgtctgatgggggaggagggttatgtggatatagggtggaagtgaaggagggagcaacaggccagtggcggctttgtcacgagttagtgcctggacctgagtgtgtagtggatgggctcgcccctggcgagacttacagatttcgcgtcgccgctgtgggccctgtgggcgcaggtgagcctgtccatctgccacaaaccgttcgcctagccgagccgcctaagcccgtgcctccacagccgtccgcccctgaatcaaggcaagtggctgccggagaagacgtctcacttgagctggaagtcgtcgctgaggccggtgaggttatctggcataagggcatggaaaggatccaacctggaggtcgcttcgaagtggtgagtcaagggagacaacagatgcttgtgatcaaaggtttcacagcagaagatcagggtgagtatcattgtggattagctcagggttccatctgccctgctgcggcaactttccaggtcgcgcttagtcccgcatcggtcgacgaagcccctcagccttctctcccgccagaggctgcccaggagggcgatctccacctactgtgggaggcccttgcacgcaaacgcaggatgtctcgcgagcccacactggacagtatctctgagctcccggaggaggatggaagatcccaaaggctgccgcaagaagctgaggaagttgcacccgatttatcagaaggatatagcaccgctgatgagcttgccagaacaggggacgctgacttgtctcacacatccagcgatgatgagtctcgcgctggaacgccaagcttagtgacctacctgaaaaaggccggacgtccaggcacttcgccattggcatccaaagtgggtgcccctgcagcacccagcgtcaagccgcagcagcagcaggaacctttggctgccgttaggccacctctgggcgacctctcgaccaaggacttgggagatccgagtatggacaaagccgctgtcaagatccaggccgctttcaaaggttacaaggtgcgcaaagaaatgaaacagcaagagggccctatgttttcccacacgttcggagatacagaagcccaggtgggtgacgcactcaggttggagtgtgtggtggcgtctaaggctgatgtgcgcgctagatggttaaaggatggggttgagctcaccgatggcagacaccaccacattgatcagttgggagacgggacctgctctctgttaattaccgggcttgacagagccgacgcaggctgctacacctgtcaagtttccaataaattcgggcaagtgacccactctgcctgcgtggtcgtctcaggatccgaatccgaggccgagagttcatctggaggcgaattggacgatgctttccgaagagccgctcgcagactgcataggctctttcggactaagtctccagccgaagtgtctgacgaggagctttttctgagtgccgacgaagggccagcagagccagaggaacctgcagattggcagacataccgcgaggacgaacactttatttgtatcagatttgaagcacttacagaggcccgtcaggctgtgacacggttccaggagatgtttgctacactgggcattggtgttgaaattaaactggtcgagcagggccctcgacgcgttgaaatgtgtatttccaaggagaccccagcccctgttgttccgcctgagccattgccctccctgcttacttccgatgccgcacccgtttttctaaccgaactgcaaaatcaggaagtgcaggacgggtaccccgtttccttcgactgcgttgtgactggccagccaatgccttccgtcaggtggttcaaagacggaaaactcctcgaggaagatgaccactacatgattaatgaggaccagcagggaggacatcaactcatcattaccgcagttgtccctgcggatatgggcgtgtacagatgcctggcagaaaacagtatgggagtttcctcgacgaaggccgagcttagggttgatttaaccagcactgactatgatacagccgcagacgctaccgagtcaagctcgtatttcagcgcccaaggctatctgagcagcagggagcaggagggcacggagagcacaacagatgagggtcagttgccacaggtggtcgaggaactgcgggatctccaggtcgcacctggaaccaggctagcaaagtttcaactgaaggtcaagggctatcccgcacccaggctgtattggtttaaggatgggcagcccctgacggcttccgcccacatacgaatgacagataagaagattctgcacaccctggagatcatatccgttacccgtgaagactccggacagtatgccgcatatattagcaacgccatgggggctgcttacagcagcgctaggctgctggtccgtggtccggacgagcccgaggagaagccagcaagcgacgtacacgagcagcttgtgccacctcggatgttggagcggtttacccctaagaaggtgaagaaaggttctagtattaccttttctgtcaaagtggagggaagacccgtgcctacagtccactggctgcgagaagaggccgagaggggagtgctatggatcggcccagacacacctggctatacagtcgcttcctccgctcagcagcactctctggtgctgctagacgtgggcagacagcaccagggcacgtacacatgcatcgcctcaaacgccgctggccaggccctctgttcagcctctttgcacgtctctggccttcctaaagttgaagagcaggaaaaggttaaggaggccctgatctccacgtttctacagggtactactcaggctattagcgcacaggggctcgagacagctagtttcgccgaccttggcggacagagaaaagaggagcccctggccgcaaaggaggctctcggtcatctgagcctagctgaggtcgggactgaggagtttctacagaagctcacatcccagattacagaaatggtctcggccaaaatcacccaagctaaattgcaggttcccggaggtgattccgatgaagattccaaaactccttcagctagccccaggcatggacggtcacgcccatcttcctctattcaagagagcagctcagaaagtgaggacggagacgcgcgtggggagatctttgatatctatgtagtcacagccgactatctaccacttggtgctgaacaggacgcaattacactgagggagggacagtacgtggaggtgctggacgctgcacacccactgcggtggctggtaagaaccaagcctaccaaatccagcccctcccgtcagggatgggtgtcacccgcttatctcgataggaggctgaagctttcccccgagtggggcgcagccgaagccccagagtttcctggagaggccgtgagtgaagacgagtataaggccaggctgagctcagtcattcaggagctcctgtcatcagaacaggcctttgtggaggagctgcaattcctccagagccaccacctgcagcatcttgaacgctgccctcacgtacccattgcagttgccggacagaaggccgttatcttccggaacgtgagggatattggacgctttcattcatcttttctgcaagaactccaacagtgcgacaccgacgatgacgttgccatgtgctttatcaagaatcaggctgcttttgagcagtatctcgaattcctggtagggagagtacaggcagagtctgtggtggtctccaccgctattcaagagttttacaagaagtacgccgaggaggcgctcctggcaggcgatcctagtcagcctcctcctcctcctctgcagcactacttagaacaaccagtggagcgagtgcagcgttaccaagctcttcttaaggagctcatacggaacaaagccaggaaccgacagaactgtgctttgctggagcaagcttatgccgtcgtttccgccttgcctcagcgcgctgagaataagctgcacgtgtctctgatggagaattatccgggaaccttacaggccctgggggaaccgataaggcagggacacttcatcgtgtgggaaggtgccccaggggctaggatgccctggaagggacataacaggcacgtttttttattcaggaaccacttggtcatttgcaagccgagaagagattcaaggaccgataccgtgagctatgtgtttcgaaacatgatgaagctgtcctcaattgacttaaacgaccaagttgaaggcgatgacagggccttcgaggtatggcaggagcgcgaagattctgtcagaaagtacttacttcaagccaggacggcaatcattaagtcatcttgggtcaaggagatttgcggaatacagcagagactcgccctccccgtgtggcggcctcccgatttcgaggaagagctggccgactgcaccgcggaactgggtgagactgtgaagctagcatgtcgggttaccggaactccgaaacccgtcatctcctggtacaaggacgggaaggcagtacaagtagacccgcaccatattctgatcgaggacccggatggctcctgcgccctgatcctggactctttaaccggcgtcgacagcgggcaatatatgtgttttgctgccagtgctgcaggaaactgctcaactttagggaaaattttagtgcaagtaccacctcggtttgttaacaaggtgcgggcttctccattcgtggagggggaagacgcccagttcacttgtactatagaaggggcaccttatccccaaatcaggtggtataaagatggcgctttgttgactacgggcaataaattccagactctctcagagccacgctctggcctgctggttcttgtgatacgcgcagcttctaaggaagatctgggcctctacgagtgtgagttggtaaatagactcggaagcgccagggcctctgctgaactcaggatccagtcccccatgctccaggctcaagaacagtgtcacagagagcagttagtggcagccgtcgaggacacgactttggagcgggcagaccaggaggtcacctcggtgttaaaacgactgctggggccaaaagcacctgggccatccaccggcgacctcaccggccctggaccctgtccacggggtgccccagccctgcaggagaccggcagtcagcccccagtcactggtacatcagaggctcccgctgtccccccacgggtcccccagcccctgttgcacgaaggaccagaacaggagccagaggctatagcacgcgctcaggaatggacagttccgatcaggatggagggcgcagcatggcctggagcgggaacaggcgagctgctttgggacgttcacagtcacgtggtgcgagagaccactcagagaacctatacttaccaggcaatcgatacccacaccgctcgccctcccagcatgcaggttacaatcgaagatgtgcaggcccagactgggggtaccgcccagttcgaagcaataattgagggggatccccagcctagcgtcacctggtataaggattctgtccagttagtggattctacccgactttctcaacaacaggagggtaccacctattcattggtcctgaggcacgtggcctccaaagatgcgggagtctacacatgcctagcacaaaacacggggggacaggtcctgtgtaaagccgaattactcgtactgggcggtgacaacgagcctgattctgaaaagcaaagccacaggaggaaacttcatagcttctacgaggtcaaagaggagattggccgtggggtattcggtttcgtgaaacgggtacagcataaaggaaataagattctttgcgccgcaaagtttatccctctgcggagccgtacacgggcacaggcatacagagaaagggatatactggcagccctgtcacaccccctcgtgaccggcctgttggaccagttcgaaacccggaaaacactgatccttattttagagctatgcagttcggaagagctactggatagattataccgtaagggtgtcgtgaccgaagcagaggtgaaggtgtacattcaacaactggtggaaggcctacactacctgcacagccacggagtgctccatctggacataaaacccagtaacatcctaatggttcatccagcacgtgaggacattaaaatctgcgactttggctttgcccaaaacattacacctgcagagctccagttctcccagtacggctccccagagtttgtatcccccgagataatacagcagaaccccgtcagcgaggcctccgacatctgggcaatgggcgtgattagttatctgagtctcacatgcagctctccctttgcaggcgaatctgaccgggcaaccctcttaaacgtcctcgaaggccgagtctcatggtcctcaccaatggccgctcacctttcagaggacgctaaggattttataaaggctacactacagcgggctccacaggccaggccatctgctgctcagtgcttgagtcacccctggtttcttaaaagcatgcccgcagaagaagctcacttcataaacacgaaacagctcaagttccttctcgcaagaagtaggtggcaaagatcattgatgtcttataaaagtattctagtcatgcgcagcatcccggaactcttgaggggtccacccgattccccatcactcggcgtagcgagacacttgtgtagggacacgggtggatcttcatctagcagctcaagcagtgacaatgagctcgctccatttgcgcgtgcaaagtccctgcctccgtctcccgtgactcactccccactcttacatccccgaggattccttcgcccttcagcttccttgcccgaagaagctgaagccagcgagcgcagcaccgaagccccagcccctcccgctagcccggagggagccggacctcccgctgcacagggatgcgtgccgaggcacagtgtcatacgatccctcttctatcaccaagctggtgagtctccagagcatggggctctggcaccaggaagcaggaggcaccccgctaggcggagacacctgctcaaaggtggatacatcgcaggagcactgccaggtttgcgcgagcctttaatggagcacagggttctcgaagaagaggccgcacgcgaggaacaggccactctgctcgcaaaggcccctagtttcgaaaccgccctccgtctgcctgcaagtggcacccacctggctccaggacacagccacagtttagaacatgattccccctccactccccgaccctcttccgaggcttgtggtgaggcccaacggcttccctctgccccatccgggggagccccaattcgggatatggggcatcctcaagggtctaagcaattgccctctaccgggggacacccagggacagcacaacccgagaggccttcgccggattcaccctggggacagcctgcgcctttctgtcacccaaaacaaggcagcgctccgcaggagggatgttctccccaccccgctgtggccccttgccccccaggatcttttccacccggatcgtgtaaagaggccccactggttccgagcagtccctttcttgggcagcctcaggcaccacctgccccagcgaaggcctcccccccacttgattctaaaatgggacctggcgatatttctttgcctgggcgtcccaaaccaggcccatgctcctcacctggtagcgcaagtcaggcatcctcatctcaagtgtctagcctacgcgtagggtcaagccaggtgggcaccgagcctgggcctagcctggatgccgaagggtggactcaggaggctgaggacctgagcgacagtacccctaccctccagcgccctcaggaacaagccacgatgagaaaatttagcctgggaggcaggggaggctatgcgggagttgcagggtatgggacattcgccttcggtggggacgcaggcggaatgttgggtcagggcccaatgtgggctcggatagcttgggcagtctcacaatccgaggaggaggagcaggaggaggcccgagctgaaagccagagtgaagaacaacaggaagctagggccgagtctcccctgccacaggtgtcagcccgaccggtgcctgaagttggaagagctcccacacgaagttccccagagcccactccctgggaagatatcggccaggtgtccctggtccaaatacgggatctcagtggtgatgctgaggccgcagacactattagcctcgatataagtgaggtggatcccgcttatctgaacttaagcgatctgtatgacataaaatacctacctttcgaatttatgatctttcgaaaagtcccgaagtcggcacagccggagcctccctcgcccatggcagaagaggaactcgcagaattcccagagccaacctggccatggcccggtgagttgggacctcatgccggtctggaaattaccgaggagagcgaagacgtggacgccctgctcgctgaggctgcagtgggaagaaagaggaaatggagttcgccctctagatctctgttccacttcccaggcaggcatttgcctcttgacgagcccgctgaactcgggctgcgagagagggttaaggcttcagtggagcatataagccggattctgaaggggaggccagagggtcttgaaaaggaaggccctcctcggaaaaagcccggtctcgctagctttagactgtctggcctgaagtcatgggatcgcgcacccacctttctgagggagctgagcgacgagacagtggttctgggacaatctgttacactggcctgtcaggtgagtgctcagccagccgctcaggccacgtggtcgaaggacggagcaccgctggaaagcagctcaagggtcttaatcagcgcaacactgaagaatttccagctcttgacaatcctcgtcgtcgtggctgaggacttgggagtgtacacttgctctgtgtcaaacgctctaggaacagtcacgacaacgggcgtcctgaggaaagccgagcgcccttcgagcagcccttgtccagacattggggaggtgtatgccgacggagtcctgctagtatggaaaccagtcgaatcgtacggcccagttacttatattgtgcaatgctctctggagggaggcagctggaccaccttagcctcagatatctttgactgctgctatctcacctccaagttaagccgtggcggtacctacacctttagaaccgcctgcgtgtctaaggcgggtatgggcccatattcttccccctcggagcaggtcttgttggggggaccctctcacttagcttcggaagaggaaagtcaggggcgttcagcacagccactgccgtcgaccaagactttcgccttccagactcagatacaacgtggcagatttagcgtggtcaggcagtgttgggaaaaagcctccggtcgggcactcgcagcgaaaatcatcccttatcacccgaaggacaagacggcagtgttaagggagtatgaggccttaaagggacttcgccaccctcatctggctcagctacacgccgcatacctctcccctcggcacctggtgctgatcctggaattgtgtagcggtcctgagctgctgccttgtctggctgaaagagcatcctacagcgagtcagaggtgaaagactacctgtggcagatgctgtctgctacacaatacctgcacaatcagcatattctccatctggacctcagatccgagaatatgattatcaccgagtataacctgctgaaggtggtggacctggggaacgcccaatccttgagccaggaaaaggtcttaccttccgataaattcaaggactacctggagactatggctcccgagctcctggaaggacagggtgctgtgccccagactgacatttgggcgattggcgtgacagcgtttatcatgctgagtgccgagtaccccgtttcctcagaaggtgccagggatcttcagagaggacttaggaaagggctggtaagacttagccggtgctatgccggtctctctgggggtgctgttgcattcctccgctccaccctgtgcgcccagccgtggggtcgtccttgcgcctcgagctgtctccaatgtccgtggctcaccgaggagggccctgcttgctcccgcccagcccctgtgacgttccccacggctagactgagggtgtttgttcgcaaccgcgaaaagcgcagggcgctcctctacaagcgccacaatctcgcacaggtcagatag

SEQ ID NO: 30011 - DNA, 750 bp, synthetic construct
  source 1..750: mol_type = other DNA; note = Synthetic coding sequence
atgactgaggattctcagcgaaactttaggagtgtgtactatgaaaaagtcggttttcgcggagtggaggaaaagaaatccttagagatactgcttaaggatgacaggctcgatactgaaaagctgtgcacctttagccagcgctttccgttgcctagcatgtacagggcactggtgtggaaggtgctcctgggaattttacctcctcaccacgagtcccacgctaaggtaatgatgtacagaaaggagcagtatcttgacgttctgcacgccctcaaggttgtgaggttcgtgagtgatgctaccccccaggctgaggtctatctgcgcatgtaccagcttgagtctggtaagttaccaagatccccctccttccccctagagcctgacgatgaggtgttcttagcgatcgccaaagccatggaagagatggttgaagactcagtggattgttactggattacccgacggtttgtaaaccagctgaatactaaatacagagactctctcccccagcttccaaaagcttttgaacagtacttaaacttggaagacggtaggttgttaacacacctacgcatgtgcagcgctgcccctaagctcccttatgacctttggttcaagcggtgcttcgcagggtgcctgcctgagtcgtccctgcagcgagtttgggacaaggtcgtctctggcagctgcaaaattctggttttcgtggccgtggaaatcctactaacattcaaaatcaagtag

SEQ ID NO: 30012 - DNA, 417 bp, synthetic construct
  source 1..417: mol_type = other DNA; note = Synthetic coding sequence
atgtcgtcccttggtgccagctttgtccagattaaatttgacgacttacagtttttcgagaattgtggcggaggttccttcgggtccgtgtacagagcaaaatggataagtcaggataaggaggttgccgttaaaaagctgctgaaaatcgaaaaggaggctgaaattctgagcgtgctgtctcatcgaaatatcatccagttctatggtgtgatactggagcctcccaattacgggattgtaactgagtacgctagtttgggtagcctttatgactacattaacagcaatcggagcgaagaaatggatatggaccacattatgacatgggccacggatgtcgcaaagggcatgcactacctccacatggaggcccctgttaaggtgatacacagggacctgaaatccagaaattag

SEQ ID NO: 30013 - DNA, 1122 bp, synthetic construct
  source 1..1122: mol_type = other DNA; note = Synthetic coding sequence
atggcatccagttccgtcccgccagctacagtttctgcggctactgctggtcccggtccaggcttcggcttcgctagtaagactaagaaaaagcactttgtgcagcaaaaggttaaggtgtttcgagccgcagaccccctggtgggggtgtttctgtggggcgtcgcccactctattaacgagctgtcgcaagtgcctcctcccgtgatgctgctgccagacgactttaaggcgtcatccaagataaaggtgaacaatcatctattccacagagagaatttgccctctcacttcaaattcaaggaatattgcccacaggtctttcgcaacttgagagacagatttgggatcgacgatcaagattatctttacatcgtcaagtgtcatggtaatactctgcttccgcagttccttggcatgtatagggtttcggtagacaacgaagactcttacatgctggtgatgcgaaacatgttcagccatcgtctcccggtacaccgcaaatatgatttgaaaggctcccttgtttcaagagaagcgtcagataaggagaaagtgaaggaattgccaactctcaaggacatggacttcctaaacaagaaccagaaggtgtacatcggagaggaagaaaaaaagatttttctcgagaagcttaaaagagacgtcgagtttcttgttcagctcaagattatggattacagcctcctgttggggatccatgacatcattcggggatcagagcccgaagaggaggcaccggtgagagaggacgaaagtgaagtggatggagattgctctctcacagggcctcctgctcttgtcggctcttacgggaccagccccgagggaattggaggttatatccactctcatcgcccacttggccctggggagtttgagagttttattgatgtatacgccatccggagcgccgaaggcgcacctcaaaaagaagtttatttcatggggcttatcgatatcctcacacaatacgacgcaaagaaaaaggctgcccatgcagctaaaacggtgaaacacggggctggcgcagagatttctacagtgcacccagagcagtatgccaagcgcttcctggatttcataactaatatctttgcatag

SEQ ID NO: 30014 - DNA, 549 bp, synthetic construct
  source 1..549: mol_type = other DNA; note = Synthetic coding sequence
atggaggaaatccccgctcaggaggctgccggatctcctcgggtccaatttcaaagcctggaaacacagtcagagtgcttgtcacccgaaccgcagttcgtccaggacaccgacatggaacagggattaacaggtggattccctatttctaagccagacggaatctcacagctcgagcaagatctgcaagtcttcgacctcgagactaagactcgcgaggtgctgcgagacgactgtagtgacggggagactagagaagaaaataagctgctgatccctaaacagaaaatcagcgaggaagttcacagctataaagtcagagtgggcaggctgaaacatgacatcacccaggtcccagaaacccgggaagtgtataaaagcgaggaccgtctagagcgcttgcaggagatactgagaaaatttctttatttagaacgggagttccgtcaaattaccattagcaaagagactttcacgagtgaaaagaacaatgagtgtcatgaacctgaaaagtcattcagcctggactctaccatcgacgctgactag

SEQ ID NO: 30015 - DNA, 2253 bp, synthetic construct
  source 1..2253: mol_type = other DNA; note = Synthetic coding sequence
atgtctttgggcaaagcatacggcgtcgagagccacgttttgtcccccgctgagaccaagaccttgtaccccttgatgaatgtcgacgacctgtacggcacactttatgttccgcacgacggaaccatggaccctgcaggcacttgtacaactctggccagggccgctagcgcaaggggcgcacaggtaattgaaaattgtccagtcacaggcatcagagtgtggacggacgatttcggagtgcgccgagtggctggcgttgagacacagcacggctcaatccagacaccatgtgtcgtgaattgcgctggagtatgggccagcgccgtgggacgcatggccggtgtgaaggtgccacttgtcgctatgcaccatgcctatgtggtcaccgaacgcatcgagggcatccagaacatgccgaacgtccgggaccacgacgccagcgtttacctgcgtttgcagggggatgctctctcagtgggcggttacgaagctaaccctattttttgggaagaggtgagcgacaaattcgccttcggcctgtttgatctggattgggaagtgttcactcagcacatcgaaggcgcaattaaccgtgtgcctgtcctcgagaagacgggcattaagagcacggtctgcggacccgagtcatttaccccggaccataaaccgctcatgggagaggctcctgagctccggggttttttcctcgggtgcggcttcaacagcgcaggcatgatgctgggcggtggctgcggtcaagaactggctcactggatcatacacgggagaccagagaaagacatgcatggctatgatattcgtagattccatcattccctgactgaccaccccaggtggattagagaaaggtcccacgagagttatgctaagaactattctgtggtattccctcatgatgagcccctcgcaggcagaaatatgaggcgggaccccctgcacgaggagctgcttggacagggttgcgtgttccaagagaggcatggttgggagagaccagggtggttccatcccaggggcccagccccagtcctcgaatatgactattacggagcctatggttccagagctcatgaggattatgcgtacaggcgacttcttgccgatgagtataccttcgcgtttccaccgcaccacgacacaataaaaaaagaatgtctggcttgccgaggcgcagctgccgtttttgacatgtcttatttcggcaaattctatctcgttggactagatgctagaaaggccgcagactggctgttcagcgccgacgtgagcagacctcccggatccacagtgtacacctgcatgctgaaccaccggggtggtactgagtccgatttaaccgttagtcgcttagccccttcccaccaagcatcccccctcgccccagcctttgagggggacggctattacctggccatggggggtgccgtggcacagcataattggagccacataacaacagtcttacaagaccagaaatcccaatgtcagttgattgactcgagtgaagacctaggaatgatttcaatccagggccctgcgtccagggcaatcctacaagaagtccttgatgcagacctgagcaatgaagcatttcccttttctactcataaactcctccgggctgctggccacctggtaagagcaatgcgtctgagtttcgtgggcgagctcggatgggagcttcatattcccaaggcaagctgcgtgcccgtataccgggctgttatggccgctggcgcaaagcacggcttaattaatgctggctatcgggcaatcgattctctttctatcgaaaaaggctataggcactggcatgcggacctgcgtcctgatgattcccctctcgaggccggactggcattcacgtgtaagcttaagagcccggttccctttctaggccgtgaggccttggagcagcagcgcgctgcgggtctccgaaggcggttagtttgtttcactatggaggataaagtgcccatgtttggccttgaggccatttggaggaacgggcaagtggttggccacgtgagacgcgcagatttcggatttgccatcgacaagaccatagcatatggttacattcatgatccttctggcggtcctgtgtctctcgactttgtgaagtccggcgattacgcccttgaacggatgggtgtgacttacggagctcaagctcatttgaagtcccccttcgaccctaataacaagcgggtgaaggggatctattag

SEQ ID NO: 30016 - DNA, 459 bp, synthetic construct
  source 1..459: mol_type = other DNA; note = Synthetic coding sequence
atgtccgtcacatacgatgacagcgtaggagtggaagtgtctagcgattcattttgggaggtcggaaattacaagcgcacagttaaacgcattgacgatggccatcggttgtgcagcgacctgatgaattgtctgcacgagagggcacgcattgaaaaggcgtacgcacagcagctgacagagtgggcacgcaggtggcggcaacttgtggaaaagggtcctcagtacgggaccgtggagaaggcttggatggcctttatgagcgaggccgagcgtgtgtccgaactgcatctggaagttaaagcctctctgatgaatgatgattttgagaagatcaaaaactggcagaaggaggcctttcacaagcaaatgatgggcggattcaaggaaacgaaggaagctgaggacggctttcggaaggctcagaaaccttgggctaagaagctgaaggaggtgtag

SEQ ID NO: 30017 - DNA, 1620 bp, synthetic construct
  source 1..1620: mol_type = other DNA; note = Synthetic coding sequence
atggccacatccgcacctctccggtcactggaggaggaagtgacatgctccatctgcctcgattacctccgagaccctgttaccattgattgcggccacgtgttttgccgatcttgtaccacagacgtgcgccctattagcgggagccgccctgtgtgtccactctgcaagaagccctttaagaaggagaacatcagaccggtgtggcagcttgcatccctcgtggaaaacatcgaaaggctcaaggtggacaaggggcgacagccaggagaggttactcgcgagcagcaggacgccaagttatgcgagcggcatagggagaaactccactactactgcgaggatgacgggaagttactgtgcgtcatgtgccgagagagcagggagcaccgtccccatactgccgtgctcatggagaaggcagctcagccccaccgcgaaaaaatcttaaaccacctgtctaccttaaggagggaccgcgacaaaattcaggggtttcaggcaaagggagaagccgatatactggcagccctaaaaaagctgcaggatcagagacagtatattgtcgctgagttcgagcagggccaccagttccttagggagagggaggagcatctgctcgagcagctcgccaaattagagcaggagctaacagaaggcagggagaaatttaaaagcaggggggtaggggaactcgcccgactggcgctggtgatttcagaactcgagggaaaggcccagcagcccgctgctgagctgatgcaggacacccgcgattttctgaataggtaccctaggaaaaaattttgggtgggaaaacccattgccagggtcgtgaagaaaaagactggcgagttttcagataagttgctctccctgcaaagaggcttaagagaatttcaagggaaactcctgagagatttggaatacaaaactgttagcgtgacactggacccgcagagcgcgtctggatatctgcagttgtctgaagattggaaatgtgttacgtacacctcactctataagagtgcctatttgcacccacagcagttcgattgtgagcccggagtattaggcagcaagggatttacgtggggcaaagtttattgggaggtggaagtcgagcgggagggatggagtgaagacgaagaagagggcgatgaagaggaggaaggagaagaagaggaagaggaggaggaagcagggtacggggatggatacgacgattgggaaaccgatgaagacgaggagtctctgggggacgaagaagaggaggaggaagaggaagaagaagaagtgctggagagctgcatggtcggggttgctcgcgactccgtcaagagaaaaggggacctgagcctgaggcctgaggatggtgtctgggcactgagactgtcttctagtggcatttgggccaacacgtcaccagaagccgagctcttccccgctctgaggccaaggcgtgttggcattgctctggactacgaaggcggaacagtcaccttcaccaatgccgaatctcaggagctcatttacacattcactgcaacttttactcggcgtctggtgccttttctgtggcttaaatggcccggaacacggctcctgctgaggccctag

SEQ ID NO: 30018 - DNA, 1266 bp, synthetic construct
  source 1..1266: mol_type = other DNA; note = Synthetic coding sequence
atgatggaggacaataagcagcttgcgctcaggatcgatggagctgtccagtctgcttcacaagaggtcacaaacttaagggccgaattaaccgcaaccaatcgacggttggccgaactatcaggcggtggcggtcccggacccggacctggcgcagcggctagcgcatctgccgctggagattcagcggcaacaaacatggaaaaccctcagctgggcgctcaggtgctgctgagggaggaagtgtcaagactccaggaagaagtacacctgctgagacaaatgaaggagatgctggccaaagatctagaagagtctcagggcggtaagagctccgaagtgttaagtgcgaccgagctcagggtgcaactggcacagaaggaacaggaacttgccagagccaaggaagctctgcaggctatgaaggcagatcgcaagaggctcaagggcgagaagacagacctggtgagtcagatgcagcagctgtatgcaaccctggaaagtagggaggaacagctgcgtgactttattaggaattatgagcagcatagaaaggagtctgaagacgccgtaaaggcccttgccaaagagaaagacctgctggaacgggagaaatgggaattgagaagacaggccaaggaggctactgatcacgcgacagccctgaggagtcagttagaccttaaggacaatcgaatgaaagaactggaggctgagctcgctatggccaaacagagtctggccacactcaccaaggatgtgcctaaaagacatagcctggccatgcctggggaaacagttctcaatggtaatcaggaatgggtagtgcaggccgacctgccgctcaccgccgctatcagacagagccaacagaccttgtatcattcccatcccccacaccctgccgaccggcaagctgtgagagtgtcaccatgccatagcagacagccatcagtgatctccgatgccagcgctgccgaaggcgaccggagcagtacaccgagtgatattaactcacctaggcaccgaacgcactcactgtgcaacggggactctccaggcccagtgcagaagaatctgcataatcctattgttcaaagtcttgaagatctcgaggaccaaaaacgcaaaaagaaaaaggagaagatgggtttcggtagtatcagtcgagtcttcgcgagaggaaagcagagaaagagtctcgatccaggactcttcgacgggacggctcctgactattacatcgaggaagacgccgattggtag

SEQ ID NO: 30019 - DNA, 492 bp, synthetic construct
  source 1..492: mol_type = other DNA; note = Synthetic coding sequence
atggtgggtggcggaggcgtgggtggcggtttattagaaaatgccaacccactgatttatcagaggagcggagaacgaccagtgacagcaggtgaggaggatgaacaagtgcctgacagcatagacgccagagagatctttgatttgattcgaagcattaatgaccccgagcatccactgacattggaggaattaaatgtggtggagcaagtcagagtgcaggtctctgacccagagtccacagttgcagtggccttcaccccaactatccctcattgttcaatggctactctgatcggcctgtctatcaaagtcaagctgctccgtagcctaccccaacggtttaaaatggatgtacacatcacgcccggaacccatgcttctgaacatgccgtgaataaacagctggcagataaggaacgagtcgccgcagccctggaaaacacacacttgctggaggtggtgaaccagtgtctcagcgccagatcttag

SEQ ID NO: 30020 - DNA, 207 bp, synthetic construct
  source 1..207: mol_type = other DNA; note = Synthetic coding sequence
atgagtatctcatccgatgaagtgaactttttggtttacagatacctgcaggagagcggcttcagccatagcgcattcacctttggaatcgagtctcacatctcccagtccaatatcaacggcgcactggttccgcctgccgcattaattagcattattcagaaaggccttcagtacgtggaggccgaggtttcaatcaatgaatag

SEQ ID NO: 30021 - DNA, 534 bp, synthetic construct
  source 1..534: mol_type = other DNA; note = Synthetic coding sequence
atgtcctccaacgaatgttttaaatgcgggaggagcggtcactgggccagagagtgtcctacaggcggagggaggggcagagggatgcgctccagaggcagggggggattcactagcgacaggggatttcagtttgtgtcgagctccctgccagatatctgttatcgatgcggagagtccggacatctcgcaaaggattgcgacctgcaagaggacgcatgctacaactgtgggaggggaggtcacatcgccaaggattgcaaggagccgaagcgcgagagggagcaatgctgttacaattgtggaaaaccaggacatctcgcccgagactgtgatcatgcagacgaacagaaatgctactcttgcggagagtttgggcatatccagaaagactgcaccaaggtcaaatgttatagatgtggcgaaacaggccatgtggccattaattgtagcaaaacgtcagaggttaactgctatagatgtggagagtcaggccatctcgctagagaatgtactatcgaggcgaccgcttag

SEQ ID NO: 30022 - DNA, 429 bp, synthetic construct
  source 1..429: mol_type = other DNA; note = Synthetic coding sequence
atgacccagcttcggcaggtccttgagtccagattgcaacgccctctccccgaggatttggcgaggctttggccagttgtgatcctctgtcagcttgccaatcagctgagacctcgatcggtgccattcattcatgtgcccagcccggctgtcccaaagcttagtgcactcaaggctaggaagaatgttgagtcgtttcttgaggcttgtcgtaagatgggcgtgcccgaggcggacttgtgctcaccgtctgatctgctgcaaggaacggctagaggcctgcgtaccgcactggaagctgtaaagcgggtgggcggaaaagcccttcccccattatggccaccttccggattgggcggttttgtcgtgttctatgtggtgctgatgttgcttctgtatgttacttatactcggctgttggggtcttag

SEQ ID NO: 30023 - DNA, 1296 bp, synthetic construct
  source 1..1296: mol_type = other DNA; note = Synthetic coding sequence
atggaggacttgaagggcccaacggtatccagctttttaagcggaatgaaaaccgaactgtatcctggcgtgaccgcaatcgatatgatgtataaggagggtctgcacggggtcgataacggaatcctgatcttcgataaagtcaggattccaagggagaatctgctggataagttcggatcagtcgctccagatgggcagtaccatagtccaatacgcaataaatcggcccgtttcaacgctatgctcgcagcactaactccctcgaggttggcagtggcgtttcaggctatgggtgctatgaagctgggcctgacaatagctatccgttactctcactccagacggcaattcggcccaaagaccaaagaggaggtaaagatcattgaacaccaaacgcagactctcaggcttatgcctcatctcgcaactgccctagcgctcacgtttgtgagtcgctatgccggtgcccttctggatgaggacgtgtttcagggcaaagaactggtgaatagccgcagcttgcaagcactagtagcaggtctgaaagcctattcgacatgggagaatatacgctgcctccaggattgccgggagtgcaccggtgggatggttgtaggccgtgagttgctggcccaatacaccaagcagtacgaggaaaagccactgtttggattactgcagaactgggcagaaagcgtcggggataagctgcggactagttttcttgcctttaacatggacacggttgatgatctggctttccttctgaaggctgtgaaattcagagaacgggttctgcaacggggattggtggctcgtatatactataaagttaagaccaaaaaagaggatttctttcacgcctggaacagttgcctgcatcatgtcgcttctctaagtctggcccacactcaccgagtgactctggagcagttctcgctggcagtgaagagctgtcccgaccaggaggaccagaccctgttaatgaagttttgtcttctctacggaacgaagcttgtgttccaggaacgggcttggtatctggagcataagtacttgacccccatggcctccaccaggattcgaaaccagcttctggacctgtgtgatagcgttaaggatgatgcaagacgcgtgatatcaacgttcaatatcccacatacttacttgcacgccccaatcgccggaatctccaatcccagggcagcatgggcgttttatcctgcgcctctccagcccagaccgagggaggaagctaggagcagacgccctaaactcggggcaaaactgtag

SEQ ID NO: 30024 - DNA, 1443 bp, synthetic construct
  source 1..1443: mol_type = other DNA; note = Synthetic coding sequence
atggcagagctgcagatgctcctagaagaagagatacccggaggccgtagggctttgtttgactcctacacaaacctggagagagtcgcagattattgcgaaaacaactacatccagagcgcggataaacaaagagctctggaagaaaccaaagcctatacaacacagtctcttgctagcgtggcttaccttataaacacactggctaacaacgttttgcagatgctggacatccaggccagtcagttacggaggatggaatcttcaattaatcacatctcacagacagtagacattcacaaggaaaaagtggccaggcgggaaatcggaattctgaccaccaataaaaacacctcacggacgcacaagatcattgcacctgctaacctggagcgtccagtgagatacatccgcaaacccattgactatactatccttgatgatatagggcacggggttaaatggttgcttcgcttcaaagtttctacacagaacatgaaaatgggcggattgccaaggacgactccccctactcagaagccaccctccccgcctatgtccgggaaaggaaccctcggccgacacagcccttacagaaccttagagcctgtgaggcctcccgtggtgcccaacgactacgtcccatcccccaccagaaacatggctccaagccagcaaagccccgtgagaaccgcttcagtgaaccagaggaacaggacctactcgtcaagcgggtcttctgggggaagccaccctagttctagatcctcatccagagagaattctgggtcaggatccgtcggggttccgattgcggtcccaactccaagtccacctagcgtcttccccgacgctgccgctggcggtgctcagactcttgctgatgggttcaccagcccaactcccccagtggttagttctacaccaccaacaggacatccggttcagttctacagtatgaaccgacctgcctcacgacacacaccaccgaccatcgggggttctttgccatacagacggccaccttctattactagtcagacttcacttcagaaccagatgaatggcggtccattttattcacagaacccagtgtccgacacccccccaccacccccaccagtagaggaaccagtgtttgacgagtctccccctcctccaccaccaccggaggactacgaggaagaggaagcagcagtggtagagtactctgacccgtacgccgaagaggaccccccatgggcccctcggagttacttggagaaagtagtggctatttatgactacacaaaggataaggaggacgagctgagtttccaggagggcgctattatctacgtaatcaaaaaaaatgatgatggatggtatgagggagtcatgaatggagtgaccggcctctttccagggaactatgttgagtcgattatgcactacagtgagtag

SEQ ID NO: 30025 - DNA, 3102 bp, synthetic construct
  source 1..3102: mol_type = other DNA; note = Synthetic coding sequence
atggacgaagaagagaaccactacgtatcacaactgagagaggtgtactcgtcctgtgataccacaggcactggttttcttgatcggcaggaattaacacaactgtgcttgaagctccacctcgaacagcaactgcccgttctgctgcaaaccttgctgggtaatgatcactttgccagagtcaactttgaggaatttaaggaaggcttcgtggcagtactgagcagtaatgcaggtgtgcgccctagtgacgaggacagcagtagcctggaaagcgccgcaagctccgctatacccccaaagtacgtgaatggatctaagtggtatggacggagaagccgtccggaactttgcgatgccgcaaccgaagcccgaagggtacctgaacagcagacccaggcaagtttgaaatcccacctgtggagatctgcttcacttgagagtgttgagtcgcccaagagcgatgaggaggctgaatctaccaaggaagcacagaatgaactatttgaagctcaggggcagctgcagacatgggactccgaagattttggatctccgcagaaatcttgcagcccatcattcgacactcccgaaagccaaattaggggcgtgtgggaggagttgggcgtggggtcttccggccacctctctgaacaggaacttgcggtcgtgtgtcaatctgtgggcttgcaaggactcgagaaggaagagctcgaagatctgttcaacaaattggaccaggatggtgacggaaaggtgtcgctcgaagagttccagctcggcttgttctcccacgaacccgctctgctgcttgagagctcgactagggtgaagcctagcaaagcgtggtcacactatcaggttcccgaagaatccggctgtcacaccactaccactagttctctggtcagcttatgttccagtctgagactgttttctagcatcgatgacgggtccggttttgcttttcctgatcaagtcttagcaatgtggactcaagaaggaattcagaatggacgggagattctgcagtctttggacttttctgtcgatgagaaagtgaatctcctggagctgacctgggcgctggataatgaattgatgacagttgactctgcggtccagcaagcagctctggcgtgctatcaccaggaactgagctaccagcagggccaagttgagcagctggccagggagcgagacaaagctcgtcaggatcttgaaagagcagagaaacgcaatttggagtttgtaaaagagatggacgactgtcacagtactctagaacagttaacggaaaagaagataaagcatttagaacaagggtatcgggagaggctaagtttgctgcggtccgaggtggaggccgaaagggaactcttttgggagcaagcccatagacaaagggctgccctggagtgggacgtcggcagacttcaggctgaagaagcagggctgagggagaagctgactctagccttgaaagagaacagccgtttgcagaaggagatcgtggaagtggtcgagaagctatcggactcagaaagattggctttgaagctgcagaaagatctcgagttcgtcctgaaggacaaactcgagccacagtcagccgagcttctcgcccaggaagaacggtttgcggcagtcctcaaggaatacgagctgaaatgtcgggatcttcaggatcggaacgatgaattacaagctgaactggaaggactatgggcaagactgccgaaaaatcgacattctccctcatggtcgcccgacggtagacgccgtcagctccctggactgggtcccgctggcattagttttttaggtaattcagccccagtaagtatcgaaaccgagctgatgatggaacaggtgaaggaacactatcaagatctccgcacacagcttgaaacaaaggtgaactactacgagcgggagatcgctgctttaaagagaaatttcgagaaggaacggaaggacatggagcaggctcggagaagagaagtcagcgtgctggaggggcagaaagctgacctggaggagcttcacgagaagtcccaagaggtgatatgggggttgcaggaacagctgcaagacacggcacgtggtccagagcctgagcagatgggcctggcgccttgctgcacccaggccctgtgtggcctagctctccgacatcattcacaccttcagcagatccgattggaatttcacaggctgtcggaggaaaacacccttctcaaaaatgatttgggcagggttcggcaggagctggaagccgcagaatcgacacacgatgcccaaagaaaagagattgaggtcttgaagaaagacaaagagaaggcgtgcagtgagatggaggtgctgaaccgccaaaatcaaaattacaaggatcagttgagccagctgaatgtccgggtgctgcagctgggccaagaggcttcaacccatcaggctcagaacgaggaacaccgggtgactatccagatgttgacacagagcctggaagaagtcgtccgctcagggcagcagcagagcgaccaaatacagaagctgagggtcgaattggagtgtctgaatcaagagcatcagagcttgcagcttccctggtcggagctgacccaaactctcgaagaatcccaggaccaggtacaaggagcccaccttaggctgcgccaagctcaggcccagcatctgcaggaggtgagactggtgcctcaagaccgcgtcgctgaactgcatcggctgctgagtcttcagggggagcaggccagacgcaggctcgacgcacagagagaggagcacgaaaaacagcttaaagccaccgaagagagagttgaagaagcagagatgatcctcaaaaacatggagatgctacttcaggagaaggttgataaactgaaagaacaattcgaaaagaacaccaaatctgatctcctcttaaaggaactctacgtcgaaaacgctcacctggtgagagccttacaagccactgaagagaagcagcgaggagctgaaaaacagagtaggctcctggaagagaaagtccgggctctgaacaagctagtctcaagaattgccccagccgctctctccgtgtag

SEQ ID NO: 30026 - DNA, 627 bp, synthetic construct
  source 1..627: mol_type = other DNA; note = Synthetic coding sequence
tgttgtggctgctccggcggatgcggatccggttgtggtggcagaggttccggatgtggcggatgcgggagtggctgtggtggttgtgggagtgggtgcggtggctgtggctctggctgcgggggatgcggcggttgcggctccggctgcgcagggtgcggagggtgcaagggaggatgcggatcctgtggcggttccaaacggggttgcgtctcttgtggggtgagcaagggagcctgcggctcctgcggcggatctaaggggggatgtggttcttgcggtggatccaaagggggatgcggcagctgcggcggaagtaaggggggatgtgggtcatgtggtggaagcaaggggggatgtggctcttacggctgctcccagtcttcctgctgtaaaccatgctgttgtagctccggttgcgggagttcatgctgccagagctcatgttgtaagccgtattgttgccagagctcatgttgcaaaccctactgttgtcagtcctcatgctgcaagccatgcagctgtttcagtggctgcggcagctcctgttgtcagagttcgtgttataaaccgtgctgctgccagagcagttgctgcgtcccggtctgctgccaatgtaaaatttag

SEQ ID NO: 30027 - DNA, 642 bp, synthetic construct
  source 1..642: mol_type = other DNA; note = Synthetic coding sequence
atggcgggatcccccgaactagtggtgctggatcccccttgggacaaggagcttgctgctgggacagagtctcaagcgctcgtgtccgcaactcctcgcgaggattttcgcgtgcgctgtacatccaagagagcagttaccgagatgcttcagctatgtggcaggtttgtacagaaactgggtgacgccctgcccgaagaaatccgggaaccagctctgcgtgacgctcaatggacctttgagtccgccgtgcaggaaaacatctcgatcaatggacaagcttggcaggaggccagcgataactgctttatggattcagacataaaggtgctggaggaccagttcgacgaaattattgttgacatcgcaacaaaaaggaaacagtacccaagaaaaatcctcgagtgtgtgatcaagaccattaaggccaagcaggagatcctgaagcaatatcatcctgtggtgcaccccctggacctcaagtatgatccagaccccgttctgaatggtaacgcgttcaattttagccctttcaatatgatgcttgctgtggacttaagctatatggtgttcatcacctcttccccgtcttacgggaagtttgaaatgcagcgaggcaacagcagcaagggggaccagtag

SEQ ID NO: 30028 - DNA, 3720 bp, synthetic construct
  source 1..3720: mol_type = other DNA; note = Synthetic coding sequence
atgacaatatggcaaatgcaaaagcaagcacagaggggatccccggcaaggactcacagtatgatgagtctttcagttcggcctcagcgcagattactctcagccagagtgaaccgctctcaatccttcgccggtgtgctcgggtctcacgaacgaggccctcgaagttttcccgtgttctcccccccaggaccacctcgcaaacctcccgctttgagccgtgtgtcccggatgttctcagtggctcatccggctgcaaaagtccctcagccggagagactggaccttgtgtataccgccctgaagaggggactgactgcctacttggaggtacatcagcaggagcaggagaagttgcaggggcagataagagaatctaaacgaaactcacgcctggggtttctctatgacttggacaaacaagtcaagagcatcgaaagattcctcagacgtctggaatttcatgccagtaaaatcgacgagctctacgaggcatactgcgttcagaggcgactgcgggatggagcctataacatggtgcgggcttacaccacgggaagtcccggtagtcgcgaagcacgggattcattagcggaggctacaagaggccacagagagtacacagagtccatgtgtctgctggagagtgagctggaagcgcaattaggtgagttccaccttcgtatgaaaggcctggccggtttcgcgcgtctctgtgttggagaccaatacgagatctgtatgaaatacggacggcagagatggaaactacggggtcgaattgagggatcaggaaagcaagtttgggactctgaggaaacaatcttcctgcctctactgaccgagttcctctcgattaaggtaacagagctgaaaggtcttgcaaatcatgtcgtcgttggaagcgtgtcatgtgaaaccaaggacctctttgctgccctgccacaggtcgtggccgttgacataaacgacctgggaacgatcaagctgtctctcgaggtgacttggtcccctttcgataaggacgaccaaccttccgccgcttcctccgtgaataaggcttcaacggttaccaaacgcttcagcacttacagtcagagtcctcccgacacaccttctctgagggaacaggccttttataatatgctccggaggcaagaagagctggaaaacggaaccgcttggtccttatcctcagagtcatccgacgactcgagtagccctcaactgtctggtactgctcggcattcaccagctcccagacccctggtgcagcagcccgaaccattgccgatccaggttgccttccggaggccagagacacccagctccggacccctcgacgaagagggggctgtggcacccgttctggctaatgggcacgccccttacagcagaacactgagccacatcagcgaagctagcgtcgatgcagccctcgccgaggcatccgtagaagctgtgggccctgaatcactagcatggggtcccagcccacccacacacccagctcccacacacggagagcaccccagtcccgtcccgcctgctcttgatcccggtcacagtgcaacctcctctactttgggcaccacagggtccgttccaacctctaccgatcctgctccctccgcacatctggactcagtgcacaaaagcactgactctggaccatccgaactgccaggcccaacacacaccactactggctcgacctacagcgccattacaacaacccatagtgccccatccccactcactcatacaacaaccggctcaacgcacaaacccatcatctccactctcacaacaacgggcccaacactcaatatcattggccctgtccaaaccactactagccccacccacaccatgcccagtccaacccataccaccgcttctccgacacacacttccacctcgcccacccatactcctacgtctcctacccacaagactagtatgtcaccgcctactacgacatcaccaaccccatccggaatgggcctggttcagacagcaacttctcctacccaccccacaacttctcccacccaccccactacgtcacccattctgattaatgtgagtccatcaacaagcctggagctcgctaccctttccagtcctagcaaacattccgatcccacattgccgggtaccgactctttaccatgtagtcctcctgtgagcaattcttatacccaggccgacccaatggcccctcgcactcctcatcccagtccagcgcacagcagccgaaaacccttaacatccccagcacccgacccatccgaatccactgtgcaatccctgtcacccacaccatcccctccgaccccagcgcctcagcactccgacctgtgtctcgcaatggctgttcaaacacctgtgcctactgccgcaggcggatctggagatcgcagcctcgaagaggctctgggtgccctgatggccgctttggatgactaccggggtcaatttccggaactccagggcctcgagcaggaggttacacgcctggagtcccttctgatgcaaaggcaggggctcacaaggtcacgagcaagctccctctccataacagtcgagcatgcccttgaatcctttagtttcctgaacgaagatgaggacgaagataatgatgtcccaggtgaccgcccaccttcctctcctgaagcaggagctgaggatagcatcgacagcccctctgctcgtcccctgtccaccggctgccccgcactggacgccgctcttgtacggcacttataccactgtagcagactgctgctgaagctggggactttcggacctctcaggtgccaagaggcttgggccctggagcggctgttgcgcgaagcccgagtattagaagctgtctgcgaattttctcgccgatgggagatccccgcttcatctgcccaggaagttgtgcagttctccgcatcacggccaggcttcctgaccttctgggaccaatgcaccgagcgactctcctgcttcctgtgtcccgtggagagagttctgctgacattctgtaatcagtatggtgccagactatcccttagacagcccggactagctgaggcagtctgcgtcaagttccttgaagacgcactgggtcaaaagctccctaggaggccccaacccggacccggagaacaacttaccgtcttccaattctggtcattcgtggaaacactggactctcccactatggaggcctacgtgacagaaacggccgaggaggtgctcctcgtgcgaaatctaaacagcgacgatcaggcggttgtcctcaaagccttgcggttggcgcctgagggccgactgagacgcgatgggctgagagcccttagttctctgctcgtgcatggaaacaacaaagtgatggctgccgtctctacacagttgcgatcactgagtctgggaccaacgtttcgcgaaagggccttactgtgttttttggaccagctggaagacgaggatgtgcagacgcgggtggccggatgtcttgcactaggatgcatcaaagcccctgagggtatcgaacctctggtctatctgtgccagactgatacagaggctgttcgagaagcggcaagacagagtcttcagcagtgcggcgaagagggacagagtgctcacaggagactggaggagagcctggacgccctgcctcggatctttggacccggttctatggctagtaccgcattttag

SEQ ID NO: 30029 - DNA, 732 bp, synthetic construct
  source 1..732: mol_type = other DNA; note = Synthetic coding sequence
atggtcaccgactacggcgcatttattaaaatcccagggtgccgaaaacaggggctggttcacagaacccacatgtcatcctgcagagttgacaagccttccgagattgtcgacgtgggagacaaagtctgggtgaaacttataggccgagagatgaaaaacgacaggatcaaggtgagccttagcatgaaggtcgtcaatcaaggcaccggaaaagatttagatcctaataacgtgataatagagcaggaagaaaggcgcagacgttcttttcaagactacactggtcaaaagattaccctggaggcggtgcttaacacaacttgcaagaaatgcggctgcaagggcagggtgaagcctctgccattccctcggtttagcccatgcggttggaccctcttctggaaaaaagaggccgctcagtgtcacttcgctaaggactgcttcatgcagcccggtggtactaagtatagcctgatcccagacgaagaggaggagaaggaggaagccaagtcagcagagtttgaaaaacccgatccgacccggaacccaagcagaaagcgaaagaaggagaagaaaaagaaaaaacaccgagatagaaaaagcagtgattcagactccagtgatagtgaaagcgataccgggaagagggccagacacacttccaaagatagcaaagctgccaagaaaaagaagaagaagaagaagcacaagaagaagcacaaggaatag

SEQ ID NO: 30030 - DNA, 330 bp, synthetic construct
  source 1..330: mol_type = other DNA; note = Synthetic coding sequence
atggaggagatccccgctcaggaggccgcaggcagcccaagagttcagttccagtctctggagacgcagtcggagtgccttagccctgaaccccagttcgtccaggataccgatatggagcaggggttgacaggcggttttccgattagcaagcctgatgggataagtcagttagagcaggatcttcaggtattcgaccttgaaacaaaaaccagagaagttctgagagacgactgcagtgacggtgagacacgagaagaaaacaagttgctcattccaaaacagaagatatccgaggaagtgcattcttataaggtccgcgtgggatag

SEQ ID NO: 30031 - DNA, 4134 bp, synthetic construct
  source 1..4134: mol_type = other DNA; note = Synthetic coding sequence
atgagcctggaacgggaactgcggcagctgtccaaggcaaaggccaaggcccagagagcaggccagcgcagggaggaagcagccctgtgtcatcagctgggcgagcttttggctgggcacggaaggtacgccgaggcactggagcagcactggcaagaattgcagctacgggaacgggcagatgaccccctggggtgtgccgtagcccacaggaaaatcggcgaacggttggccgaaatggaggactatcctgctgctcttcagcaccagcatcagtacctggagcttgcccacagcttacggaaccatactgagttgcagagagcctgggctacaattgggcgaacccacctagacatctacgatcactgtcagagcagggacgcccttctacaggcccaagccgcttttgaaaagtcactagccattgtcgatgaagagcttgaaggcacgcttgcccagggggaactgaacgagatgcggacgaggctgtacctcaacctaggcctcacttttgagtctttacagcagaccgccctgtgtaacgactatttcagaaagagcatcttccttgcggaacagaaccacctgtacgaggatctttttcgcgcaagatacaatctcggtaccatacattggagagcaggtcagcactcccaggccatgcggtgtctggagggagcgagagaatgtgcccataccatgagaaagcggtttatggagagtgagtgttgtgtcgttatcgcgcaggtcttacaggacctgggagacttcctggcagccaagagggcactgaagaaggcctatcgtctgggaagtcagaagccagttcagcgggctgccatttgccagaatctgcaacatgtcctcgccgtcgtgaggctgcagcaacagctggaagaagctgaaggacgcgatcctcaaggagctatggtcatttgtgaacagctgggagacctcttctctaaggccggtgatttcccgagagccgctgaagcctatcaaaaacaactgcgcttcgctgagcttctggaccggccaggagcagagcgtgcgatcatacatgtcagtcttgcaaccactctgggcgacatgaaggaccatcacggcgcagtgcgacactatgaggaggagcttcgcctgcggagtggcaatgttctggaggaggccaaaacatggttgaacatcgcattgagtcgcgaagaggccggagacgcttacgagcttttagcaccatgttttcagaaagctctctcctgcgcacagcaggcacagaggccccagctccagcgtcaagtgctgcaacatctgcacaccgtccagttaaggctgcagcctcaggaagccccagagactgaaactaggctacgtgagctatcagtagctgaagacgaggatgaagaagaggaggctgaagaggccgcagcaacagccgagtccgaagcattggaggccggagaagttgagctaagtgaaggcgaagatgacaccgacgggcttacaccacaactcgaagaggacgaggagctgcagggccacctaggccgaagaaagggcagtaaatggaatcgcaggaatgatatgggagaaactttgctgcacagagcatgcattgagggacagttacggagagtccaggatttggtccgacaagggcatccactaaatccacgcgattactgcggatggacacccctgcacgaggcctgcaattacggccacttggagatcgtgcgattcttactggatcatggagccgctgtggacgaccctggagggcagggctgcgaaggcattacacctctgcacgacgccctaaactgcgggcatttcgaggtggcagagctgctcctggagaggggtgcttccgtgacactccgaacgagaaaagcctcggcaagatggcggagatgctctagcggcaagctgtataggcgggatctggatctggaaacacgccagaaggctagggccatggaaatgttattgcaagctgccgcttcaggacaggacccgcatagctctcaagcgtttcatacaccatccagcctgctttttgatccagagactagtcctcccttgagcccctgccccgagcctccttcgaatagtacccggctgcccgaggcttcccaggcccacgtacgagtgtcccctgggcaggccgcaccagcgatggcccgacctagacgctcaagacacggccctgccagtagctcctcttcatctgagggggaggactctgccggacccgcacgcccatctcagaaacgccctcgttgcagcgccaccgctcagcgggtggccgcatggaccccgggtcctgcgtctaatcgggaggctgcaacagcgtcaactagtcgcgcagcctaccaagccgctattagaggagtgggaagcgcccagtcacggctcggtcccggaccccctcgtgggcatagcaaagccttggccccacaggccgctctaattcctgaagaggagtgtttggctggcgactggctggaacttgacatgccgttaacaaggagtaggaggcctcggcctcggggtactggagataacagacgccctagcagtacatctgggtccgatagcgaagaatcgcgtccacgcgctcgggcaaaacaggttcgccttacctgtatgcaaagttgttctgccccagtgaacgcaggtccaagctctctggcctctgagcccccaggttcccctagtaccccccgagtgtccgaaccttcaggagactcgtccgctgcgggtcagccgctgggacccgctcctcctccacctatccgagtgcgggtgcaggtccaggaccaccttttcctcatccccgttccgcattcttccgatacccactcagtcgcatggttggccgagcaggcggctcagagatattatcagacctgtgggctcttaccacggctgacgctcagaaaggagggtgccctcctggcgcctcaggacctgattcccgatgtcctgcagtccaacgatgaagtgctagctgaggtcacatcttgggacctgccacccctcacagatcgatatcgcagagcgtgtcagtcgctcggacagggggaacatcagcaggttctgcaggccgttgagcttcagggcctcggcctttccttttctgcctgcagtctcgctctggaccaggcccaattgacgccactgctgagagcattgaaactgcacaccgccctgagggagctgagattggccggtaaccgccttggcgacaaatgtgtggctgagctggtggcggctcttggcaccatgccttcgctggccttgctggatctcagctccaaccatctaggaccagagggtctgaggcagctggcaatgggattgcccggacaggcaacactgcaatcccttgaagagctggacctgtccatgaaccccctcggcgacgggtgcggacagagtctggcttctctgctgcatgcttgccctcttcttagcactttgaggctgcaggcctgtggattcggcccaagtttcttcctcagccatcagacagccctcggaagtgccttccaggatgccgaacatctcaaaaccctaagcctgtcttataatgccctgggggcacctgccctggccaggaccctccagtccctgccagcagggaccctgcttcaccttgagctgagtagcgttgctgccggtaaaggggatagtgatctgatggaacccgttttccgatacctggccaaagagggctgcgcacttgctcacctgaccctaagcgccaaccatctgggcgataaggccgtgagagatctctgtagatgtctaagtctgtgtccgagcctcatcagcttggacctctccgccaatcctgagatctcatgcgcgtcgctcgaggagttactttcaaccctgcagaagaggccacaaggcctatcatttttgggtttatcagggtgtgctgtgcagggtcctctcggactggggctatgggacaaaattgctgcacagctacgcgagctgcagttgtgtagtcgtcgtctgtgcgccgaggatcgcgatgctttgaggcagctgcagccttcccggccaggtcctggggagtgcacactggaccacggaagcaagctattcttcaggcgtctttag

SEQ ID NO: 30032 - DNA, 675 bp, synthetic construct
  source 1..675: mol_type = other DNA; note = Synthetic coding sequence
atgccaaccctgtttaagggcgtgtggggtgtcgttgagcattctagagctcttgggagattctgcccagcctgcctgccctcgggtcctcacctgcatacacaacctgccttgggaacagctgagatgacccttttgtccagccagtcttccagcctggtggctccatcggggagcgtcagtgctgagaatccagagcagaggatgcttgagaagagggcaaaagtgatcgaggaactactgcaaacagagcgcgactacattcgggatctggaaatgtgcatcgaaagaatcatggttcccatgcagcaggcacaggtgcccaacatcgacttcgaagggctgttcggcaacatgcagatggtgattaaggtgtcaaagcagttacttgccgcactcgagattagcgacgcggttggtccagtgttccttggccatagggacgaactagaaggcacttacaaaatttactgtcagaatcacgatgaggcaattgctttgttagagatttacgaaaaggatgaaaagattcaaaaacacctccaggacagcctggcggatctgaaatccctttacaatgaatgggggtgcactaattacataaacctgggttctttcctgattaaaccagtgcagcgggtgatgcgctacccattgctgctcatggagttatag

SEQ ID NO: 30033 - DNA, 354 bp, synthetic construct
  source 1..354: mol_type = other DNA; note = Synthetic coding sequence
gtctgtggagattatctcttgtcaagaatggatgtgaccagctgcattagctacagaaactttgcttcgtgcatgggggactctcgtctactcaacaaggtggacgcatatatacaggagcacttactacagatatccgaggaggaggagtttctgaaactgccccgtctgaagctcgaggtcatgcttgaagataatgtttgtctcccttccaacggaaagctgtacacaaaggtgatcaactgggttcagcgcagtatctgggagaatggcgattcgctggaggagttgatggaagaagtgagctttaaggtgaatggcatccagcccttcctgaagatcatcttgctgtag

SEQ ID NO: 30034 - DNA, 285 bp, synthetic construct
  source 1..285: mol_type = other DNA; note = Synthetic coding sequence
atgttatgctggggctattggtctcttggccagccaggcattagtaccaatcttcaggggattgtggccgaaccccaggtctgcggctttatatctgacagaagcgtgaaagaggtcgcctgtggaggcaaccactctgtatttttactggaggacggagaggtgtacacttgtgggttgaacacaaaagggcagttaggccacgagcgcgaggggaataagcccgaacagatcggcgcattggcagatcagcatataatccacgtcgcttgcggtgaatcgtag

SEQ ID NO: 30035 - DNA, 747 bp, synthetic construct
  source 1..747: mol_type = other DNA; note = Synthetic coding sequence
atggcaacctctgccccattaagatctttggaggaagaggttacatgctcaatctgcctcgactatctcagggacccggtcactatcgactgcggccacgtgttctgtcgctcttgcaccaccgatgtgcgccctattagcggctcccgccctgtttgtcctctctgcaaaaagccgtttaagaaagagaacatccggccagtgtggcagcttgcatcattggtcgagaatattgagcgcctcaaggtggacaaggggagacagccaggtgaagtcactcgagagcagcaagacgctaaactctgcgagagacatcgcgaaaaactgcactactactgcgaagatgatggcaagctcctgtgtgtaatgtgccgtgaatcacgtgaacacagacctcacaccgccgtactgatggagaaggccgctcaacctcaccgcgagaagatcctcaaccatcttagtactctgaggcgagatagagacaagattcaaggctttcaggctaaaggtgaggcggatattttagccgcactcaagaagttgcaggaccagcggcagtacattgtggccgagtttgaacagggccatcagttcctgagggaaagagaggaacacttactggaacagctcgctaagctggaacaggaattgacagaaggacgcgagaagttcaagtcacggggagtgggggaactggcacgtcttgccctggtgatttcagaactggagggcaaggcacagcaatag

SEQ ID NO: 30036 - DNA, 2814 bp, synthetic construct
  source 1..2814: mol_type = other DNA; note = Synthetic coding sequence
atggagccagacattatcagaatgtatagtagctcccccccacctctcgacaacggtgctgaggacgacgacgatgacgagtttggcgaattcgggggattttctgaagtgtctccctccggagtggggtttgtagatttcgacacaccggattatacccgcccaaaggaggagttcgtgccttccaatcactttatgccgattcacgaattctcggaaaacgtggatagtctgacctcctttaagtcaatcaaaaacgggaacgacaaagacatcaccgctgaattatccgctccagtcaagggacaaagcgatgtgctgttaagcaccacaagtaaagagatcatctcatccgagatgctggctaccagcattgatggtatggagcgaccaggcaatctgaacaaggtggtggagcaaagacaaaatgttggcaccctggagagtttctcaccgggtgacttcaggacaaatatgaatgttgttcaccagaataagcagctggaatcctgtaatggtgaaaagccaccatgccttgagattttgactaacggctttgctgtattggaaacggtaaatcctcaggggaccgacgaccttgacaatgttgcagacagcaagggtcggaaacccctctccacccattccacagagtataatcttgattccgtgcccagccctgcagaggagtttgccgactttgcaacattctccaaaaaggagcgaatccagctggaagagattgaatgtgcagtcttgaacgaccgggaggcgttgactattagggaaaacaacaagattaaccgggtcaatgagctgaactccgtcaaagaagtcgctctgggcagatcccttgataacaaaggggacacagatggtgaggaccaagtctgtgtgagcgagataagtatagtcaccaaccgtggcttttccgtagaaaaacaagggctcccgaccctgcagcaggatgagtttctgcagtctggggtccagtcaaaggcttggtctctggtggacagtgcagataactccgaagccatccggagggaacagtgcaagactgaagagaaacttgatctgctgacgtctaagtgtgcgcatctgtgtatggatagcgtgaagaccagcgatgatgaggttggttcaccaaaagaggagagccgaaagttcactaactttcagtctcccaatatcgaccctaccgaggagaatgacttagacgacagtctatccgttaaaaacggagactccagtaacgatttcgtaacttgcaatgacatcaatgaggacgacttcggggactttggcgactttggctccgcttcaggatcaaccccgccttttgtcacaggcacacaggacagtatgagcgatgccacttttgaagagtcctccgagcactttccacatttcagtgagccgggagatgattttggtgagtttggtgacattaacgccgtttcatgccaggaggagacgatacttactaagagtgacctgaagcagacttcagataacttgtcggaggaatgccagcttgctaggaaatcttctggaaccgggactgaaccagttgcaaagctaaaaaatgggcaggaaggcgaaatcgggcacttcgactcagtcccaaatatacaggatgactgtaatggctttcaggattcagatgatttcgccgatttttcatctgcagggcctagtcaggtggttgattggaatgcattcgaggacgagcaaaaggattcctgttcctgggcagcctttggagatcagcaggctactgaatctcatcaccgcaaagaggcttggcaatctcacagaaccgacgaaaacatcgacaccccaggtacccccaaaacacacagcgtgccttcagctacctccaaaggagcggtggcgagtggacacctccaggaaagtgccacgtcagtccagacggctctgctgaacagactggagcgcatcttcgaggcctgcttcccatctatccttgtcccagacgcagaggaggaggtgaccagtctcaagcacttgcttgagactagtaccctgccgatcaaaacgagggaggcgcttcccgagagcggggagctgctggacgtctggaccgagctgcaggatattcacgatgctcacggcctcagatatcaatggggcggaagtcactctaataagaagctgctgtctagtttaggaattgacacccggaatatcctgtttacaggcaataagaaacagcctgtgatcgtgccaatgtatgcagccggtctggggatgctggaacccacaaaggaaccacttaaaccattgtcagctgccgagaagatcgcaagcattggacagactgccactatgagcccggacatgaacacctgtacgagtgaccaatttcaggagtctttgcctcccgtccagtttgattggtctagctctggactcactaatcccctcgacgcgtctggagggagtactctgctgaacctcgatttcttcggtccagtcgacgactccagttccagctcaagcacaacaatccccggtgtggatccagaactgtacgagctaactacatccaaattggaaatcagcacaagcagcctcaaggtgaccgacgccttcgctcgattgatgtcgacagtggaaaagacctccacgtcgacgagccgtaagcctaagagggaggaacacctcagtgaggaagccattaaagtgattgcaggtcttccggatctgacctttatgcatgctaaggtgttgatgttccctgctacgctgaccccatcaacttccagccaagagaaggctgatggctag

SEQ ID NO: 30037 - DNA, 114 bp, synthetic construct
  source 1..114: mol_type = other DNA; note = Synthetic coding sequence
atggctagtgaggacattgccaaactggccgagacgttggccaaaacccaggtcgccggaggacaactctcctttaagggaaaaagcctgaaactcaatactgcagaggactag

SEQ ID NO: 30038 - DNA, 309 bp, synthetic construct
  source 1..309: mol_type = other DNA; note = Synthetic coding sequence
atgcaaacttccagttcgcgttcagtgcacctcagcgagtggcaaaagaattactttgcaataaccagtgggatatgcacaggcccaaaagccgacgcctatcgagctcaaattctgaggatccagtatgcatgggctaactccgaaatcagccaggtctgcgcgacaaaactgttcaaaaagtatgcagaaaaatactccgcaatcattgactctgataatgttgaaagcggcctcaacaactatgctgagaacatcctgactctggccggttcacagcagaccgacagcgataagtggcaatcctag

SEQ ID NO: 30039 - DNA, 474 bp, synthetic construct
  source 1..474: mol_type = other DNA; note = Synthetic coding sequence
atggcaacaagtgctccccttcgttctcttgaggaggaggttacctgcagcatctgcctggactacttaagggaccctgtgaccatagattgtggacatgtcttctgccgatcgtgtacaacagacgtgcggccaatctctggaagccgcccagtatgtcctctgtgtaagaaaccgtttaagaaggagaacatcagacctgtgtggcagcttgcttcactcgttgaaaacatcgagcggctaaaagtggacaagggaaggcagccaggggaggtaactcgtgaacagcaagacgccaaactgtgcgagcggcatcgtgaaaagctgcattactattgcgaagatgatggaaagctgctgtgcgtgatgtgcagggagagccgtgaacacaggccccataccgccgtgctgatggagaaggccgctcagcctcatcgagagaagattctgaaccatctgtctactctgcgatag

SEQ ID NO: 30040 - DNA, 348 bp, synthetic construct
  source 1..348: mol_type = other DNA; note = Synthetic coding sequence
atggccggtgcccctaccgtcagtctgcccgaacttaggtccctgctggctagcggcagggctcgcctttttgacgtccggagcagagaggaggctgccgcaggcacaattcctggtgctcttaacattccggtgtctgaactcgagtctgcgctccagatggagcccgcagcgttccaggctctgtatagtgccgaaaagcccaagctcgaggacgaacacctcgtcttcttctgccagatgggaaagcgcggacttcaggcaactcagctggcaaggtccctgggctacacaggagctcgtaattatgcaggggcatatcgggagtggcttgagaaggagtcctag

SEQ ID NO: 30041 - DNA, 4766 bp, synthetic construct
  source 1..4766: mol_type = other DNA; note = Synthetic coding sequence
atgttaccccctaagcatctaagcgccaccaaaccaaagaagtcctgggctccaaacctctacgagttagattccgatctgactaaagagccagacgtgattattggggagggccctaccgatagcgagttttttcaccaacgattcaggaacttgatctacgttgaattcgttgggccaagaaagaccctgattaaactgagaaatctgtgcctcgattggcttcagccggagacccgtacaaaggaggagataattgagttgctggtgctggagcaatatctaaccattatcccagagaaactaaaaccctgggtgagggccaagaagcccgaaaactgcgaaaagctggtcactctgcttgagaattacaaagaaatgtaccagcctgaagatgataacaattcagacgtaacttccgatgacgatatgacaaggaaccggagagagagctctccaccacactctgtccacagcttcagtgatcgagactgggataggagggggaggagccgggacatggaacctcgtgacaggtggagccacaccaggaacccccgttcaagaatgcctcccagagacctgtcccttccagttgtcgccaaaacatcctttgaaatggatcgcgaagacgaccgggactctagagcatacgaatccaggagccaggacgctgagagctaccagaacgtggtggacctcgccgaggatcgcaaaccacataatacaattcaagataacatggaaaattataggaaactcttgtcactcgtccaactagccgaggatgatggccactcacacatgacacagggccatagtagcagatccaagcgatccgcgtacccctccacctccagaggtcttaaaacgatgcctgaggcaaaaaagtctacacaccgccgtggcatctgtgaggatgaatcttcccacggcgtgatcatggaaaagttcattaaggacgtctctaggagcagcaagtcaggcagagcaagagaaagcagcgatagatcccagcggttcccccgaatgagcgacgataactggaaagatatttcacttaacaagagggagtctgtgatacaacagagggtctacgaaggcaatgcatttcggggaggttttcgcttcaacagtaccctcgtgtctcggaaacgcgtcctggagagaaaaagaagatatcattttgacacggacggaaaaggcagcattcacgatcagaagggctgtccacgaaaaaagcctttcgaatgcggatcagaaatgcgtaaagctatgtccgtgtcaagtctcagcagcctgtcctctcccagttttacagagtcccagcctatcgatttcggtgctatgccatatgtgtgtgacgaatgtggtcggtccttctctgttatatccgagtttgtagagcatcagattatgcatacccgggagaatctctacgagtacggcgaatcgtttattcactcagtggctgtgagtgaagttcagaaatctcaggtgggaggtaaaagatttgaatgcaaggactgtggagaaaccttcaacaagagcgcagccctggctgagcacaggaaaatacatgcacggggatatctcgtcgagtgtaagaatcaggagtgtgaagaagcctttatgccttcacccacgttttccgaactgcagaaaatttatggcaaagataaattttacgaatgtagagtgtgtaaggagacgtttctgcactcgtccgcccttattgagcatcagaagattcacttcggggatgacaaagacaacgagcgtgagcatgagagggaaagggaacgggaacgcggagaaacatttcggcctagtcccgctctcaatgaattccagaaaatgtacggcaaggagaagatgtatgagtgtaaagtttgcggggaaacatttctgcacagctcttcactcaaggaacaccaaaaaattcatacccgcggaaatcctttcgagaataagggaaaggtctgtgaggagaccttcattccgggtcaaagcctcaagcgcaggcaaaaaacttataacaaggagaagctctgcgactttactgatggcagagatgcattcatgcagtcctcagagttgtccgagcatcaaaagattcacagtaggaagaatctattcgagggtaggggctatgaaaagtcagtgatacacagtggtccatttaccgaatctcagaaatcgcacacgatcacacggcctcttgaaagcgacgaagacgaaaaggccttcactatcagttcaaacccttacgagaaccagaagattcctacaaaagaaaatgtctacgaggccaagagctatgaaaggagtgtgattcattcactcgcctccgtggaagcacagaagtctcactctgtcgcagggccatctaagcctaaggtgatggccgagtccaccattcagtcattcgacgccataaatcatcagagagtaagagcgggtggtaacacctctgaagggagagaatattcccgaagtgttatccactccttagtggcgtcgaaaccacctcgatcacataacggtaacgagctcgttgagtcgaatgagaagggggagtccagcatatacatctctgaccttaatgacaagaggcagaaaatccctgcaagggaaaacccatgcgaggggggatccaaaaaccgcaattacgaggattcagtgattcagtccgtcttccgggcaaagccacagaagagcgtgccgggagagggcagtggggagttcaagaaggacggtgagttttctgtgccatcctctaatgtccgtgaatatcagaaagcaagggcaaagaaaaagtatatcgagcataggagcaacgagacgagtgttatccactccctccctttcggcgagcagacatttaggcctaggggcatgctctacgaatgtcaggaatgtggtgagtgtttcgctcactcatcagatctaacagagcaccagaaaatacatgatcgggaaaagccttcaggtagccgcaactatgagtggtctgtaatccggagcttagcgccaaccgacccacagacctcctatgctcaggaacagtatgccaaggaacaagccaggaacaaatgcaaggattttcgacagttctttgcgacatctgaagaccttaataccaatcagaagatttacgaccaggagaaatcccatggtgaagagtcccagggcgaaaataccgatggcgaggaaacccatagtgaagagacccacggacaggaaacaattgaagatcctgtgatccagggatctgatatggaagaccctcaaaaagatgaccctgacgataagatctatgagtgcgaggactgtgggctcggattcgtggacctcaccgacctgactgatcatcagaaggtccatagcagaaagtgtctagtggatagcagagagtatacacattccgtgatccatactcactccatatctgaatatcagcgagactatactggggaacagctatacgagtgtcctaaatgcggagaatccttcatacactcctctttcctcttcgagcatcagcgaattcacgaacaagaccagctctattctatgaaagggtgcgatgatgggttcattgccctgttgcccatgaaacccaggcgaaatagagcagccgagcggaatccggctctggcgggatcggctatccgttgtctgctgtgcggccagggatttatccactcatctgcattgaatgagcatatgcgtctgcacagagaagacgatctgctggaacagtcccagatggctgaggaagcaataatccccggactggccctaactgaatttcagaggagccaaacggaggaaaggctgttcgaatgtgctgtgtgtggcgaatcatttgtgaatccagccgaactggctgatcacgtcacagtgcataagaacgagccttatgaatatggaagctcctatactcatacatcttttctgactgaaccgctgaaaggcgctatccctttttacgaatgcaaggactgtggcaaaagttttatccattcaacagtacttaccaagcacaaggagttgcatctagaggaggaggaggaagacgaggcggcagcggctgccgctgctgctgcacaagaggtagaagcaaacgtgcacgtgccccaggtcgtgcttaggatccaagggctgaacgtcgaagccgcagaacctgaggtcgaggccgcagaaccagaagtagaggccgctgagccggaggtcgaggcagcagagcccaatggagaggctgaggggcctgacggtgaagccgcagaacctatcggagaagctggacagcccaatggcgaagcagaacaacccaatggggacgcagatgaacccgacggggctggcatagaggatcctgaagaaagggccgaggaacctgagggtaaggccgaagagccagaaggcgatgcagatgagccagatggggtcggaatcgaggatcccgaggaaggggaggatcaagaaatccaggtagaggagccttattacgactgtcatgagtgcaccgaaacatttacttctagcactgcctttagcgagcacctaaaaacccacgcttctatgataattttcgagccagcgaacgcctttggcgagtgtagcggatacatcgaaagagcctcaacttccactgggggtgcaaatcaggcggatgagaaatacttcaagtgcgatgtgtgcgggcagcttttcaacgacagattaagccttgccaggcaccaaaacacccatacaggtta

SEQ ID NO: 30042 - DNA, 381 bp, synthetic construct
  source 1..381: mol_type = other DNA; note = Synthetic coding sequence
atggccgctgccacaggcgaccctggattgtccaaattacagttcgccccattcagctccgcccttgacgttggcttttggcacgagctcacccaaaaaaagctgaatgaatatagattagatgaggctcccaaggacatcaaaggctactattataacggggattctgccggactgccagctagactcaccctcgagttctccgccttcgacatgagcgcacccacaccagcgagatgttgtcccgcaataggaaccctgtataacaccaacaccctggagtcattcaaaacagccgacaagaagctgttgctggagcaagctgcaaatgagatctgggagagcataaaaagcggtaccgccctggagaatcccgtctag

SEQ ID NO: 30043 - DNA, 1434 bp, synthetic construct
  source 1..1434: mol_type = other DNA; note = Synthetic coding sequence
atggctgatgggcaggttgctgaactgttgttacgcagactggaggcgtccgacggagggctggacagcgcagagttagcagctgagttaggtatggagcaccaggccgtcgtgggagccgtcaaatccctccaggccctgggtgaggtgatcgaagcagaactcagatccactaaacactgggaactgacagcagagggcgaagagatagcaagagaaggttcacacgaagcacgcgtgtttagaagtatcccccctgaaggtcttgcccagtctgagctgatgcgattgccgagcggaaaagttggcttttcaaaggccatgagcaataagtggatcagagttgataagtctgctgctgacggacctcgcgtttttagagtggtcgattccatggaggatgaagtgcagcgacgcctgcaattggtgcgcggaggtcaggctgagaaactgggagaaaaggaacgcagcgagcttcggaaaaggaagttactggcagaggtcggatcttggcgtgatcggccattcaagccctataactttttggctcacggcgtacttcccgatagtggacatctgcatcccctcctcaaagtgagatctcagtttcggcagatcttcctagaaatggggtttactgagatgccaacagataattttatcgagtcctccttttggaatttcgacgctttatttcagcctcagcagcacccagcccgagatcagcacgatacattttttctgagagatcccgctgaggccctccagctgccaatggactacgtccaacgcgtgaagagaacccactcccaaggaggctatgggtcccaggggtataagtataattggaagctggatgaggcaagaaagaatcttctcagaacgcacactacatccgcctcagcgagagctttataccgactcgctcagaaaaaacccttcacacctgtgaaatatttttcgattgatcgggtcttcaggaacgaaaccctggacgcgacccacctcgctgaattccatcagatcgaaggggtggtggccgaccacggcctaacgctcggccatctgatgggtgttctgcgagagtttttcactaagctgggcatcacccaactccggttcaaacccgcttacaatccatacactgagccaagtatggaggtgttctcatatcatcagggtttaaagaagtgggtggaggtcggcaacagcggcgttttccgaccggaaatgctcctgcctatgggcttgccagaaaacgtgtctgtgatcgcatggggcctgtctctggagaggcctacgatgattaagtacggcattaacaatattagggagcttgtcgggcataaggtgaacttgcaaatggtttacgactcaccactgtgtaggctggacgcagagcctcggccaccccctacgcaagaggcggcatag

SEQ ID NO: 30044 - DNA, 3195 bp, synthetic construct
  source 1..3195: mol_type = other DNA; note = Synthetic coding sequence
atgcccgtccaagcagcacagtggacagagttcttatcctgcccaatctgttataacgagttcgacgaaaacgtgcataaaccaatcagcttgggctgctctcacaccgtgtgtaagacatgcttgaataagctgcaccggaaagcatgtcccttcgaccagactgcaataaacaccgatatcgatgtcctgcccgtgaactttgctttactgcagttggtgggagctcaggtcccagatcatcaaagtataaaactgagtaatctgggtgaaaacaaacattacgaggttgcgaaaaaatgcgtagaagaccttgcattgtacctcaaaccgttatccggcggaaagggcgtggccagcctgaatcaaagtgctttgagccggcctatgcaaaggaaactggtgacgctggtgaattgccagctcgtggaggaggagggcagagtacgcgctatgcgggcagccagatccctgggcgagaggaccgtgaccgaactaattcttcagcatcaaaatcctcagcagttatccgccaatctgtgggcagccgttagagccagagggtgtcagttcctaggccctgcaatgcaggaagaggctctgaaattagtattgcttgcactggaggacggaagcgcgttatctaggaaggtactcgtgctattcgtcgtgcaacggttggaaccacgattcccacaggcctctaagactagtattggccacgtagtccagcttctgtatcgggcttcttgctttaaggtgacaaagcgggatgaggacagttcccttatgcagctcaaggaagaattccggagttacgaagctctccggagggagcacgatgcccagattgttcacatcgctatggaagctggattgcgcattagcccggaacagtggtcaagcctgctatacggcgatctggctcacaagtcccacatgcaatctattatcgataaactccaaagccccgagtcttttgctaagagtgtacaggaattaactatcgtgctgcaaaggaccggcgatcccgctaacttaaaccgactgaggcctcacctggagttactcgccaatatcgatccaaatccagacgccgtgtcccctacttgggaacaattggagaacgcaatggtcgctgtgaaaacagtggtgcacggacttgttgattttatccaaaactacagcagaaagggccacgaaaccccacagcctcagcctaattctaagtataagacatccatgtgccgcgatttaagacagcaggggggatgtccaagaggcactaactgcaccttcgcccactcccaggaagaactcgaaaagtacaggctgaggaataagaagataaacgccacagtgaggacattccctctcctgaataaagttggagtgaataacactgtgacaaccacggccggtaacgtgatttctgtgattgggagtaccgagacgactgggaagatcgtcccatctactaacggcatctccaatgctgagaactccgtgtcacagctaattagtcgatcaaccgattcaactctgcgtgcccttgagaccgttaagaaagtcgggaaggtgggggctaatggccagaacgctgcaggaccatcagctgacagcgtgaccgagaacaagattggttcaccaccgaagacacctgtatccaatgtcgccgcaacttcagcaggacctagcaatgtaggaactgagctcaattctgtgccgcagaagtcctccccttttctgacccgagtgcccgtctatcctccccactccgaaaatattcagtactttcaggacccaaggacccagattccctttgaggtgccacaatatccccaaaccggttattaccccccacccccaactgtcccggctggcgtcgctccgtgcgttcctcggtttgtaaggtctaataacgttcccgagagttccttaccccctgcaagcatgccgtacgccgatcactactcaacgtttagcccaagggaccggatgaattcctccccctaccagccgcctccccctcagccttacggtcccgtgccacctgttcccagcggtatgtacgccccagtctatgattctagaagaatctggcgccctcccatgtatcagcgtgatgacatcatccgctccaacagcctgccgcctatggacgtcatgcacagttcagtctaccagacgtctctccgcgagcggtataactcccttgatgggtattacagtgtggcctgtcaaccaccttcggagccacgcaccaccgtgcccctgccccgtgagccttgcggtcacttaaaaacgagttgcgaggaacaaatccgacgaaagcccgaccagtgggcccaatatcatacccagaaggctccacttgtctcctccacactgcctgtggcaacgcagtcaccaacccctccctcacccctctttagcgtggatttcagagcagacttctccgagagcgtctctggtactaagttcgaggaggaccatctaagccactactcaccatggtcgtgcggcacaattggtagctgtatcaatgcaattgactctgaacctaaagacgtgattgccaattctaatgctgttcttatggatttggacagcggggacgttaagcgcagagttcacctgtttgaaacccaacgcaggactaaggaagaggatcctattatcccattctctgacggacccatcatttctaagtggggagctatatcacgctcatctcgtaccgggtatcatacaacagacccggtgcaggccactgcttctcagggatccgcaacaaagcctatcagcgtatctgactacgtgccctacgttaacgccgtggatagtcgctggtcttcctatggcaacgaggcaactagctccgctcattatgtggagagggataggtttatcgtgaccgacctgagcgggcaccgcaaacattcgtctacaggcgatctcctctccctcgaactgcagcaggccaagagcaacagcctgctgctgcagcgtgaggctaatgctcttgctatgcaacagaaatggaattccctggatgagggcagacatctgacgctcaaccttctgtccaaggagatagaactccggaacggagaggtaaaaaagctcaatctgagtgcctcctgtttgatgtacttgttctctgccgctgcctcgtggctgtaccactactag

SEQ ID NO: 30045 - DNA, 1548 bp, synthetic construct
  source 1..1548: mol_type = other DNA; note = Synthetic coding sequence
tgagccggagggtctccttccgtcgtagactatttcccttctgaggatttctatagatgtgggtattgtaaaaatgagagcggcagtcgttctaatggaatgtgggcccacagcatgactgtgcaggattaccaggatctgattgatcggggatggcgtcgctctgggaagtatgtctataagcctgtgatgaatcaaacttgttgcccacagtacaccatccggtgtcgaccactgcaattccagccaagcaaatctcacaaaaaggtcctgaagaagatgctgaagttcttggcaaagggtgaagtgcccaagggcagctgcgaggatgaacctatggattctaccatggacgacgccgtggctggggattttgcgctcatcaacaagctagacattcaatgtgatctgaaaactctgtcggacgacatcaaggagagcctcgaaagtgagggtaaaaactccaagaaagaagaaccccaggaactcctacagtcacaagactttgtcggggagaaacttggctctggcgagccgtcccactcagtcaaggtccatacagtgcccaagcccggaaagggtgcagacctcagcaaaccaccatgcaggaaggctaaagaaatcagaaaggagagaaagagactcaaactgatgcagcaaaatcccgcaggggaactcgaagggttccaggcgcagggtcacccaccctctttgtttcctcccaaggctaagtctaaccagcccaagagcctggaggacctcatcttcgaaagtcttccagagaacgcaagtcacaagttagaggtgcgcgtcgtccgatcatccccaccatcatcccagttcaaggccacactcctggagtcttaccaggtctacaaaaggtatcagatggtgattcacaagaacccacctgatacccccactgaatcccaattcactagatttctttgtagcagccctcttgaggcggaaacccctccgaacggtcccgattgtggttacggatccttccaccagcagtactggttagatggtaagatcattgctgtgggagtgatagatattctacccaattgcgttagctcagtttacttatattatgatcccgactactccttcctcagcctcggtgtgtactccgccctgcgcgagatcgcctttactcgtcagttacacgaaaaaaccagccagctgtcatattactacatggggttctatatccattcatgtcccaaaatgaagtacaaaggccagtatagaccatcagacctgctgtgccccgagacgtacgtctgggtgccaatcgagcagtgcctacctagtctcgagaactccaagtactgcaggttcaatcaagatccggaggcggttgatgaggacaggtccactgagccggatcgtttgcaggtgttccacaaaagagccataatgccctatggtgtctacaaaaagcagcaaaaggacccaagtgaggaagcagccgtgctgcagtatgcctccctggtgggacagaagtgctcagaacggatgctgttattcaggaactag

SEQ ID NO: 30046 - DNA, 225 bp, synthetic construct
  source 1..225: mol_type = other DNA; note = Synthetic coding sequence
atggccatggcaccctcccccagcctcgttcaggtgtacacaagtcctgcggcagtcgcagtatgggagtggcaggacggactcggtacgtggcatccttacagtgctactgtgtgcagcttcattgagcagcagttcgtgcagcagaagggtcagcggtttggcttgggatcactagcacacagcattcccctcggtcaggccgacccatccctggcaccatag

SEQ ID NO: 30047 - DNA, 594 bp, synthetic construct
  source 1..594: mol_type = other DNA; note = Synthetic coding sequence
atggccgcattccgggatatagaagaagtgtcgcaaggtttgctcagcttactcggcgcaaatcgcgctgaggcccagcagaggagactgctgggccgtcatgagcaggtggtggaaagactcctggaaacccaggatggggcagaaaagcagctcagggagattctgacaatggaaaaagaggttgcccagtctctgctgaacgccaaagaacaggtgcaccagggcggagttgagttacagcagcttgaggccggactacaagaagcgggagaagaggatacacgtctcaaggcatctctgctccagttaacccgggaactcgaagaactcaaggaaatcgaagcagaccttgagcgccaagagaaggaggtggatgaagacacaacagtcacaattccctccgccgtatatgtggcgcagttgtaccatcaggtgtcaaaaatcgaatgggactacgaatgtgaacccggaatggtgaaaggaatacatcatggaccatctgtcgctcagcctatccacctggatagtacacagctgagcaggaaattcatctcagactatctctggagcctggtagacacagagtggtag

SEQ ID NO: 30048 - DNA, 2271 bp, synthetic construct
  source 1..2271: mol_type = other DNA; note = Synthetic coding sequence
atgagtccccagaaacgcgtgaaaaacgtccaagcccagaatcggacttcccaagggtctagctcctttcagactactctatccgcatggaaagtgaagcaggatccgtccaactcaaaaaatatatcaaagcacgggcagaacaaccccgtgggggactacgagcacgcggatgatcaagcggaagaggacgctctgcaaatggctgttgggtattttgagaaaggaccaatcaaggctagtcagaataaggacaaaactttggagaagcacctgaagaccgtcgaaaatgtggcctggaagaatgggttggcttcagaggagattgatatactcttgaatatcgcgctgagcggtaaattcggaaatgccgtgaatacaagaatcctgaagtgcatgattccagcaacagtgataagtgaagatagcgtggtgaaggcggttagctggctgtgcgttggaaagtgcagcgggtccaccaaggttctgttttatcggtggctcgttgccatgtttgattttatcgataggaaggaacagatcaatctcttgtacggattcttcttcgccagcttgcaggatgacgccctgtgcccctatgtgtgtcatcttctttaccttctgaccaagaaagagaacgtgaagcctttccgagtcagaaaactgctggacctgcaggccaaaatgggaatgcagccgcatctgcaggcacttctgtctctgtataaatttttcgccccagcccttattagcgttagtctacctgtgcgtaagaagatatacttcaagaactcagagaacctgtggaagaccgccttgctggctgtgaaacagaggaatcggggaccctcccctgagcccctcaaattgatgctcggcccagctaacgttcggccactaaagagaaaatggaactctctgtcagtgatccccgtcctcaattcctcaagctacacgaaagaatgcggcaaaaaggaaatgtcactctccgactgccttaacaggtcaggaagttttcccctcgagcagctccagtcctttccccagcttttgcaaaatatccattgcctggaattgccttcgcaaatggggtcagtcctaaataactcactgctcctgcactatataaactgtgtaagagacgagccagtgctgctaagattctactattggttgtcacagactttgcaggaagagtgtatttggtataaagtcaataactacgagcacggtaaagagttcaccaactttctggataccatcatcagagcggaatgcttcctgcaggaagggttctacagctgtgaagcctttttgtataagtctttgccactgtgggacgggctatgttgtagatcccaatttctccagctggtgtcgtggatacctttttcgagtttctcagaagtgaagcctcttctctttgaccaccttgcccagctgttcttcactagtactatctattttaagtgcagtgtgttacagagcctgaaggagctgcttcagaactggcttctttggctgagtatggacattcatatgaagccagtgactaattctccattagagactacccttgggggttccatgaattctgtgtccaagctgatccactatgtgggatggctctctacgaccgctatgcgtctggaatctaataacacattcctcctacatttcatcctcgatttttacgagaaggtttgtgatatctacatcaactataacctccctttggttgttctattccctcctggcatcttttactccgctctcctgtcacttgatactagcatcttgaatcagctctgctttatcatgcatcgatatagaaaaaatctgactgcagcaaagaagaatgaactggtgcagaaaactaaatctgagtttaatttcagctccaaaacgtaccaggaatttaaccattatctgacctcaatggtgggctgtttatggacaagcaagccgtttggcaaggggatctatattgaccccgaaatcctggaaaagacgggcgtggctgaatacaagaactctttgaacgtcgtccatcacccctcctttctaagctatgctgtctccttcctgttgcaggaaagtcccgaggaaaggacagtgaatgtgagttctattcgcggaaagaagtggtcctggtatctcgactatctttttagtcagggcctgcaaggtctcaaactgttcataaggagcagcgtgcatcactcatctattccgagggctgaagggatcaactgcaacaatcagtactag

SEQ ID NO: 30049 - DNA, 1941 bp, synthetic construct
  source 1..1941: mol_type = other DNA; note = Synthetic coding sequence
gcacagggctccgtcagctttaacgatgtcaccgtcgactttacccaggaggagtggcagcacctagatcacgcacagaaaacactgtacatggacgtgatgttagaaaactattgccacctgatctccgtggggtgtcatatgaccaaacctgatgttattctgaagctggagcggggagaagagccctggacctcctttgcaggccatacctgtcttgaggagaactggaaggcggaggacttccttgtcaagtttaaggaacatcaggagaaatactctcgaagcgtcgtgagcattaatcataaaaagctcgtcaaggagaaatccaaaatttacgagaagacttttaccttaggtaagaatcccgtgaattcgaagaaccttccacctgagtatgatacgcacgggcgaattctcaaaaatgtgtcagaacttatcatctctaacctcaaccccgcacgcaaaaggttatcagagtataatggatacggtaaatctctcttgagcactaaacaggagaccacccacccggaagttaaatcccacaaccaatccgcaagggctttctctcacaacgaggtgttaatgcaataccaaaaaactgagaccccggcacaatctttcggctacaacgattgcgagaagtcttttctgcaacgcggaggcctgatcacacattcccgtccctacaaaggggaaaacccatccgtctacaacaagaaacgcagggccacaaacatcgagaaaaaacacacttgcaatgagtgtgggaagtcattctgtcggaaatctgtgctcattttgcaccagggcatacacagcgaggagaaaccctaccagtgtcaccagtgtggaaatgctttccggaggaagagctatttaatagaccatcagcgcacccatacaggagagaagccattcgtctgtaatgaatgcgggaaaagcttccgtttgaagactgcgttaacggatcaccagcggacccataccggagagaaatcttatgagtgcctccagtgcaggaacgcattccgcctgaaaagccacctgattcgacaccagcgtactcacaccggcgagaaaccctacgaatgcaacgactgcggtaaatcattccggcagaaaacaactctgagcttacaccagaggatccacaccggcgaaaaaccttatatttgtaaggagtgcgggaagagctttcaccaaaaagccaacctgacagtccatcagagaacacacactggcgagaaaccttatatttgtaacgagtgcgggaaaagctttagccagaagactacactggcgttacatgaaaaaacccataacgaggaaaagccttatatctgctcagaatgcgggaagagcttcagacagaaaacaactttagtggcccaccagaggacacacacaggcgaaaagtcatatgagtgcccgcattgcggaaaggcgttcaggatgaaatcctatctgatcgatcaccaccgaacgcacactggcgaaaagccctacgagtgtaacgaatgcggtaagagtttttcacagaagaccaacctgaacctgcaccagaggattcatactggcgagaagccatacgtgtgcaacgagtgtggaaaatcatttagacagaaagctacccttaccgtgcatcagaaaattcataccggtcagaaatcctacgagtgtccacagtgtggaaaagcattcagtcggaaaagctatttgattcatcaccaaagaacccatactggagaaaagccatacaagtgttccgagtgcgggaaatgcttcagacagaaaaccaacctcatagtgcatcagcgaacacacacaggcgaaaagccctacgtgtgtaacgagtgcggaaagtccttctcctacaagcgcaacctgatcgtgcaccaacgaacccataagggggaaaatattgagatgcaatag

SEQ ID NO: 30050 - DNA, 594 bp, synthetic construct
  source 1..594: mol_type = other DNA; note = Synthetic coding sequence
atgggagggagaaagcgtgagagaaaggcggctgtggaagaagacacctccctatccgagtccgaaggccctagacaaccagacggcgatgaagaggaatccaccgctctgagtattaacgaagaaatgcaaagaatgcttaatcagctgcgtgagtatgattttgaggatgattgcgattcccttacctgggaagaaaccgaggaaacactgcttttgtgggaggacttctctgggtacgccatggcagcagcggaggcacagggcgagcaagaggatagtctggaaaaagtgatcaaggacacagaatccctcttcaaaacccgcgagaaggaatatcaagagactattgaccagattgaactcgagttggccactgcgaaaaacgacatgaatagacacctacatgagtacatggaaatgtgtagcatgaagagaggactggacgtgcaaatggagacatgccggcgtctaatcacacagagtggagaccgcaaaagccccgcattcaccgccgtgcccctgtcagaccctccaccaagacaagcacggctgaggactcccattgcaatgtctcatttgaccgctccatag

SEQ ID NO: 30051 - DNA, 423 bp, synthetic construct
  source 1..423: mol_type = other DNA; note = Synthetic coding sequence
atggccatggctccatccccttctttggtacaggtgtacactagtcccgctgctgtggcggtgtgggagtggcaagacggtctcggtacctggcatccctacagcgccaccgtatgctcctttatagagcagcagttcgttcagcagaaaggccaaaggtttggcctgggtagcttagcacattctatccccttgggtcaggcggatccaagtcttgcaccttacattattgaccttccatcatggacccaattccgacaggacacggggacgatgcgggcagtgaggagacacttgtttcctcagcattccgcgcctggacgcggagttgtttgggagtggttgagtgacgacggatcctggactgcttatgaggcttccgtgtgcgactacctcgagcagcaggtcgctcggggaaattag

SEQ ID NO: 30052 - DNA, 3237 bp, synthetic construct
  source 1..3237: mol_type = other DNA; note = Synthetic coding sequence
gtctgcatgcacccgcacaatgtgttatcagatgtggtgaattacaccctgtggttgatggaatgttctcacgcgtctggatgttgtcacgcaacaatgttcttctctatctgttttagttttagggcagtgcttgagctcttcgatcgctatgatggactgcggaggctggtgaacctaatcagcactttggaaattttaaacttggaggaccagggggctctcctgtcagatgatgagattttcgcatctagacagactgggaagcatacttgcatggctctgcggaagtactttgaggcacatctggcaataaaactggagcaggtcaaacagtcactgcagaggactgaggggggaattcttgtgcacccccaacccccatataaggcttgttcctatacgcacgaacagattgtggagatgatggaattcttgatcgaatacggacccgctcagctctactgggaaccagctgaggttttcttgaaacttagctgtgtgcagctgctcctgcagctgatctctatcgcctgcaactggaaaacgtattacgcccgtaatgataccgtgaggttcgccttagacgtattggcaattctgacagtagtgcctaaaatccagctccagctggcagagagcgtagatgttctggatgaagcagggtccaccgtgagcaccgtgggcatcagtataatcttaggggtggctgagggagagttcttcatccatgacgctgagatccagaaaagtgccctgcagatcattatcaactgcgtgtgcggccctgataacaggatctcttccattggaaagtttattagtggcaccccgcgacggaaattaccgcagaatcccaaatcgagcgagcatacccttgctaagatgtggaatgtggttcagtccaataatgggataaaagtcctcctgtcactcctatccataaagatgccaattactgatgctgaccagatacgagcactggcctgcaaagcactcgtaggcctgagccgttcgtctactgtgcgccagatcatatctaaattaccgctctttagtagctgtcagatccagcagttgatgaaggagcccgtgctgcaggacaaaaggtcagatcacgtgaagttctgtaaatacgctgctgagcttattgagcgggtcagcgggaaaccactgcttataggtacagatgtttctctagcccgactccagaaggcggatgtggtggcccaatcccgcatcagctttccagaaaaggagcttctcttgctgatccggaatcacttgatcagtaagggcctgggagagactgccacggtgctcactaaagaggccgatctgccaatgaccgccgctagccattctagcgcctttaccccggtgactgccgcagcctcgccagtgtctctgcctcgaaccccaagaattgccaacggaattgctaccagactgggctctcatgcagccgttggagcttcagccccttcagcacctaccgcccacccccagcccagaccaccacagggccctttggcccttccgggtccttcctatgcaggcaacagtcctctgatcgggcgtatctcattcatcagggaacggccatccccgtgcaacggtcggaagattagagtactgcgccaaaagagtgaccacggtgcatattcgcagtctcccgctattaagaagcagctggaccggcatttgcccagtcctcctactttggattccattatcacggaatacctgcgagagcagcatgccagatgcaagaaccccgtcgccacctgccctccgttctcactgttcaccccccatcagtgccccgaacctaagcagcgacggcaagcccctattaatttcacctccaggctcaataggcgcgcttcttttcccaaatacgggggagttgatggtggctgtttcgataggcatcttatctttagtagattccgcccaatctccgtgtttagggaggcaaacgaagacgagtctgggtttacgtgctgcgctttctctgcgcgagaacgattcctcatgctgggcacctgcaccggccagttaaagctgtataatgtcttttctgggcaggaggaggctagctataactgtcacaactcagcaatcacccatctcgaaccctctagagacgggagtctcctgttgacttctgcaacgtggtcccaaccgttatctgcactctgggggatgaagtccgtgttcgatatgaaacatagctttactgaggaccattatgtcgagttctccaaacatagccaggacagggtaatcggcaccaaaggggatatcgcccatatttacgacattcagacaggcaataagctgcttaccttatttaaccctgatctggccaataattataaacgaaactgcgctactttcaatcctacagacgatcttgtcctcaatgatggggtcttgtgggacgtgcggagcgcccaggcaattcacaaattcgacaagttcaacatgaacattagcggcgttttccatcctaatggcttagaagtgattatcaacactgagatctgggacttgcgtacattccacttgctgcacaccgtgccagctctcgaccaatgtcgggtggtctttaatcacactgggacagtaatgtatggggctatgctgcaggcagatgacgaagacgatttgatggaagaacgcatgaagagtcctttcggatccagctttcggactttcaatgccacagattataagcctattgctacaatagacgtgaaacgtaatatcttcgatttgtgtaccgatacaaaggactgctatctcgccgtcattgagaatcaggggagtatggacgcgctgaacatggacactgtgtgtcgattgtatgaggtcggccgacagcggctggcagaagacgaggatgaggaagaggaccaagaggaagaggagcaagaagaagaagacgatgacgaggacgacgatgacacagacgacttggacgagctcgacactgatcaattacttgaagccgaactcgaagaagacgataacaacgaaaacgccggagaagacggcgacaacgacttttcccccagcgacgaagagctcgcgaatttgctcgaggaaggagaagacggagaggacgaggactccgatgccgatgaggaagtcgagctgatactcggggacacagactcttccgacaacagtgatctggaagacgacattatcctgtctttgaatgaatag

SEQ ID NO: 30053 - DNA, 447 bp, synthetic construct
  source 1..447: mol_type = other DNA; note = Synthetic coding sequence
atgctgtctgacggttgcggttcagaggaaaagataagtgtccctagctgttacggcggtattggcgctccagtatcaagacaggtccccgcttctcatgattcagagcttatggccttcatgaccaggaagttatgggacttagagcaacaagttaaggcacagaccgacgagatccttagcaaagaccagaagattgctgccttggaggacctggtgcaaacactcagaccacaccctgccgaggcgacacttcagcgacaggaggagctggaaaccatgtgcgtgcagctccagcgccaagtgcgcgagatggagcgctttctgagcgactatgggctgcaatgggtgggcgagccaatggaccaggaggactcggagtctaaaacagtgtccgagcacggtgagcgggattggatgaccgcaaagaagttctggaaaccatag

SEQ ID NO: 30054 - DNA, 1755 bp, synthetic construct
  source 1..1755: mol_type = other DNA; note = Synthetic coding sequence
atgagcctgccccctgaaaaggcctccgagctgaaacagttgatccaccagcaactgagtaaaatggacgttcatggtagaatccgcgagatcttggccgagaccattagagaggaactcgcgccagatcagcagcacctcagcaccgaggatttaatcaaagcactccgaagaaggggaatcattgacgacgtgatgaaggagttgaacttcgtgaccgactctgtggagcaggagttaccttcctctcctaagcagcctatctgcttcgaccgacagtccacattgaagaagtcagatgggacccgaatggcggatagcaccaccatgcttagcatatccgatcccatccatatggtgcttatcaagacagacatcttcggtgagaccacgctcgttgcatcttatttcctggagtggcgctcagtcttgggatcagaaaatggggtcaccagtttaaccgtggagctgatgggggtaggcacagaatccaaagtgagcgttggaatcctaaacattaaactcgaaatgtatccccctctgaaccagaccctctcgcaggaggtggttaatacccagctcgctctggagaggcagaagacagccgagaaagaaaggctatttttggtgtatgcaaagcaatggtggcgcgagtatctccagatccggccaagccacaattccagacttgtgaagatttttgcccaggatgagaatgggatcaaccggccagtatgcagctacgtgaagcccctgcgggcaggtcgcctgctggacacgccgcgacaggccgctaggttcgtgaacgttctgggatatgagcgcgctcccgtcatcgggggagggggtaagcaggaacaatggtgcacactgctcgcctttctttgtcgaaataagggcgactgcgaggaccatgccaacctgctgtgtagtctgctgctggggtacggcctggaggcattcgtttgcgtcggaacaaaggctaaaggtgtgccacatgcgtgggtgatgacatgcgggacagatggagcgattactttttgggagtctttaactggccataggtacatccacaagcccaccaaccctgatgaacctcctgttgctgagcagcctaagcccttatacccctacaggacaatcggctgtgtcttcaaccaccagatgtttctgggcaattgtcaaccaagtgacgccgtggagacttgcgtgttcgacctgaacgatgagagtaaatggaagcctatgtcagaagaggcaataaagtcggtgtgcgcacctggggctacaaccagcctgccccctttccccccactatgcgcctcaacaattgacgcttctgtaaccagcaacgaaattgagatgcaactccggctgctcgtgtctgaacacaggaaagatctggggttgaccacagtctgggaggatcagctcagctatctgctttcaccagcgctggcatcttatgagttcgaaaggactacaagcatctctgccggtaatgaagagttccaggacgcaattaggagggccgtccccgacggtcacacctttaaaggattcccaatccatttcgtatatagaaacgcaagacgggcattcgccacttgtctcagaagcccattttgtgaggaaattatctgctgtcggggagatcaggtacgcctcgcggtgcgagtcagagtcttcacttatccagaaagtgcctgtgccgtttggattatgttcgcttgcaagtacagaagcgtgctctag

SEQ ID NO: 30055 - DNA, 4515 bp, synthetic construct
  source 1..4515: mol_type = other DNA; note = Synthetic coding sequence
atggtgagcgagagcgatttctctaaggacgtggctgtccaggtactccctctggacaagatcgaggagaataataagcagaaagctaatgacatcttcatctcccagtacaccatgggtcaaaaggacgccttgcgaaccgttctcaaacagaacgtgtccctctgcttaaccggctggtccgatcactcaggcgttatcaccacgcactgcagtctttatttgctgcggcttatgcgttcatcccacttgagtctgcccagttcttgggattatcgcgcacagtctatgcctgtgtttaaggaagtaaaagtgcatctgttagaagatgcagggatcgagaaagacgcagtgactcaggagacaagaatctctcccagcggcatcgatagtgcaaccacggtggcggcagcaacagcggctgctatagcaacagcagcaccgctgatcaaggttcaatccgacctcgaagcaaaggtgaatagcgtgacggaattgcttagtaagctccaggaaacagataagcacctgcagagggtgaccgagcaacagacatctattcaacgcaagcaggagaagcttcattgccacgaccacgaaaaacagatgaatgttttcatggaacagcatatccggcacttagaaaagctgcagcaacagcagattgatatccagactcattttatctctgctgctttaaagacaagttcatttcaacctgtatcaatgccttctagcagggccgtagaaaagtactcggtgaagccagaacatcccaacctgggttcttgcaatcccagcctgtacaacacctttgccagcaaacaggctcctctgaaggaagtggaagatactagcttcgataagcaaaaaagccctcttgagacaccagccccaagaagatttgctcctgtccctgtgtcacgcgacgatgagctcagtaagcgggagaatctgcttgaagagaaagagaacatggaggttagctgtcacagaggcaacgtgaggcttctcgagcagatcctcaataataatgattccttgacccggaagtctgagtctagcaacacaactagcttgactagatcgaaaatcggctggacccctgaaaagactaatcgattcccttcctgcgaggagctggaaactactaaggtcactatgcagaaatcagatgacgtactccatgatctcgggcaaaaagagaaggaaactaacagcatggtgcagcccaaggaaagcttaagcatgttaaagctgcctgacctcccccagaatagcgtgaagctgcagaccactaatactacacgttccgtcttgaaggatgccgagaaaatcttgagaggcgtgcagaataacaaaaaggtgttagaggagaacctggaagccattattcgggcaaaagacggcgctgccatgtactcactcatcaatgcgctctcaaccaatagggagatgtcagagaagatcagaattagaaaaaccgtggacgaatggattaaaacaatatctgcggagatacaagacgaattgagccgcactgactacgagcagaagaggttcgatcaaaagaaccagaggactaaaaaaggacagaacatgaccaaagacatccggaccaacacacaggacaagaccgtcaataaatccgtgatccctcggaagcactctcagaaacagatcgaagaacacttccggaatctgcctatgcggggaatgcctgcctcgtccctacaaaaggagaggaaggagggtcttctgaaggcaaccaccgtcatacaggatgaggactatatgctgcaggtctacggaaaaccagtgtatcaaggtcaccgtagcacactgaaaaaaggtccttatcttaggttcaattccccttctccaaagagcaggccacaaaggccgaaagttatcgagcgggttaagggcacaaaagtgaaatccatcagaactcagactgacttctacgcaaccaagccaaagaagatggattctaaaatgaagcatagtgtgcccgttctgcctcatggggaccagcagtacctcttctcccccagcagggaaatgccaaccttttccggtacactggagggacacctgatacccatggccatcctgcttgggcagacccagtctaactcagacacaatgccccctgcgggtgtcattgttagcaagcctcaccctgttacagtcaccacttccatacctccctccagtcgaaaagtcgaaaccggggttaaaaaacctaatatcgcaatcgtggaaatgaaatctgaaaaaaaagatccacctcaactgactgttcaagttctgcctagtgtagacattgactccatatctaactcctcggcggacgtgctgtcacctctgagctcgcctaaggaggctagcttgccaccagtacagacctggatcaagacaccagagattatgaaagtagacgaggaggaggtgaagtttcccggtactaatttcgacgaaataatagacgtaatacaggaggaggagaaatgcgacgagatacccgactcggagccgattctggagttcaacagatctgtgaaagcagatagcactaagtacaacgggccacccttcccaccggtggcctcaacatttcagccgactgctgatattctggataaggtaatcgaacgcaaagaaaccctagagaatagtttaatccagtgggtcgagcaggagatcatgagccggattatctcaggtttgttccctgtccagcagcagatcgccccttccatctcggtgtcagtgtcagagacaagtgagcctctcacctctgatatcgtggaggggacttcatctggagcattgcagctgtttgtggacgcaggcgtaccagtcaatagcaatgttatcaagcactttgtgaatgaagccctggcagagacaattgctgtgatgctcggagacagggaagcaaaaaaacaaggcccagttgcgacaggggtatccggcgatgcttcaaccaatgaaacatatctgcctgcgagagtctgtactccactgcccaccccccagccaacccccccttgcagccccagtagcccggcaaaagaatgcgttttggtaaagacccctgacagttcaccctgtgattccgaccatgacatggctttccccgttaaggaaatatgcgctgagaaaggcgatgacatgcccgctatcatgctggtaaacacaccaaccgtgaccccaactaccacgccgcctcccgcagcagcagtatttacacctaccctatctgacatcagtatagacaaactgaaagtcagctcccctgaactgccaaaaccttggggtgatggagatctacccttggaggaggaaaaccccaactctccacaagaggaactgcaccccagggcaatcgtcatgagtgttgccaaagatgaagagccagaatccatggattttcctgcacagcctcccccacccgaacctgttccgttcatgccattccctgccggaacgaaagccccatcaccttcccagatgcccggatccgattctagcaccctagagtcaacgctttctgtaacagtgactgagactgaaaccttagataagccaatttcagagggagagattctcttctcctgcggccagaaactggcccctaaaatacttgaagacatcggcctgtacctcacaaacttgaacgatagtctgagctcaaccttgcatgacgctgtagagatggaggacgacccaccatccgaaggccaagtcattagaatgtcacataagaagttccacgccgacgccatccttagcttcgccaaacaaaaccaggaaagcgccgtctcacaacaagccgtgtaccactccgaggatctggaaaattcagtgggcgagctttcagagggccaaagaccacagctgactgccgcagccgaaaacatcttgatggggcacagcctgtatatgcaaccacctgtgaccaacacccaatctctcgatcagcagtgtgacccaaagcctctgtcccgccagttcgatacggtatccggcagtatatatgaagactcctgcgcttcacatggcccaatgagcctcggcgaactggaactggaaccgaactccaaattggtactgccaacaaccctccttaccgcacaggagaacgacgtcaatcttcccgtggccgctgaggatttttctcagtaccagctgaaacagaatcaggatgtgaagcaagtcgaacacaagcccagtcagtcgtacctgcgggtcaggaacaagtccgacatcgctccaagccagcaacaggtaagccctggcgatatggaccgcacccagatagagctgaatccatatttgacttgcgtgttttcaggaggtaaggccgtgcccctgtccgcctcacagatgcctcctgctaaaatgtcagtgatgctgccttcggttaatctggaggactgtagccagtccttaagtctcagtacgatgcaggaagatatggagagttctggcgctgacacgttctag

SEQ ID NO: 30056 - DNA, 2271 bp, synthetic construct
  source 1..2271: mol_type = other DNA; note = Synthetic coding sequence
atggtggcccctgtgctcgagacaagtcacgtcttctgctgtcctaatcgtgtccgcggagtgttaaattggagctctgggccacggggactgctcgctttcggtacgagttgctccgtcgtcctatacgatcccctcaaaagggtagtggtgacgaatctcaacgggcacaccgccagggtgaattgtattcaatggatctgcaagcaggacggaagcccaagcacggagctggtgtcaggaggctccgataaccaggtgatccactgggagatagaagacaatcaactactcaaggcagtacacctacagggccacgagggccctgtgtatgccgtccacgcagtgtatcagcgccgaacatcggacccagccctgtgtaccttgattgtgagtgcagcagcagattccgctgtaagactttggagtaaaaagggccctgaaggcagggacttattcctagcttcctgctcccaggactgtctgattcgtatttggaaactgtacataaaatctacatctctggagacacaggatgatgataacattcgcctgaaagagaacacttttaccatcgaaaacgaaagcgtcaaaatagccttcgccgtgacactggaaacagttctcgccggacacgagaattgggtgaacgccgtgcactggcagcctgtgttctataaagatggggtgctgcagcaaccggtgcggttactctcagcatccatggacaaaaccatgatcctctgggctcctgacgaagagagcggcgtttggttggagcaggttagggtgggggaggtgggcggtaacaccctcggattttacgactgccagttcaatgaggatggctccatgattatagcgcatgcctttcacggcgcactgcacctgtggaagcagaatacagtcaatcccagagagtggactcctgagattgttataagcgggcatttcgatggcgtgcaggatctggtatgggaccctgaaggagagttcattattactgtgggtaccgatcagaccacacgactgtttgctccctggaaaaggaaagaccaatctcaggtgacttggcacgagattgcacggcctcagatccatggttacgatcttaaatgtctcgcaatgatcaaccgtttccaattcgtctcgggagccgacgagaaagttttgcgggtgttctcagcccctaggaactttgtagagaacttctgcgccataactggccagagcttgaaccacgttctttgtaatcaagattccgatctacccgaaggtgcaactgtcccagcgctcgggctttccaataaggctgtgtttcagggcgacatcgcctcacagccctctgacgaagaagaattgctaacatcgacaggatttgagtatcagcaagtggcgtttcagccttccattctaaccgagcctcccacagaggatcatctgctccagaataccctttggccggaggtccaaaaactgtacggccatggctacgagattttttgtgtgacctgcaattcttccaaaacccttttggcctctgcctgtaaggctgcaaaaaaggagcatgcagccatcatcctgtggaacaccacctcctggaaacaggtgcagaatttggtattccacagcctgacagttactcagatggcgttttcccctaacgaaaaattcctgctggctgtctcaagagaccgaacctggagtttatggaaaaaacaggacacaatctctcctgaattcgagccagttttttccttgttcgcatttacaaacaagattacatcggtccactcacgtattatctggtcatgcgactggagtccggattctaagtattttttcacaggcagcagggacaagaaggtagtggtgtggggagaatgcgacagtacagacgattgtattgaacacaatatcgggccatgttcttcagtactggacgtcgggggtgctgtgacagcagtctctgtgtgtccagtactgcacccaagccagcgctacgtagtggcagtgggacttgaatgcggtaagatctgcctctacacctggaagaagactgatcaggtccctgagattaacgactggacgcattgtgttgagactagccagagtcagagccacactctggctatacgtaagctgtgttggaagaactgttctggcaagactgagcagaaagaggccgagggcgcagaatggctacacttcgcatcctgtggcgaggaccacaccgtgaaaattcacagagtcaataagtgtgctctgtag

SEQ ID NO: 30057 - DNA, 345 bp, synthetic construct
  source 1..345: mol_type = other DNA; note = Synthetic coding sequence
atgcaggagatcaatcagaacttggccgaggaggctggcctgaatatcacacacatttgccttccaccagactcgtccgaggcagaaattattgacgagatattaaagatcaatgaggacactagggtgcatggcctcgctctgcagatatccgaaaatctctttagcaacaaagtgctaaacgcactcaagcctgaaaaagacgttgacggtgtgacagacatcaatctggggaaattagtcaggggagacgcgcatgagtgtttcgtcagccccgtagccaaagccgtgatcgagttgcttgaaaagagtggcgtcaacctcgatggcaagaaaatcttgtag

SEQ ID NO: 30058 - DNA, 747 bp, synthetic construct
  source 1..747: mol_type = other DNA; note = Synthetic coding sequence
atggcaactagcgctccattgcgatcactcgaggaagaagtcacctgcagcatctgtctggattacctcagagatccggtgaccatcgactgcggtcatgttttctgccggtcttgcaccactgacgtgcgcccaataagtgggagtagaccagtttgtccactctgcaaaaagccctttaagaaagaaaacatcaggccagtttggcagctggcctccctggtggagaatatcgagagattgaaggtcgataaaggccgtcagcctggcgaggtaacgcgcgagcagcaggacgctaaactctgcgagcgccatagagagaagttgcactactattgcgaggatgacggcaagttactgtgtgtgatgtgccgggaatcaagagagcaccgacctcacaccgccgtgctaatggagaaagccgctcagcctcatagggaaaaaattctgaaccatctctctacattgcgaagagaccgagataagattcagggtttccaggccaagggcgaggcggatatattagcagctctcaagaaactccaagaccagcgccaatatattgtggcagaattcgaacaaggccatcagtttctacgggagagagaggaacacctgcttgagcagctggccaaattagagcaagagctgactgaaggcagagagaagttcaagtcacggggagtgggggagctggccagactcgctctcgtcatttctgaactcgagggtaaggctcaacagtag

SEQ ID NO: 30059 - DNA, 1461 bp, synthetic construct
  source 1..1461: mol_type = other DNA; note = Synthetic coding sequence
atgacctgtgggagctattgcggaggcagagcgttcagctgtatctccgcctgtggacccagaccgggacggtgttgcatcacagccgcaccctatcggggtatttcctgctacaggggcctcacagggggtttcggatcacatagcgtgtgcggcggatttcgggctgggagctgtggacggagcttcggctaccgctcaggcggagtctgtggccctagccccccatgcatcacgacagtgtccgtaaatgagagcctcttgacacctctgaaccttgagatcgaccctaacgcccagtgcgtcaaacaggaagagaaagaacaaatcaaatctttgaactcacgattcgcggctttcatcgacaaggtacgttttctggagcaacagaataaattgttagagaccaagctccagttctatcagaacagggagtgttgtcaaagcaatctggagcctctgttcgaaggctacattgagacactaagacgcgaggctgagtgtgtcgaagcagatagcgggaggctcgccagcgagctcaaccacgtccaggaggttcttgagggatacaaaaagaaatatgaggaggaagtctcgttgagggccacagcggaaaacgaattcgtcgcccttaagaaagacgtcgattgcgcttacctgaggaaaagcgacctggaggccaatgttgaagcattgattcaagaaattgactttctgcgccgattgtacgaggaggagattcgcgtcctacagtcacatatcagcgacacgtcagtggtagtaaaactggacaactcccgtgacctgaacatggactgtatcatcgcggagattaaagcgcagtatgatgatatcgtgactcggagtcgggctgaagccgaatcctggtatcgaagcaagtgcgaggaaatgaaggctaccgtaatcagacacggagaaaccctgaggcggactaaagaggagattaacgagcttaaccgtatgattcaaagattaactgcagaggttgaaaatgcgaaatgtcagaacagtaaactcgaagcagccgtggctcagtcagagcagcagggtgaagctgccttatctgacgcccgatgtaagctggcggagctggaaggggctctgcagaaagccaaacaggacatggcctgcctcatacgtgagtaccaggaggtgatgaacagtaagcttgggctggacatcgaaatcgccacttatcggagattgttagagggagaggaacagaggttatgtgagggggtcggatccgtgaacgtctgcgtgagtagcagtcggggtggagttgtctgcggagacctgtgcgccagcacaaccgctccggtcgtctccacccgagtgagctccgtccctagtaattccaacgtggtggtggggactacaaacgcatgcgccccatccgccagggttggtgtctgtggtggctcctgtaagcggtgttag

SEQ ID NO: 30060 - DNA, 1710 bp, synthetic construct
  source 1..1710: mol_type = other DNA; note = Synthetic coding sequence
atggcactactctcagagggacttgatgaggtgccggcagcctgtctgagcccctgtggccctcccaatcctaccgagctcttttcagaaagccgaagactcgcactggaggagctcgtggcagggggtcccgaagcgtttgccgctttccttagaagggaacggctggccagatttctcaaccccgatgaggttcacgccatcctgagggctgccgagcgacccggtgaggaaggcgcagctgctgccgcagctgccgaggattcctttgggagttcccatgattgctctagcggtacctactttccagaacaatccgacctggagcctccactcctagagctgggatggccggcattctaccagggtgccggagaggggggaccctacggatgtaaagatgctctgcgccaacagctgcgcagcgccagagaggtgatcgccgtggtcatggacgtgttcacggacatcgatattttcagagacttgcaggagatctgccggaagcagggtgtcgccgtttacatcctacttgaccaggccctcctatcgcaatttctggacatgtgtatggacctcaaagtgcatcccgaacaggagaagctaatgacggtccgtacgattaccggcaacatttattatgcccgaagcggaacaaagatcattggcaaagtgcatgagaagtttactctcattgacggcatccgagtcgctactggatcctactcctttacatggactgacggcaaattaaacagtagcaatctggtaattttgtcagggcaagttgttgagcacttcgatctggagttccgtatcctgtatgctcagtccaaacccattagccctaaactgcttagccattttcagagttcgaataagtttgaccatttgacgaaccgcaaaccacaaagcaaggagcttactctgggcaatttactgcgcatgcgcctggccagactttctagcacgccaagaaaggccgatcttgatcctgagatgccagcagaaggaaaagctgaacggaagccacacgactgtgagtccagtactgtgtcggaggaagactacttctcgagtcaccgtgatgagctgcaatctcgaaaggcaatcgacgccgctacacagacagaacccggagaggaaatgccgggattgagtgtgagtgaagtcggtacccagacgtctattactacagcatgtgccggaacgcagacagctgtgataacccgaattgcctcgtctcaaacaaccatatggagtcggtctaccacgacacagaccgatatggacgagaatattttgttcccaaggggtacccagtcgacagaaggatctcctgtatccaagatgtccgtgagtagaagcagcagcctaaagagctcctccagcgtttcaagccaaggcagcgtcgcatcatccacaggctctccagcctccattcgtacaactgatttccacaacccgggatacccgaaataccttggaacaccacacctcgagctgtatctgagcgattcgctgagaaacctgaataaagagcgtcagtttcactttgctggaatacgatcgcgcctgaaccacatgctcgctatgttgagcaggagaactctgtttacagaaaaccaccttgggctgcattctggcaatttcagccgagttaatctcctcgctgtaagagacgtggccttatatcctagctatcagtag

SEQ ID NO: 30061 - DNA, 1224 bp, synthetic construct
  source 1..1224: mol_type = other DNA; note = Synthetic coding sequence
atggtactgttttcggactccagtctgccacattggcagcagcagccccctcagccagcgcctcccccaccgctgtttcctaggcaacaacaggtgcaagtcaataagggtcgagtaaactgtcaccccagatgtcgctacataaagacaaaaccttgccaccagttgagccaccaggtgtgggttcagcagaagccctcacacagactgctcagcctgcaactgagcccttccccaaagcctagcccaagcccacagctttctctgaaattccgtctctcactgaagtttagacccaagcagttgttccatcccatgtcattgctgaaacacaatccgccaactcacagtcacccttccccaaaactgcagcaatctcagccacagagcaacgtgcaggggcagtcgcctgtccgggttcagagcccgtcacaaacaaggattcggccatcaacgccctcgcagttgagcccagggcagcaatcccaggtgcagactacaacaagccagcccatccccattcaacctcataccagcctgcagatccctagccagggccaaccccaatcacagcctcaggtcgttatgaagcacaacgcggtcattgagcacctgaagcagaagaaatccatgaccccagctgagagagaggagaaccagaggatgattgtgtgtaaccaggttatgaaatacatcttggataaaatcgacaaggaggagaagcaggctgccaaaaaaaggaagagagaagagtccgtggagcagaagagaagcaagcagaacgctacaaagttgtcggctcttctcttcaaacataaagagcagcttagggccgagatactcaagaaacgggcactcctggataaagatctgcaaatagaggtccaagaagagctgaaaagggacctgaagattaagaaggagaaggacctgatgcagctggctcaggcaacagctgtggccgcaccctgccctcctgttacgcctgctccccctgctccccctgcaccgcctccatccccccctccgcctcccgctgttcagcacaccggacttctgagtaccccaaccctgcccgctgcctcacaaaaaaggaagcgggaggaggagaaggacagcagttcaaagtcgaaaaaaaaaaagatgatcagcaccacctcgaaagaaactaaaaaggacactaagctgtactgcatctgtaagaccccttacgatgagtcctag

SEQ ID NO: 30062 - DNA, 480 bp, synthetic construct
  source 1..480: mol_type = other DNA; note = Synthetic coding sequence
atggccacttcagcgccactgcgttccttggaagaggaggtgacatgttctatttgtcttgactacctcagggacccggttaccatcgactgtggtcacgtgttctgtcgctcctgcaccactgacgtgcggcctatcagcgggagccgccctgtttgcccactgtgtaagaaaccgtttaagaaggaaaatatcagaccagtgtggcagctcgagaaaatcctgaatcatctcagcactctcaggcgcgatagggataaaatccaagggttccaggcgaagggcgaagcagatatccttgccgctttgaaaaagctccaggaccaaaggcaatacattgttgccgagttcgaacagggacatcagttccttcgtgagagggaagagcacttgctagaacaactcgcaaagctggagcaggaactaacggagggcagagaaaagtttaaatcaagaggcgtgggcgagctggcgagatag

SEQ ID NO: 30063 - DNA, 309 bp, synthetic construct
  source 1..309: mol_type = other DNA; note = Synthetic coding sequence
atgaatgaggctgagatcgttgacgttgcccttgggattctgattgagtcaagaaaacaggagaaggcatgcgagcagcctgcattggctggggcagataatccagaacacagccctccctgtagtgtgtcaccacatacctcatcaggcagctctagtgaggaggaggattcaggcaaacaggccctggctcctggcctatccccttcccagaggcccggtggttcctcttccgcatgttccaggtctccggaagaggaagaggaagaggatgtgctgaaatacgttagggaaatcttttttagttag

SEQ ID NO: 30064 - DNA, 345 bp, synthetic construct
  source 1..345: mol_type = other DNA; note = Synthetic coding sequence
atgcagttcggtgagctactggctgctgtcagaaaagcacaagctaacgttatgctgttcctggaagaaaaggagcaggctgccctgtcacaggctaatggcatcaaagctcatcttgaatataggagcgcagaaatggagaagtcaaagcaggagcttgaaacgatggctgccattagtaatactgtccaattcttggaacgctctatgacatcagaacttaagtgcttgccattgttttcggctaacatcggactccctaacttgagtccggctcccggaaactcttcctccaacatgtgcatgacttcccgcagcacccgaacccaacacaccagcatctag

SEQ ID NO: 30065 - DNA, 579 bp, synthetic construct
  source 1..579: mol_type = other DNA; note = Synthetic coding sequence
atggcacctaaaccaggggcagaatggagcacagctctgtcccacttggtactcggggtagtgagcttgcacgctgcggtgtcaacagccgaggcatcccgcggtgcggctgcgggattcctgcttcaggtgctggctgccacgaccacattggcgcctggattatccacacatgaggactgcctcgccggtgcatgggtggctacggtcattggtctgcccttactagcatttgattttcactgggtcaacggcgatagaagcagcgcaaatcttttacttgggggaggcatggtgctggcagtagccggagggcacctgggcccagaggggagaagtgttgccggtcaagcaatgctgttagttgtcgctgtgacgattctgatcgtcgccgtgttcaccgccaacacgtatgggatgtggggaggggctatgcttggagtagctggcttgctcagcaggctcgaggaagatcggttgttgctcctgccaaaagaagatgtctgccgatgggcacttgcagtcgggtcttgggcctattgtagagcattacatacgcaaaggctgcaatgggaatag

SEQ ID NO: 30066 - DNA, 888 bp, synthetic construct
  source 1..888: mol_type = other DNA; note = Synthetic coding sequence
atgaaacagtacggtttaggccctaatggtggcatcgtgacaagtttgaacctattcgctactcgtttcgatcaggttatgaagttcatcgaaaaggcacagaatatgtcaaagtatgtgctgatcgacactcccggtcagatcgaagtcttcacctggtcggcttccggtaccatcattactgaggcactggcctcatccttccctacggtggtcatctatgttatggatacctcaaggtccaccaatcccgtcaccttcatgtctaacatgttatatgcatgcagcatactttataagaccaagctaccgtttatcgtggttatgaataaaactgacatcatcgatcacagttttgcagtcgaatggatgcaagatttcgaggccttccaggatgcactcaatcaggaaaccacatacgtgtcaaacctgacccgttctatgtctctggtcctggacgaattctactcatctttaagagttgtgggtgttagtgctgttctgggaacaggtcttgacgaactttttgtgcaggtcacatccgccgcagaggagtatgagagggagtaccggcctgaatacgagcggttgaagaagtctctggccaacgccgagtcacagcagcagcgcgaacagctggagcgcttgcggaaagacatgggcagtgttgctctggatgctggcaccgctaaagacagcctgtcccccgtcctccaccccagcgacttgattctcacccgcggaaccttagatgaggaagacgaggaagctgactccgacactgatgatatcgatcatcgcgtaactgaagaatcccacgaagagccagctttccagaacttcatgcaggaaagcatggcccagtactggaagagaaataacaaatag

SEQ ID NO: 30067 - DNA, 1212 bp, synthetic construct
  source 1..1212: mol_type = other DNA; note = Synthetic coding sequence
atgcccagcgccgaggctaagctcaaaaagaataggtgcgccaattgttttgattgtccaggttgcatgcataccttatcgacacgggctacaagtatttccacacaactaccagatgatcccgctaaaaccaccatgaagaaagcatattatctggcctgcggcttttgcagatggacgagtcgcgacgttggcatggcagacaagtcagttgcatcaggcggatggcaagagcccgagaacccccacactcagcggatgaataagttgatcgagtactaccagcagctggctcagaaggagaaggtggaaagagaccgaaaaaagcttgccagaaggcggaactatatgccccttgcattctcagataaatacggactgggcacaaggctgcagagacctcgcgctggcgcatccatctcaacccttgcgggtctttccctaaaggagggtgaggatcagaaagagataaaaatagagcctgcacaagccgtggacgaagtggagcctctgcccgaggattattatacaaggcctgtgaacctcactgaggtaactacacttcaacagaggctgctacagccagacttccagccagtttgcgcttctcagctctacccacggcacaagcatctgctgattaaacggtccctacgatgcagaaagtgtgagcacaatctgtccaagcctgaatttaaccctaccagcattaaattcaagatccagctcgttgccgtgaattatatcccagaagtgagaattatgtcaattcctaatctgagatacatgaaagaatcacaagtgctgctaacactaaccaaccctgttgaaaatctcactcacgttaccctgttcgagtgcgaggagggcgaccctgacgacattaattcaactgctaaagtcgtggtgcccccaaaagagcttgtgctcgcgggtaaagacgctgccgcagagtatgacgagcttgccgagccacaggatttccaggacgacccagatataatcgcttttcgcaaggccaacaaggtgggaatcttcatcaaagtgacacctcagcgggaagaaggcgaggtgacagtctgctttaagatgaagcatgacttcaagaacctcgccgcaccaatccgtccaatcgaggaatcagaccagggtacagaggtcatatggctgacgcagcacgtcgaactgtctctaggccctttactgccttag

SEQ ID NO: 30068 - DNA, 1674 bp, synthetic construct
  source 1..1674: mol_type = other DNA; note = Synthetic coding sequence
atggaccaaagtcgggtgctcctatgggttaaggctgaacccttcatagtgggcgcactccaggtaccaccaccctcaaagttttctttgcactatctccgtaagattagcacttatgtgcagatccgggctaccgagggagcctaccctagactctactggagcacctggcgacatattgcttgcggaaagttgcagctggccaaagacctggcctggctgtactttgagattttcgattccctgagcatgaaaacgcccgaggaacgccttgaatggagtgaggtgttgtcaaattgtatgtctgaagaagaggtggaaaaacagcgcaatcaactgtccgtggacacgttgcaattccttctctttctgtatatccagcaattgaacaaagtcagtttaaggacgagtctcatcggagaggagtggcctagcccgcgtaataaaagccagtcccccgacctaaccgagaagagcaattgccataacaagaattggaacgattatagccaccaggccttcgtttacgaccacttgagcgatcttttggaattactgttggatccaaagcagcttaccgccagtttccattccactcatagctccctggtcagccgagaagccgtggtggctctgtcttttctcattgagggaaccatctcgagagccaggaagatctaccctcttcatgagcttgccctgtggcaacctctgcacgccgattctggcttttctaaaatcagtaagacattcagcttttacaaactcgaaacatggctgagatcatgccttacaggcaatcccttcgggacatccgcgtgcctgaagtcaggtaagaaactggcttgggcacatcaggtggaagggactaccaagcgggctaaaatcgcttgtaacactcatgtggcaccgagaatgcaccgcctggttgtcatgtcccaggtctataagcagacgctagccaagagctccgacaccctggccggagcccacgtgaagatacaccggtgcaatgagtcattcatatatcttctcagcccacttcggtctgttactatcgagaagtgccggaattctatttttgtgctcggtcccgtgggcacaactcttcacttgcacagctgcgataatgttaaagtgattgcagtctgccaccggctttccatctcctccacaactggttgtatttttcatgtcctgacacccactaggccacttatactctcgggcaaccagactgttacctttgctcctttccacacgcactacccaatgcttgaagaccacatggccaggacaggactggccacggtccccaactactgggataaccccatggtagtatgtagggagaattctgatacccgggtatttcagctgctaccaccatgcgagttctatgtcttcattattccatttgaaatggagggcgacacaaccgaaatccctggcggacttccttccgtgtatcagaaggccctgggccagcgcgaacaaaaaatccagatatggcagaaaactgtgaaggaggctcacctgaccaaggaccagcgtaaacagttccaggttctagtggagaataaattctatgagtggctcattaatactggacatcgccagcagttagactccctagtgcctcctgcagcgggttcaaagcaggcggcagggtag

SEQ ID NO: 30069 - DNA, 462 bp, synthetic construct
  source 1..462: mol_type = other DNA; note = Synthetic coding sequence
atggccgagcaggaacagcgcaaaatccccttagtgcctgaaaacctgctgaagaaacggaaagcctaccaggccttaaaggccacccaagccaaacaggctttgctggctaagaaagaacaaaagaagggcaagggcctgcgttttaaaaggttggaaagctttctacatgactcatggcgacaaaaacgggataaagtccgcctgcgacggcttgaggttaagccccacgctctggagctcccagacaaacattcactggcctttgtagtgcgaattgagagaatcgatggcgtgtccctgctggtgcagaggaccattgccagactccgtttaaagaagatcttttcaggcgtgtttgtaaaagtgactccccagaatcttaaaatgcttagaattgtggagccgtatgtcacatggggcgaggtgtggaggcatctgttgggcaggccacatagttag

SEQ ID NO: 30070 - DNA, 2070 bp, synthetic construct
  source 1..2070: mol_type = other DNA; note = Synthetic coding sequence
atgatcgactccgttaaactgaggcgcgattcggcggctgatttcttcagccactacgaatacctgtgcgcgctgcagaatagcgtacctctgcctgctgtgcgggcatgtctgagggaaggcgtgctggactttaatgccgatagactcaggggcgtcgactgggccccactgttgagcaccctcaaaattaataaggaccttcccctggtgtccatcaaatccttctttcagccctggctgggcgacaccggatcggacatgaacaaattctgcaggagtcgcgttcccgctatccgttacaaagacgtaacttttcagctgtgcaaggcgcttaaagggtgtcttagcattagcagtgtccttaagaacttggaattaaatggactgatattgcgtgagcgcgacctcacaattttggccaaaggattaaataagtctgcatccctcgtgcatctttctctcgcaaactgccccataggtgacggcggactagaaataatatgtcagggtatcaaatcttctattaccttgaagacagtgaatttcaccgggtgcaaccttacctggcagggcgcagatcacatggcgaaaattttgaaatatcagaccatgcgaaggcacgaggaaacgtgggcagagagtctgcgatataggcgccctgacctggactgtatggctggtctgcgacgaattacacttaattgcaatacgctcatcggagatctgggggcatgtgcattcgccgatagcctcagcgaagatttgtggctccgagctttggacctgcaacaatgcggcctcacgaatgagggcgctaaagcgctgctggaggcattagagactaacaccacgttggtggtcctggacatccggaagaatcccctgatcgatcacagcatgatgaaagcggtgataaaaaaggtgctgcagaatggcagaagcgccaagtcagaataccaatggatcactagccctagcgtgaaggaacccagcaaaaccgccaagcagaaaagaaggaccatcattctcggatccggccataagggaaaggctaccatacggatcggcttggccaccaaaaagcctgtctcctcggggcgaaagcactctttgggcaaagaatattacgctcctgctccgctgcctcccggagtatcaggattccttccttggcgtactgccgaaagagcgaagcggcatcgcggtttcccactgatcaagaccagagacatttgcaaccagctgcagcagccaggcttccctgttactgtgaccgtggagagtccgtcttcttccgaggttgaggaggtggacgattcctctgagtcggtgcatgaagtaccagagaagacatccattgagcaagaggctttacaggaaaaattggaagagtgcctaaagcagttgaaagaggagagagtgattagactcaaagtggataagagagtcagtgagctcgagcatgaaaacgcccaattgaggaacattaactttagcctatccgaagccctgcacgcgcagtctctcacaaacatgatcctcgatgatgaaggcgttcttggctccatcgaaaacagtttccaaaaattccatgctttcctggatttgctaaaggatgccggtctggggcagcttgcaaccatggccggaattgaccagtcagattttcagctccttggccaccctcaaatgacatcaactgtgagcaaccctccaaaagaggagaagaaggcactagaggatgagaagccagagccgaagcagaatgcattgggacagatgcagaacattcaattccaaaagattactggcgatgctcgtatacccttgcctctggacagtttcccggtgcccgtgtctactccagaaggtctgggcactagcagtaacaacctaggtgtgcccgctactgagcagaggcaagaatccttcgagggcttcatagcccgtatgtgttctccatctccagacgccacaagtggaacggggtctcagagaaaagaggaagaactgagccgcaattcccggtcgagttcagagaagaagacaaagactgagtcacactag

SEQ ID NO: 30071 - DNA, 915 bp, synthetic construct
  source 1..915: mol_type = other DNA; note = Synthetic coding sequence
atgaacttctctgaggtcttcaagctgagcagtctgctgtgcaaattttctcccgacgggaagtacctagcatcctgcgtgcagtatcggctggtggtgcgcgatgtgaatacccttcaaattctgcagctctacacctgcctggatcagatccagcatatcgagtggtcagcggatagcctgtttatcttgtgtgccatgtacaagcgaggtctggtgcaagtctggagcctagagcaacctgaatggcattgcaaaatcgatgaaggtagcgccggtcttgtcgccagttgttggtcacctgacggacgccatatcctgaatacaacggagtttcacctgcgaatcacagtctggtcgctgtgtaccaagagcgtatcctatatcaaatatccgaaagcatgcttgcaagggattacctttacccgggacggacgctatatggccctcgccgagcggagggactgcaaagattacgtgagcatctttgtctgcagcgactggcagctcctgaggcactttgacacagacacgcaggatcttacagggatagaatgggcaccaaacggttgtgtattggctgtgtgggacacctgcctggaagtgaggattctaaatcatgtgacctggaaaatgattacagaatttggccacccagccgcaatcaacgatccaaaaattgtggtttataaagaggctgagaagtcccctcagctggggctcggctgcctgtcttttccacctccaagagcgggagctggcccattacctagttctgagtctaagtacgaaatagcttctgtgccagtgagccttcagaccctaaagccggttaccgacagagcaaatccaaaaattgggattggcatgcttgcattttctccagacagttactttcttgctacccgaaattag

SEQ ID NO: 30072 - DNA, 483 bp, synthetic construct
  source 1..483: mol_type = other DNA; note = Synthetic coding sequence
atgaaagaagtgggacgtccacgcgaggttaggggccgacctggtaagagccgcattcagaaggagttagcagatatcacgctagatcctcctcctaactgctcagctggccctaagggcgataacatctacgagtggcggagcaccatcctcggacctcccggatcagtgtacgagggaggcgtgttctttctagacattacctttactcccgaatacccttttaaaccaccaaaagtgaccttccgcacccgaatctaccattgcaatattaattctcagggggtgatttgcctcgatatcctcaaagataattggtctccagcccttacaatcagcaaagtcctgctctctatttgttcacttttaacagactgtaatcctgcagatccattagttgggagcattgctacacagtatatgacgaaccgcgcagaacacgatagaatggcaaggcaatggacaaagcggtacgctacttag

SEQ ID NO: 30073 - DNA, 516 bp, synthetic construct
  source 1..516: mol_type = other DNA; note = Synthetic coding sequence
atgtcttcaggtaacgcgaaaattggccatccagctcccaattttaaagctaccgccgttatgcctgatggccagtttaaggacatttccttatccgattataaaggaaagtatgtggttttctttttctacccactcgattttacctttgtgtgccccactgaaatcatcgccttcagcgaccgagcagaggagttcaagaaactgaactgtcaggttataggggcaagcgttgatagccacttttgccatcttgcgtgggttaatacccctaaaaagcagggcggacttggaccaatgaacatccctttagtatccgatcccaaacgcacaatcgcccaggactacggcgtcttgaaggccgatgaaggaattagtttccgcggactttttattattgacgacaaaggcattctacggcagattacagtgaatgatcttccagtgggcaggagcgtagacgagactcttcggcttgtgcaggcctttcaatttaccgataaacacggggagtag

SEQ ID NO: 30074 - DNA, 603 bp, synthetic construct
  source 1..603: mol_type = other DNA; note = Synthetic coding sequence
gtcctgattttcgcgtgcttggtccctgggttccctgctgtaatgtcttcccggggaccctgtaccttggaaaccctcattaacccatcacccagcgttgcagacgtgaaaatctatcccgaagaaatcactccgctgttgcccgcaatttcaggtgagaagatcgccgaggatcagacatgtttcttcttgcagattctcctgaaatatatggtgattcaggcagcttctttggaatggaaaaacaaggagaatcaagacacgggctttaaatttttattcactctcttccgcaagtattacctgccgcacctgttcccatcttttactaagcttacaaacatttacaagcccgttctggatatcccacatctaagaccgaaacccgtctacatcacgacaacaagggataatgagaacatctacagtaccaaaattccttacatggccgctcgggtcgtgttcataaagtggattgtcacctttttccttgaaaaaaaatatctgacagctacacagaatactaagaacggggtggatgtcttacccaaaatcatccaggtgtgtcacccatccagtttctacctgctcatgcttgtgtag

SEQ ID NO: 30075 - DNA, 576 bp, synthetic construct
  source 1..576: mol_type = other DNA; note = Synthetic coding sequence
atgagtagcacattgggaaagctaagcaaccaggtggaagagaccctccccctgctgaaaaagccattaaaaagagccatcaccaccctcatggcaggcatcttaagactcgtggtgcagtggcctcctggtaggctacagacagtcaccaaaggggtcgaaagtttgatctgcacagactggatacggcacaaatttactagaagcaggatcccggaaaaggtgttccaggcaagcccagaagatcacgagaagtatggaggagacccacagaatcctcacaagctccacattgtaacacgtattaaatctacccggcgaagaccatattgggagaaggacatcatcaagatgctgggattagagaaggcccatacacctcaggtgcacaaaaatatacctagcgtgaacgcgaagttgaaggtcgtcaaacacctgatccgcatcaaacctctgaagcttcctcaaggcttaccagccgaggagaacatgagtaacacttgccttaagtctacgggcgaactggtcgtgcagtggcatctgaagcctgtcgaacaaaaagctcatgagtcatag

SEQ ID NO: 30076 - DNA, 483 bp, synthetic construct
  source 1..483: mol_type = other DNA; note = Synthetic coding sequence
atggaggcggagcgccctcaagaagaagaagatggggaacaggggcctccacaggacgaggaggggtggcctccgcctaactctacaacaagaccttggagatctgctcctcctagtccacctcccccagggacaaggcatactgctcttggcccaagatccgcctctctgctcagtctgcagaccgaactattacttgacttggtcgccgaagcccagagtcggaggctagaagagcagcgcgctactttctatacccctcagaaccctagctcactggccccagcacctttgagaccgctggaggatagagagcagctgtattctaccattttaagtcaccagtgccaacgcatggaggcccaaaggagcgagccgccactgcctccgggtggtcaagagttgttggaactattactgagagtgcagggaggaggtcggatggaggaacaacgcagccgcccaccgacacacacgtgttag

SEQ ID NO: 30077 - DNA, 321 bp, synthetic construct
  source 1..321: mol_type = other DNA; note = Synthetic coding sequence
acgtttttggaacaatctaagacccgctttaataagaactataaggggatgagtttaagtaagataaccactactgtggggcttaatatcggaactgtcgacgtaggtaaggcaaggttgatgttctgggacctcggtggtcaggaagagctccaatcactgtgggataaggacaaaaccaagtgcggggacctgggaacccttcactccagcaaggtgagtgcaagctttcggctgagggatctggccgctgaccaccacagaacccagaagtggcagcgcccagatgtaggaacagccggttggcttccactgccttag

SEQ ID NO: 30078 - DNA, 1524 bp, synthetic construct
  source 1..1524: mol_type = other DNA; note = Synthetic coding sequence
atggccgaactgcagatgctcttggaggaggagattcctggagggagacgcgcactgtttgactcatacaccaatctcgagcgggttgccgattattgcgaaaataattatatccagagcgcagataagcagagggccttggaggagactaaggcctatactacccagagcctagcttctgtggcctacctgatcaatacactcgcaaataatgtcttgcaaatgctggacatccaggcctcccagctgagaagaatggaatcaagcatcaatcatatctctcagactgtggatatacacaaggaaaaagttgcccgtagagaaatcggcatcctgaccacaaacaaaaacacatctagaacccacaaaattatcgcgcctgcaaatctggagcgcccagtgagatatattcgaaagcctattgactacactatcttggatgacattggtcatggagtaaaagtctcaacccagaacatgaaaatggggggacttccccgaacgacacctcctacacagaaacctccctcccccccaatgagtggcaaaggcacgctgggcaggcactctccatatagaaccctcgagccagtcagacctcctgtggttccaaacgattatgtgccctcaccaacaaggaacatggccccttctcaacagtcgcccgtgaggaccgccagcgtcaatcaacgcaataggacatactcctcctcgggatccagcgggggatctcatcctagctcccgaagtagctccagggaaaattctggttctgggagcgtaggggtgcccatcgcagtgccaactccaagccctccatcggtgtttcccgcacctgccggatctgccggaacacccccactgcctgctactagtgcctctgcaccagcacctcttgtccctgccaccgtgccctcatctaccgccccagatgcggctgcaggcggagcgcagaccctcgcagatggattcacttccccaaccccacccgtagtgagcagcaccccaccgaccggtcacccagtgcagttctactccatgaatcggcctgcttctcgccacacccctccaaccataggaggctccctgccgtatcgcaggccaccttccataacctctcaaacgagcctccagaatcagatgaatggcggacccttttacagccagaaccccgtgtcagatacacccccaccccctcctcccgtggaggaaccggtgtttgacgagagcccccctccccctcccccacccgaggactatgaagaagaagaggccgctgtggtagagtactctgacccctacgccgaagaggaccccccatgggctccgcgatcctaccttgagaaagtggttgcaatatacgattacactaaagacaaggaggacgagctctcctttcaagaaggcgcaatcatctacgtgatcaagaagaatgatgacggttggtacgaaggcgtaatgaacggggtaacggggctcttcccagggaattatgtggagtccataatgcactactctgaatag

SEQ ID NO: 30079 - DNA, 303 bp, synthetic construct
  source 1..303: mol_type = other DNA; note = Synthetic coding sequence
atggcttccgcgggaacccagcattactccatcggtctgagacagaagaatagcttcaaacagagcggtccctcgggtaccgttcccgcaaccccacctgagaaacccagcgaaggtcgtgtgtggccccaggctcatcagcaggttaaacctatatggaagctagagaagaagcaggtggagaccttatctgctgggctgggccctgggttactcggagttcctcctcagcccgcttattttttttgcccctcaaccctctgtagctccgggactaccgcagtaatcgcagggcacagctag

SEQ ID NO: 30080 - DNA, 1212 bp, synthetic construct
  source 1..1212: mol_type = other DNA; note = Synthetic coding sequence
atggcgtcagcactgagaccacccagggtgcccaaaccgaaaggggttctgccttctcattactacgagagcttccttgagaagaaaggcccttgtgatcgcgactacaagaaattctgggctgggctgcaagggctcaccatctatttctacaattctaacagggacttccagcatgttgagaagctaaacctgggggcatttgagaaattgactgatgagatcccctggggctcatcccgagaccctggcactcacttttccctaattttgcgggaccaggagatcaaatttaaagttgagacattagagtgtagggaaatgtggaaggggttcatcctgaccgtagtggagctgcgcgttcccacagacctgaccctcctgcccggtcacctgtatatgatgtcagaggtgttggccaaggaagaagcgcgtcgggctctggagactccctcctgctttctcaaagtgtctcgacttgaggctcagctactcttagaaagataccctgaatgtgggaacctgcttctccgaccctctggagacggagccgatggtgtctctgttactaccagacagatgcataatggaacgcacgtagtaaggcattataaggtcaagcgcgaaggcccaaagtatgttattgacgtcgagcaaccattttcgtgtaccagtctggacgccgttgtgaactatttcgtttcacataccaagaaagcgctggtccctttcctgttagacgaagactatgaaaaggtgctggggtatgtcgaagctgacaaggagaacggtgaaaatgtgtgggtcgccccatctgccccaggcccaggacctgctccttgcactgggggacccaagcccctgagtcccgctagctctcaggataagttgccccctttaccccctttgcccaaccaggaagaaaattatgtgaccccaatcggagacggcccagccgtggactacgagaatcaagacgttgccagctcttcgtggccagttatactaaaacctaaaaaactgcccaaaccacccgctaagttaccaaaacctcccgtggggccaaaacctgaaccaaaggtgttcaatggaggcctcgggcgaaaactccccgtttcctcagcacagcccttgttcccaacagctgggctggccgatatgacagctgaattacagaaaaagctcgaaaaacgtcgcgcactggagcactag

SEQ ID NO: 30081 - DNA, 1551 bp, synthetic construct
  source 1..1551: mol_type = other DNA; note = Synthetic coding sequence
atgctaaggcgtggcagccaggcattacgacgcttttctacaggaagagtctattttaagaacaagctgaagctggctctcatcggtcagagcctctttggccaggaagtgtactcccacctgcgtaaggaaggccatcgcgtggtgggcgtgtttaccgtcccagacaaagatggtaaagccgatcccctggccttggctgccgaaaaggacggcacacctgttttcaaattgccaaaatggcgagttaaggggaaaaccataaaagaagtcgccgaggcttatcgatccgttggagccgagttaaacgtgctccctttctgcactcagtttatacccatggatatcatcgatagtcccaaacatgggtctatcatttaccaccccagcattctgcccagacataggggcgcttctgccatcaattggacgcttatcatgggggataaaaaggccggattttcggtcttctgggccgatgatggcctcgacacaggacctatactgctgcaacggagctgtgatgtggagccaaacgacactgtggatgccctctataaccgattcctcttccccgagggtatcaaggcgatggttgaggcggtgcagctgatagctgacggaaaggctccccgaatccctcagcccgaggagggagcaacatacgaaggcattcagaagaaggaaaatgccgagatatcttgggatcagtcagctgaggtgttacacaattggatccgcggacacgataaagtacccggagcgtggacggagattaacggacagatggtgactttctacggatccaccctgttaaatagtagtgtcccaccaggggagcccttagagataaagggtgcgaaaaagccaggtttggtgacgaaaaacggattggttctcttcggcaatgacggcaaagctctcacagtgcgcaacttgcaatttgaggacggcaagatgattcccgcttcacagtacttctctaccggcgaaacctccgtggtggagctgacagcagaggaggtcaaagtggctgagacgattaaggtgatctgggctgggattctgtccaatgttcctattatcgaagactcaaccgatttttttaagtcaggggcttccagcatggatgtggcgagactggtggaagaaatacgccagaagtgtgggggactgcagctgcagaatgaggatgtttacatggctacaaaatttgagggattcatacagaaggttgtaaggaagttgcgcggtgaagatcaggaggtagagttggtcgtcgactacattagcaaagaggtcaatgagatcatggttaagatgccttatcagtgcttcatcaacggacagttcaccgacgccgatgatggcaaaacctacgacacgatcaacccaactgacggatctaccatatgcaaagtgtcttacgccagtctagctgacgtcgacaaggcagtcgcagcagccaaagatgcctttgaaaacggagagtggggaaggatgaacgcccgtgagcgcggaaggctgatgtatagcatgcggatgaattag

SEQ ID NO: 30082 - DNA, 1581 bp, synthetic construct
  source 1..1581: mol_type = other DNA; note = Synthetic coding sequence
atggaggaaatccctgcccaagaagccgctggcagccctcgggtgcaatttcagtctctggagactcaatccgaatgcctgtctccagagccccaattcgtacaggacaccgacatggagcaggggctgacaggagggtttccaatctcaaagccggatggaatcagtcagctcgaacaagaccttcaggtgtttgatctagagacaaagacacgcgaggtactgcgcgacgattgctctgacggggaaactagggaggagaacaagctcttgatccctaagcagaagatttccgaggaagtacacagttataaggtgcgcgtcggaaggttgaagcacgacattacacaagtgcccgagactagggaggtgtataaatcagaagaccgtctagagagacttcaggagatcctgcgcaaattcttatacctggagagggagttccgccagattactatctccaaagagactttcacctctgagaagaataatgagtgtcacgaacctgagaaatcattctctctcgatagtactatcgacgcagatcagcgcgtcttgagaattcaaaataccgacgataacgacaagtacgatatgagcttcaatcagaactctgcctctggcaagcatgaacacctcaacctcaccgaagatttccaaagttctgaatgcaaagagagtttgatggacctcagccatcttaacaaatgggaatcaataccgaacaccgagaaatcctataaatgtgacgtgtgcggaaagatcttccatcaatcttctgccctgactaggcaccagcgtatccatacaagagagaaaccttataagtgcaaagaatgcgaaaagagcttcagtcagtcatcctccctgtccagacataagagaatccacaccagggagaagccctataagtgcgaggcaagcgacaaaagctgcgaggcaagcgacaagtcatgttcaccctcatcaggaatcatccaacacaagaaaatacatacacgggcaaagagctacaagtgttccagctgcgaaagagtgttttccagatccgtgcacttgacacaacatcagaagatccataaggaaatgccctgtaaatgtacggtgtgcggcagcgacttttgtcataccagctatttgctggaacaccagagagtacaccatgaagagaaggcctacgaatatgacgagtatgggctggcgtatataaagcagcaggggatccatttcagggagaaaccatacacatgttctgagtgtgggaaagattttagactgaatagccatttaatacaacatcagagaatccataccggggaaaaagcccacgaatgcaacgagtgtggcaaagcgtttagccagacatcctgcctgatccaacatcacaaaatgcaccgaaaagaaaaatcttatgagtgtaacgagtatgagggcagcttctcccatagctccgaccttatcttacaacaagaggtattaactcgacagaaggcattcgattgcgacgtgtgggaaaagaacagttctcagagagcccacttagtccagcaccagtctatccataccaaagagaattcatag

SEQ ID NO: 30083 - DNA, 603 bp, synthetic construct
  source 1..603: mol_type = other DNA; note = Synthetic coding sequence
gtactcatcttcgcatgcctcgtgcccggtttccctgccgtcatgtcatcccggggtccttgcactctggagaccctcatcaacccctccccttcagtggccgatgtgaagatataccccgaggaaataacgccattactccctgctatctcaggcgagaaaatcgcagaagaccagacctgtttctttcttcagatcttgcttaaatacatggttatccaggcagcctctctggagtggaaaaataaggagaatcaagatactggcttcaagtttctctttacactgttcaggaagtattacctgcctcacctgttcccttcattcaccaagctgacgaacatctataaaccagttctagatatcccccatctgaggcccaaacccgtgtacataacgaccaccagagacaacgagaacatctactccaccaagattccctacatggctgccagggtggtgttcattaagtggattgttaccttctttctggagaagaaatacctgaccgcgacacagaatacaaagaacggtgtcgatgtgctcccgaagatcattcaggtgtgtcacccttcttccttctatcttttgatgctggtgtag

SEQ ID NO: 30084 - DNA, 540 bp, synthetic construct
  source 1..540: mol_type = other DNA; note = Synthetic coding sequence
aatatcaagcccggtgagggcctgggcatgtacatcaagagtacctacgacggcctgcatgtcataacaggaacgacagagaacgtggggtggcagttgaagaatttggtgaagaagctaagggagaaccctactggtgtggtgctcctactcaaaaaaagaccaaccgggtcctttaattttacccctgcgcctctcaagaatctgagatggaagccaccactggtgcagactagcccccctccagccacgacccagtccccagagagcacaatggatacctctcttaagaaagaaaagtctgccatcctggacttgtacatccctccccctccggcagtgccttacagccccagagacgaaaacggcagtttcgtatatggcggatcctctaagtgcaaacaaccactgcccggtccaaagggcagtgaatctcccaactctttcctggatcaggagtctcgtaggaggaggtttacaatagcggattcagaccagctgccaggctactcggtcgaaaccaatattctaccaacttag

SEQ ID NO: 30085 - DNA, 1368 bp, synthetic construct
  source 1..1368: mol_type = other DNA; note = Synthetic coding sequence
atgatgggcgctcctaacctgattgcagacagcatggagtacggactgagttacagcgtgatatcttacctgaagaagctctcccagcaggcgaagattgagtctgatcgagtaatcggatctgtgggtaaaaaggttgtccaagagacgggtatcaaggtccggtctaggagtcacggcttatccatggcataccgaaaagacttccaacaactgctccagggaatttctgaggacgtaccacaccgactgctggatctgaacatgaaggaatacacaggtttccaggtcgccctcctgaataaggacctgaagccccagacattcagaaacgcctacgatattcccaggagaaatttgctcgaccatcttacaaggatgcgttcaaacttgctgaagtccacaaggcgatttttgaaagggcaggacgaagatcaggttcacagcgtgccgatagcacaaatggggaactaccaagagtatctgaagcaggttccgagcccgctccgagaactggatccggaccagcctcgtcggctccacacatttggcaacccatttaaactagacaagaagggcatgatgattgacgaagcggacgagttcgtggccggacctcagaataagcacaaacgccctggagaaccaaacatgcaggggattcccaagcgtcgtaggtgcatgtcaccgcttttgcgtggccgtcagcagaaccccgttgtgaataaccacatcggtggcaagggaccacctgccccaacaacacaggcacagcctgatctgatcaaacccctccccttgcacaagatctcagagactacgaacgatagtattatccacgatgtagtcgagaaccacgtggcagatcagctgtcaagtgatatcacccccaatgctatggatacagagttctctgcttctagccccgctagcctgctggagcggcctacgaatcacatggaagctcttggccatgaccacctgggcacaaacgatctgacggtcgggggattcctcgagaatcacgaagaacctcgggataaagagcaatgtgcagaagagaatatcccggcatcctctctgaacaaaggaaaaaaacttatgcattgtagatctcacgaagaggtcaatactgaactgaaggcacaaatcatgaaagaaattaggaaacccggtaggaaatacgaaagaattttcacactactgaagcacgtccaaggatcgttgcaaacccgcctcattttcctgcagaatgtcattaaagaggcatctcgttttaagaagcgcatgctgatcgagcagctggagaactttctcgacgaaatacacagaagagcgaatcagatcaatcacataaactctaactag

SEQ ID NO: 30086 - DNA, 1467 bp, synthetic construct
  source 1..1467: mol_type = other DNA; note = Synthetic coding sequence
cttgactgtggccctagactgcctgtggaggtgggaccaagccttagttccccatcgtctggctgcggcgaaggctcaatatctgtcggcgagaacgtgagcgacgtggctcccacacagccctggtggcccaatactcccggagacagcgtaagcgaggaactgggacccggacgtagtggagatacagaggatcttagcccgaattggcccttgaatagccaagaagacaccgctgcacagtcttccccaggtcgcggagaggaggctgaagcatctgcagctgaggcccaggggggagagcaagcatatctggcgggactcgccggacagtatcacctggaacgttatcctgatagctacgaatcaatgtcggagccaccgatagcccatttgttaagacccgtgctgccacgcgcttttgcattccccgttgacccccaagtgcaaagtgcggctgatgagactgctgtgcagctgtccgagttgctcacgctcccagtgctcatgaagcgctcaatcactgctcctctggctgcgcatataagccttgtaaataaggccgctgtggattacttcttcgtggagctgcatcttgaggctcattacgaagctttgcgtcactttctgcttatggaggacggagaatttgcccagtctctgtccgacctgctttttgagaagctcggcgctggacagactccaggcgagcttctaaacccgctggtgctgaatagcgtcctttccaaggcactgcaatgcagcctccatggagacactcctcacgcctcaaatctgtctttagcgctaaagtacctgccggaggtgttcgccccaaatgccccagatgtgctgtcttgcctcgagttgcggtataaggtagactggccacttaatatcgtcattaccgagggttgcgtgtctaagtactctggcgtcttcagttttttgctgcagctcaagctgatgatgtgggctctcaaagacgtttgtttccacctaaagcggaccgtcccttctgctgcagctgtgcaggctagggatgcagcctttagggagggtcaccctggcctccaccggcagcctgatcccgcaaggcatctggtgcgtgtgcagggacaggttggacataggggccgacccggtggggatcctgcatgcgctcgcagggtccctgctcagggacgactccaagcagctccagtgatgaacgtcattcactcaatcttttccctggttcttaagttcaggtcccaactgatttcgcaagcctgggggcctccagggggacccagaggtgctgaacacccaaacttcgccctgatgcagcagagctacaacaccttcaagtattacagccacttcctctttaaggtggtgacaaagctcgtcaatcggggttaccagcctcatctggaggactttctgctaagaattaacttcaacaattactatcaggatgcatag

SEQ ID NO: 30087 - DNA, 3819 bp, synthetic construct
  source 1..3819: mol_type = other DNA; note = Synthetic coding sequence
atggccaacgacagtcctgcaaagagtctcgtggacattgatttgtccagtcttcgcgatcccgctgggatctttgaattggtcgaggtcgttggtaacggcacatatggtcaggtgtataagggccgacatgtgaaaacaggacagttggctgcaattaaggttatggatgttactgaggatgaggaggaggagataaaactagaaataaacatgctgaagaagtattcccaccatcgcaacattgccacttactacggggcatttatcaagaaatctcctcccggacacgacgaccagttgtggctagtgatggagttttgcggggctggctcaattaccgaccttgttaagaacacgaagggtaataccctaaaggaggattggatcgcctacatctccagggaaattctgagaggtctggctcacttgcatatccaccacgtgatccaccgtgatattaaggggcagaacgtcctgctgacagaaaacgccgaagtgaagctagtagacttcggagtttcagctcagctcgatagaacagttggtaggcgtaacacatttatcgggacaccctactggatggccccagaggtaatagcctgcgacgagaatcctgacgccacttacgactatagaagcgacttgtggtcatgcggtattaccgctatagaaatggccgaaggagcaccccctctctgtgacatgcaccctatgcgggcacttttcctgattccgagaaacccccctcccagactcaagagcaagaaatggagtaagaaatttttcagctttatagaagggtgtctggtcaagaattacatgcaaagaccttcaaccgaacagctgcttaagcatccatttattagggatcagccgaacgagcgtcaggttcgtatccagctgaaggaccacattgacagaacccggaagaagcggggagagaaagacgagacggagtatgaatacagcggctcagaggaggaggaagaggaagttcctgagcaggaaggggagcctagcagcatcgtgaacgtgcccggtgagtcaaccctgaggcgggacttcctccgtctgcagcaggagaacaaagaacgaagtgaggccttgagacggcaacagctgcttcaggaacaacaactacgggaacaagaggaatataagagacagctccttgcggagcggcagaaacgcatcgaacagcagaaggagcagagacgcaggttggaagagcagcagaggagagaaagagaggctagaaggcaacaggaaagagagcagagaagacgtgaacaggaggaaaaacgcagactcgaagaattggagaggaggaggaaggaggaagaagagaggcgcagagccgaggaagaaaagagacgggtcgagcgcgaacaggaatacatccggaggcagcttgaggaggaacagcggcacctggaggtgctacagcagcagttactgcaggaacaagccatgctgctgcacgaccatcggcgacctcaccctcagcatagtcaacagccccctccaccacagcaggagaggtcaaagccctcatttcacgcacccgaacccaaggcacactatgagccggctgatcgcgcaagggaggtggaggatcggttcagaaaaacaaaccacagcagccccgaggcccagtcaaagcagacagggagagtactggaacctccggtccccagtaggtcagagagcttctctaatggcaattccgagtctgtgcatccagcactgcagaggccggctgagccgcaggttcctgtgcggaccacatctcgttcgccagtcttgtccagacgcgactcccccttgcagggatcgggacagcaaaactcacaggcgggacagcggaattccacctctatagaaccaagactcctgtgggagagagtcgaaaagctcgttccacgcccagggagtggttccagctctggctcttcgaactccgggtctcagcctgggtctcaccccggaagtcagtcaggaagcggggaacggttcagggttcgctcctccagcaagtccgagggctcgccctcccagcggctcgagaatgcggtcaaaaaaccagaagacaagaaggaggtttttagacctctaaaacctgcggatctgacggctctggccaaggaacttcgagccgtggaagatgtgaggcctcctcataaagtcacagactactcaagcagcagtgaagagtccggcaccactgacgaagaggatgatgacgttgagcaagagggagcagatgaatccacctcagggcctgaggatacccgggcagccagttcactcaacctgtccaatggagaaacagagtccgtgaaaacaatgattgtgcacgacgacgtagaatctgagcctgccatgaccccttcaaaagaggggacccttattgtccggcaatctacggtggaccagaagagagccagtcatcacgaaagcaacggcttcgcgggacgcatacacctcctccccgacttgttgcagcagtctcattctagttccacgtcaagtacctcgagtagcccatcctcatcccagcccacccccaccatgagcccacagaccccccaggataagctgaccgctaacgaaacccagtccgccagtagcacactgcagaaacacaagagcagctcctcattcaccccattcattgaccccaggctgttgcagatctcccctagcagtggcaccaccgtgacaagcgtggtggggtttagctgcgatggcatgaggcccgaggccatccggcaggaccccacccggaagggctccgtggtcaacgtcaatccgaccaatacaaggccgcagagtgacactccggaaatcagaaagtacaaaaagcgctttaacagtgaaattctgtgtgcggctctgtggggcgtgaacctccttgtgggaacggagagtgggctgatgttgctcgacaggagtggacaaggcaaggtataccccctcattaaccgcagaagatttcagcaaatggacgtgctcgaggggttgaacgtgctagtgacaatcagcggaaaaaaggacaagctaagagtttactatctgtcatggctgcgaaataagatactgcacaatgatccagaggttgaaaagaagcaggggtggaccactgtgggcgatctcgaggggtgcgtgcactataaggttgttaaatacgagagaatcaagttcctcgtgatcgcattgaagtctagcgtggaagtgtatgcttgggccccaaagccctaccataaattcatggccttcaagtctttcggcgagctggtgcacaaacctctactcgttgacttgactgtggaagaaggtcaaagactcaaagtcatttacgggagttgcgccggatttcacgcagtggacgtggatagcggttcggtgtacgatatttatctgcccacacacatccagtgttcaatcaagccccacgccattattatcctgccaaacaccgacggcatggagctgcttgtgtgttatgaagatgagggtgtatacgtgaatacctacggcagaatcaccaaagacgtagtgttacaatggggcgagatgcctacctccgttgcatatatccgctctaaccaaaccatgggatggggcgaaaaagccatcgagatcaggtccgtggaaaccgggcatctggatggggtctttatgcataagcgggcacagaggcttaaattcctgtgtgaacggaatgataaggtctttttcgccagtgtgcggtcaggcggtagcagtcaggtctactttatgacattaggaaggacttctttactgagttggtag

SEQ ID NO: 30088 - DNA, 363 bp, synthetic construct
  source 1..363: mol_type = other DNA; note = Synthetic coding sequence
gcactgcagatctccgagaacctgttctctaataaggttttgaatgcactcaagccggagaaagacgttgatggcgtaactgacataaacttgggcaaactggtgcggggagacgcccatgagtgctttgtgtctccagtggctaaagccgtgatagagctattagagaaatccgtgggggttaatcttgatggaaaaaagatcctggtagtgggcgctcacggcagcctggaggccgctctccaatgtctgttccagagaaagggctccatgacaatgtccattcaatggaaaactcgacagttacaaagcaagactgagagccgatcagtgacaagattggagtgtcgccgagtaatctag

SEQ ID NO: 30089 - DNA, 1866 bp, synthetic construct
  source 1..1866: mol_type = other DNA; note = Synthetic coding sequence
atggtgtccattctgtcaagtttcgaatctagactaatgaagcttgagaattcaataatcccagttcacaagcagactgagaacctacagcggctgcaggaaaatgtggagaaaaccctgtcttgtttggatcacgtcattagctactatcacgtcgcctcagacacagaaaagataattagagagggccctacgggaaggctggaagagtatttggggagcatggccaaaattcagaaagccgtggaatacttccaggataattcgcccgattcccccgaattgaacaaggttaagctcctcttcgagcggggtaaggaggcgctggaaagcgagttccgatctctgatgactagacatagcaaagtggttagcccagttctgatacttgacctgatatccggcgacgacgacctcgaggcccaggaagatgttaccctggaacacctccccgagtcagtactccaggatgtgataaggatcagccgttggctggttgagtatggcaggaaccaggattttatgaatgtgtattaccagatccggtctagccagctggaccggagcattaaaggactcaaggagcattttcataagtcatcctccagctctggagtgccatactccccagcaatccccaataagcggaaagacacaccaactaagaaacccgttaagaggcctggtacaatacgtaaagctcagaatctgctgaagcagtacagccagcatgggttggacggcaagaagggaggatccaatctgatcccccttgaaggacgggacgatatgcttgatgtggagacagacgcttacattcattgtgttagcgcgttcgttaagcttgcccagagtgagtatcagctgctagcggatatcattccagagcatcatcaaaaaaaaacattcgacagcttgatccaggacgccttagatggcctcatgctggagggagaaaacatcgtcagcgccgctcgaaaggcgatcgtgcgacatgatttctctactgtcctgactgtgtttcccatcctccgtcacctcaaacagaccaaaccagagtttgatcaagtgcttcagggaaccgccgcaagcacaaagaacaaactcccaggactgataacatcaatggagaccatcggcgctaaggccctagaggatttcgctgacaacattaagaatgacccagacaaagagtataacatgcccaaagacggcaccgttcacgagcttacctccaacgccatcctgttcctccagcaattgcttgattttcaggaaactgctggggctatgctggcatcacaagggaaggtcctgggaaacctgcaactgaatctgttgtctaagtcaaaagtctatgaagaccctgcactgagcgctatcttccttcacaacaattataactatatcctgaaatctctggaaaaatccgagctcatccagttagtagccgtgacacagaagacagctgagcgttcttaccgagagcatatcgagcagcagatacagacctatcaacgcagctggctcaaggtgactgactatattgctgaaaaaaatctccctgtattccaacccggagtgaaacttcgcgacaaggagcgccagattatcaaggaacgctttaaaggatttaatgacggcctggaagagctgtgcaaaattcaaaaggcctgggccattccagatacagagcagagagatcgcatccgacaagcccagaaaacgatcgtaaaagagacttacggggcttttctacaaaagttcgggtccgtgccctttacgaagaaccccgagaaatatatcaaatatggcgtggaacaggttggagacatgattgacagactattcgacacttctgcctag

SEQ ID NO: 30090 - DNA, 1344 bp, synthetic construct
  source 1..1344: mol_type = other DNA; note = Synthetic coding sequence
atggacttcctgctgggcaatccattttccagccctgtagggcagcgcattgagaaagccacagacggcagcctccaaagcgaagattgggcactcaacatggaaatctgcgacattatcaatgaaactgaggagggacccaaggatgccctccgcgctgttaaaaagcggatcgtaggtaacaaaaacttccacgaggtgatgctggccctcactgtgcttgagacatgcgtgaaaaattgcggccaccggttccatgtcctggtggcctcgcaggatttcgtcgaaagcgtactagtgaggacgatattgcccaagaataacccacctactattgtgcatgataaggtcttaaacttgatccagacagtgtttaacagcgaaacacaatctggacaggactccgtcgggactgactcaagccagcaggaagacagtggacagcatgcagcacctttgccggctccaccaatcctgtccggcgacacacctatcgctcccacaccagaacagatcgggaaactcagatcagaattagaaatggtctcgggcaacgtgagagtcatgtccgaaatgctgacagagctcgttcccactcaagctgagccagccgatctggaactgctccaggaactcaatagaacctgccgggcaatgcaacaaagagtcctcgagctgataccccaaattgccaatgaacaattaactgaagaactgctcattgtaaacgacaacttgaacaatgtcttcctccgccacgagaggtttgaaagatttaggaccgggcaaaccaccaaggctcctagcgaggccgagccagcagccgacctgatcgatatgggccctgacccggcagccaccggcaacctgagtagccagctggcaggcatgaatctcggctcttcgagtgtgcgggcagggctgcaatccctagaggcctctggtcggctggaggacgagtttgacatgtttgctctcacaaggggttcctcattggcagaccagagaaaagaggtcaagtatgaagctccacaggccactgacgggctcgctggagctttagatgcacggcagcagagcacaggtgccattcccgtcacacaggcttgcttgatggaggatattgaacagtggttatctacggatgtcggtaatgacgctgaggagccgaaaggcgtgaccagcgaggagttcgacaagttcctcgaggagagagccaaggctgccgatcgtctgccaaatctctcttctcccagcgctgaaggaccacccggaccaccctcaggtcctgccccacgcaagaagacgcaggagaaagacgacgacatgctgttcgcactgtag

SEQ ID NO: 30091 - DNA, 2103 bp, synthetic construct
  source 1..2103: mol_type = other DNA; note = Synthetic coding sequence
atggcaaccatgatacccccagtcaagctcaaatggctggagcatctcaactccagctggattaccgaggattccgagtctattgcaaccagggagggcgttgccgtcctgtactctaaactggtttctaacaaggaggtggtgccccttcctcaacaggtgctgtgcttgaaggggcctcagttgcccgattttgagagggagagcctgtcctcggatgaacaggatcactacttggatgcactcttaagcagccagctggcactggcaaaaatggtgtgcagtgactctccgtttgcaggagctttaagaaaacggctgcttgtcctgcagcgggtcttttacgccttgagcaataaatatcacgacaagggtaaggttaagcagcagcaacacagccccgaaagctcctccgggagtgctgacgtgcacagcgtctccgagcgtcctcggtcatctacagatgctctgatagaaatgggagtgcgaacaggactttctctgctttttgccttactcagacagagttggatgatgccagtgagcgggcctggcctttctttgtgcaatgacgtcattcacacggctattgaagttgtgagcagcctgccgcctctcagcctcgccaacgaaagtaaaattccgcctatggggctcgactgcctgagccaggttacaaccttcctgaaaggggtgaccatacccaatagcggcgctgatacgctggggaggaggctagcttctgaactcttgctcggcctggcagcccagagagggtcgctgcgatatctattggaatggatcgagatggccctaggggctagcgccgtagtgcacactatggagaaggggaaattactgtcctctcaggagggaatgatcagctttgactgtttcatgactattctaatgcagatgcggaggtctctcatctccgagaaccaggactccgcagacgtcgaccctcaggagcatagctttaccagaactatcgatgaggaggctgagatggaagagcaggctgagcgcgatagggaagagggccaccccgaaccggaagacgaggaggaagaaagggaacatgaggttatgacagctggcaagatcttccagtgtttcctgtccgctcgcgaagtcgccaggagccgcgatagagacaggatgaactccggcgctgggtcaggcgctcgggctgacgaccccccaccacagtcacaacaggaaaggcgcgtttctaccgatttgcccgagggccaggatgtgtacactgctgcatgcaactctgtcattcaccggtgtgcactgctgatcttgggcgtctctccggtgatcgatgaactccagaagagacgggaagaggggcagctgcagcagccttcgacctccgcctcagagggcggtggcctgatgactaggagtgaatcattaactgccgagtcccgactcgtccataccagccctaattatcggctgatcaagagtaggagtgaatccgacctctcccagccggagtccgacgaggagggatatgctttgagcgggcgaaggaacgtcgatttagacctggcagcaagccatagaaaaagaggaccaatgcatagccagcttgagtcactttctgattcgtgggcaagactcaaacacagccgtgactggctgtgcaacagttcgtatagttttgaatcagactttgatttaacaaagagcctgggagtccacaccctcatcgaaaatgtagtgtcctttgtttccggcgatgtcggaaacgccccaggcttcaaagagcctgaagaaagcatgagcactagcccgcaggctagtataatcgctatggaacagcagcagctccgagctgagctccgccttgaagccttacatcagatcctcgttttgttgagcggtatggaagagaagggtagtattagcctggccggttcgaggctttccagtggtttccagtctagtacattactgacctccgtgaggcttcaattcttggccggttgtttcggattgggaacagtcggccacacaggtggtaaaggagaatccggcagactccatcactatcaggacggaatcagagctgccagggggtactag

SEQ ID NO: 30092 - DNA, 537 bp, synthetic construct
  source 1..537: mol_type = other DNA; note = Synthetic coding sequence
atggccgacagggcggctgcagagcgagcatgcaaagacccaaacccaattattgacggtcgcaaagccaacgtgaacctggcctacctgggagctaagcctcgtatcatgcagccaggttttgcattcggagtccagcagcttcacccagccctgatccagcggccttttgggatacctgcccactacgtgtacccccaagcctttgtccaacccggagtagtgattcctcatgtgcagcccactgctgcagcagctagcaccactccttacattgattacaccggcgcagcctacgctcaatatagcgcggctgccgcagctgccgctgcggctgcagcctacgatcagtatccttatgccgcatcccctgccgcagctggctacgttaccgcgggagggtacggctatgcagttcagcagcccatcaccgcagccgctccagggaccgccgcagccgctgctgctgctgcggcagccgcagccgcttttgggcaataccagccacagcagcttcaaactgatcggatgcagtag

SEQ ID NO: 30093 - DNA, 579 bp, synthetic construct
  source 1..579: mol_type = other DNA; note = Synthetic coding sequence
atgggaaagggatgtaaggttgtagtgtgcgggctgctgagcgttggaaaaactgccatcctagaacagctcttatatggaaaccacacaatcggaatggaggattgcgagactatggaggacgtttacatggcctccgttgagaccgatagaggtgttaaggagcagttgcatctttatgacacgcggggattgcaggagggagtggaactgcccaaacactacttctcattcgccgatggatttgtgctcgtgtattccgttaataatctggagagtttccaacgcgtggaactgttaaagaaggagattgataaatttaaagacaaaaaggaagtcgccatcgtcgtgctggggaataagatagacttgagcgaacaaaggcaggtagatgccgaggtagcacagcagtgggctaaatctgaaaaagtccgtttatgggaggtgaccgtcacagatcgtaagaccctgattgaaccattcaccctcctcgcctccaaactgtctcagccccagtcaaaatctagttttcccctccccggacgcaagaacaagggaaacagtaactctgaaaattag

SEQ ID NO: 30094 - DNA, 555 bp, synthetic construct
  source 1..555: mol_type = other DNA; note = Synthetic coding sequence
atgaatagaagccagcctggcctgctcagaaccgatcccgtaccagaggaaggtgaggatgtagccgctactatctccgcgacggaaactcttagcgaggaagaacaggaggagctacgacgcgagctggctaaggtcgaggaggagatccagaccttaagtcaagtactcgccgcaaaagaaaaacatctcgctgaaattaagcgaaagctcggcatcaatagcttacaggagctgaaacagaatatcgcaaaaggctggcaggacgtgacggcaacaagcgcctacaaaaagacatccgagacgttgtcccaggctggccaaaaggcctctgctgcttttagttccgtcggtagcgttattaccaagaaactggaagatgtgaaaaactccccaactttcaagtctttcgaggaaaaggtggagaatcttaagtcaaaagtggggggtacgaagcctgccggaggagattttggcgaagtattgaactcagccgcaaacgcctccgcaacaacaactgagccactacctgaaaagacacaagagtctctgtag

SEQ ID NO: 30095 - DNA, 1620 bp, synthetic construct
  source 1..1620: mol_type = other DNA; note = Synthetic coding sequence
atggccaccagtgcacctctgcggtccctggaagaggaagtaacctgtagcatttgtctcgattatctcagagacccagtgaccatcgattgtggacacgtattttgcaggtcatgcaccacggacgtgagacctatctccggcagccgtcctgtgtgccctctctgcaagaaaccttttaaaaaggaaaacattagacccgtttggcagctggccagtctagtggaaaatattgagaggctgaaggtagacaaaggaagacagcctggtgaggtgacccgcgagcagcaggacgccaagctttgtgagagacatagggagaagctgcactattactgcgaggacgatggaaagctactatgcgttatgtgcagagaaagtcgagaacaccggcctcacacagctgtccttatggagaaagcggctcagccccaccgtgaaaagattctgaatcaccttagcaccctccggcgagaccgtgacaagatccaagggttccaggccaaaggcgaagctgatatcctcgccgctctcaaaaaactgcaggaccaacgccagtatattgtcgcagagtttgagcaaggccaccagtttctgagagagcgagaagaacatcttcttgaacagctcgctaaactggagcaagagctgacagaagggcgtgagaagtttaaaagccgcggagtgggagaattagccagactggcgctggtgatttccgagctggagggaaaggcccagcaaccagctgcggaactcatgcaggatacacgagactttctcaacagatatcctaggaaaaagttctgggtaggcaaacctattgccagagtggttaagaaaaagactggcgagttttcagacaagttactgagcctccagaggggattaagagaatttcagggaaagctgctgagagatctggaatataagaccgtctcagtgaccctggatcctcagagcgcatccggatatttacagctgtctgaggactggaagtgtgtcacctatacctctctctataaatcggcatatttacatccacagcaatttgactgtgaacccggtgtccttggttctaaggggtttacctggggtaaggtgtattgggaggtagaggttgagagagagggatggagcgaagatgaggaagagggagatgaggaagaggaaggggaagaggaggaggaggaagaggaagccggatatggggacggctatgatgactgggagaccgacgaagacgaggaatccctgggcgacgaagaagaagaggaagaagaagaggaagaggaggttctggagagctgcatggtgggagtggcgcgtgacagcgtaaagaggaagggagatctgagtctgagacccgaggacggagtgtgggccctccgtctgtcaagctccggcatctgggctaacacctcgcccgaagcagagctctttccagcgttgcgccctcgtcgagtcggtatagcgctcgactatgaaggcggaacagtaaccttcaccaatgctgaatcacaggagctgatctacacattcactgccactttcacaagaaggttggtaccgtttctgtggctcaagtggcccggaacaaggctcctcctccggccttag

SEQ ID NO: 30096 - DNA, 612 bp, synthetic construct
  source 1..612: mol_type = other DNA; note = Synthetic coding sequence
atggagccacctatggagccgtccggaggcgaacaggagccgggtgccgtcaggttcctcgacctaccttgggaagacgtgctgctgccacacgtgctgaatcgggtgcctctcagacagctgctgagactgcagagagtgtctagagccttccggtcactcgtgcagctgcacttagccggactgcgcaggttcgacgccgcacaagttggaccacagatccccagagccgctttggctaggttgctccgcgacgccgaggggcttcaggagttggctctcgccccttgtcatgaatggttgtcagacgaggacctcgtaccagttctcgcccgaaatccacaattgagaagcgtcgcccttggtggctgtggccagctcagccgtagggcacttggtgctctggccgaggggtgccctcgcctccagcggcttagcctggcacactgcgattgggtcgacgggctggcactgcgtggtctggcagacaggtgccctgcactagaagaactcgacctcacagcctgccgccagctcaaagacgaggcgatagtgtatctcgcccaacgtaggggagccggacttcgaagcctctccctagccgtgaactag

SEQ ID NO: 30097 - DNA, 1824 bp, synthetic construct
  source 1..1824: mol_type = other DNA; note = Synthetic coding sequence
atggcccgaggattgggcaaggcctccgggtttccagcaggaccgagtggcgcagagctaccagcatcagggagacggaggggaccattgattagcctgtttcccgcagtcctggccagcgaggccgcaatgtcctatcccgctgatgattatgagagcgaagccgcttatgacccctatgcgtaccccagtgactacgatatgcacactggcgatcccaagcaggatctcgcttatgagcgccagtatgagcagcaaacttaccaggtcattcctgaggtgattaaaaattttattcagtatttccacaagaccgtttctgatctgatcgatcagaaggtctacgagctgcaagccagccgagttagttcagacgtgattgaccagaaagtctacgaaatacaggacatttatgagaactcatggacgaagctgaccgagaggttttttaagaacaccccttggcctgaagcagaggctattgcgccacaggtggggaacgacgccgtttttctgatcctgtacaaagagttgtattaccgccacatctatgcgaaggtctcaggtggaccatccctggaacagaggtttgaatcctattacaattactgcaatctgtttaattacatcctgaacgccgacggaccagctcctttggagctacccaaccagtggctgtgggatatcatcgatgaattcatttaccagtttcagtcgttcagccagtaccggtgcaaaactgctaaaaaaagcgaagaggagatcgattttctgcgctccaatccgaaaatttggaacgttcactccgtcctcaacgttctgcactcgctggttgataagtctaatatcaacaggcagctggaagtctatacttccggcggagaccctgaatctgtggccggagagtacggcagacactccctctataagatgctggggtatttctccttagtaggacttctgcgtctccactccctgctgggcgactattaccaggccattaaggtccttgaaaacatcgagttgaacaagaagtcaatgtatagcagagtgcctgaatgccaggtcacaacttattactacgtcgggtttgcctacctcatgatgagaaggtatcaggacgcaattcgcgtgtttgccaacattctgctctatatccagagaacaaagagcatgttccagagaacaacgtacaagtacgaaatgatcaataagcaaaacgagcaaatgcatgccctactagcgatagcactgacaatgtatcctatgagaatcgacgaatcaatacacctgcagttgagagagaagtacggcgataagatgctgcgcatgcagaaaggggacccacaggtctacgaggagctgttctcttatagttgccctaaattcttaagccctgtggtccccaattacgataacgtgcaccccaattatcacaaggaaccattcctacagcagttgaaggtgtttagcgacgaagtacagcagcaggctcagttgagcacaattcgctcatttctgaaactctacaccacgatgccagtcgcaaagttagctggcttcctcgacctcaccgaacaggaatttaggattcagctgctagtgttcaaacacaaaatgaagaacctggtctggacctctggcatctcagctctggatggtgaattccaatcagcatcagaagtggatttttatatcgataaggacatgatccatattgccgataccaaggtggcccgaagatatggagacttttttattagacagattcataagtttgaggagctgaaccgcacactcaaaaagatgggacagagaccgtag

SEQ ID NO: 30098 - DNA, 1308 bp, synthetic construct
  source 1..1308: mol_type = other DNA; note = Synthetic coding sequence
atggccgcttccagcttggaacagaagttatcacggctcgaagctaaattgaagcaggagaaccgagaagccaggcgcagaatcgacctcaaccttgatatcagtccacagagaccccgaccaataattgtcatcacactgagccccgcaccagccccttctcagagggccgctctccagctcccccttgccaacgacgggggttcacggagtccaagctctgagtcgtcaccgcagcacccaacccccccagctaggccccgtcatatgcttggattacctagtacactgttcacaccgcgatccatggagtcaattgaaatcgaccagaagctgcaggagatcatgaagcaaaccggctatctcactattgggggacagaggtatcaagcggagatcaacgacctggagaacctgggggagatgggttctgggacatgcgggcaggtctggaaaatgcgtttccgcaaaacaggacatgtgatcgccgtgaaacagatgaggcggagcggcaacaaagaggagaacaagagaattctaatggacttggatgttgtgctgaagtcacacgactgcccttatattgtccagtgcttcggaacatttattactaatacagacgtgtttattgccatggaattgatgggaacctgcgctgagaagttgaaaaaaagaatgcagggccctatccccgaacggattttgggaaagatgacagttgctattgtgaaggctctgtattatctcaaggaaaagcacggagtcattcatcgcgatgttaaaccaagcaacatactgctcgacgaaagaggccagattaaactttgcgacttcggcatctctggcaggcttgtcgactcaaaggccaagactcggtctgcaggatgtgcggcatacatggcccctgagagaattgatcccccagacccgacgaaacccgattacgacatcagagcggacgtttggtctctgggcatttcacttgttgagctagcaaccggccagttcccctacaagaactgtaaaacggacttcgaagttctcacaaaggtgcttcaggaagagcctcctctgctgcctggccatatggggttcagtggagatttccagtcttttgtcaaagactgtctcacaaaagatcaccgcaagaggcccaaatacaataaactcctcgaacacagttttattaaaagatatgaaaccctcgaggtggacgtcgctagctggttcaaggacgtgatggcgaaaacagaatcacctcgtacaagcggagtactgagccagccacacttgccctttttcaggtag

SEQ ID NO: 30099 - DNA, 3006 bp, synthetic construct
  source 1..3006: mol_type = other DNA; note = Synthetic coding sequence
atggcctcaagccctctgcccggtccaaacgatattcttcttgcctctccctctagcgcgtttcagcctgacacactcagccagcctagaccaggccacgctaacctcaaacctaaccaggttgggcaagtaattttgtatgggatacctatcgtatccctcgtaatcgatggtcaggagagactgtgcttggcgcagatttccaatactctgttgaagaacttttcatataacgaaatccacaaccggagagtcgccctagggatcacttgtgtgcagtgcactcccgtccagttagagattctccgcagagccggtgccatgcctatatcctctcgcaggtgtgggatgatcaccaaacgagaggctgagcgcctttgcaaatccttcctgggcgaaaatagacctcccaaactaccggataattttgcctttgacgtatcacatgaatgcgcctggggatgcagaggaagcttcatcccagcaaggtacaattccagtcgcgctaaatgcatcaaatgcagctattgcaatatgtatttctcgccaaacaagttcatctttcattcccaccgcacaccagacgctaagtatacccagcccgatgctgcaaattttaatagttggcgcagacatctcaagctgacagacaaaagtccccaggacgaacttgtgttcgcatgggaggatgtcaaggcaatgtttaatgggggtagcaggaagcgggcacttccccagcctggagcccaccctgcttgtcacccattgtcctcagtgaaggccgcagccgttgccgcagcagcagcggttgcaggaggaggcggtctactgggaccccacctgctcggcgcaccaccacctccccctcccccaccaccaccccttgcagagctcgccggagccccacacgcccaccacaaacgacctcgctttgacgatgatgacgatagcctgcaagaggctgcggttgtcgccgctgcttccttatccgcagctgctgccagtttgtccgtggctgcagcgtcggggggagccggaaccggcggaggaggcgctggcggtggttgcgtggccggtgtcggtgtgggagctggagctggtgctggtgctggcgcaggcgctaagggacccaggtcatacccagttatccctgttccctctaaaggtagctttgggggagttctacagaagttccctggatgcggcggactcttcccccatccatatacctttcccgctgctgccgctgcattttccttatgccataagaaagaggatgccggagcagctgctgaggcattgggaggagccggagctgggggagccggtgccgcaccaaaagctggtctcagtggcctcttctggccagctggacgaaaggacgccttctatcctcctttctgcatgttttggccacctcgcacccccggaggtttacctgtccctacttacctgcagccacccccacagcctccctcagccctggggtgtgctctgggcgagagtccagccctattgcgccaggctttcctggatttggctgaacccggaggcgctgccggtagcgcggaggcggcaccaccccctggccagccccctcaggtggtcgccaacggccctgggagcggccctccgccaccagctggcggagctggttctcgcgatgctctctttgagtcacccccagggggttccggcggtgactgttccgcaggctccacacctccagccgactctgtggcagcagccggtgctggagccgctgctgcaggctctggaccagcgggttcccgggtcccggctccgcatcacccccatctcctggaagggcgaaaggctggtggcggaagctaccaccatagtagcgcatttcggccagtaggcggtaaagacgacgccgagtcactggcaaagctccacggagcttctgcgggtgcacctcatagcgcacagacccacccccaccatcaccaccatccgcatcaccatcaccatcaccatcatccaccccagccgccttcccctcttctactccttccccctcagcccgatgagcccggaagcgaacggcatcatcctgccccacctcccccaccccctccccctccccctccgccattggcccagcatcctcatcatcggggtctgctgtctccagggggaacatcctgctgctatcctagcgaagacagcagcgaggatgaggacgacgaggaggaggagcaagaggtggacgtggaagggcataagcccccagagggcgaagaggaagaagagggacgcgaccctgacgatgacgaggaggaagacgaggagaccgaagtactcctaggcgatcccctggtcggcggaggaaggttcctgcaggggagaggtccctcggagaagggaagttcccgggatcgggctccagcagtagctggggcattccccctgggtttgaactcctcccggcttctgcaggaggacgggaaactcggagatcctgggagtgatcttcccccacccccacctccccctctcgcccctcagaaagcatctgggggaggatcttctagtccagggtctccagttcaccatcccagtttagaagaacaaccttcttataaggattcgcaaaagacaaaagagaataaccaggttatagtcagtactaaggacgataattccttctcagacaagaacaaggaacattcgttcttcatcactgattcagacgcttcaggaggagacttttggagggaacggagtggcgaacacacacaagaaacgaactccccccactctctcaaaaaggatgttgagaatatgggtaaggaggagctgcaaaaggtcctttttgaacagatcgatcttcggcgtagactggagcaggaattccaggtgttaaagggaaatacaagcttccctgtatttaataactttcaggatcagatgaagagggagctcgcctatcgggaggaaatggtccagcagttgcaaattgtttcctgcattagcacctag

SEQ ID NO: 30100 - DNA, 198 bp, synthetic construct
  source 1..198: mol_type = other DNA; note = Synthetic coding sequence
atggctatggccccaagccctagcctagtgcaggtgtatacttctccggcagccgtcgcggtttgggaatggcaggatgggttggggacgtggcacccatatagtgcgacagtatgtagtttcattgaacagcagttcgtgcagcagaagggtcagaggtttgggctagggagccttgcccacagcattccactgtag

SEQ ID NO: 30101 - DNA, 1041 bp, synthetic construct
  source 1..1041: mol_type = other DNA; note = Synthetic coding sequence
atgatctctcgaccggcatggctgtggggggctgagatgggggcaaacgagcacggagtgtgcattgcaaatgaggccatcaacacaagggaaccagcagcagaaattgaggccctcctggggatggaccttgtgaggctgggattagaacgtggtgagacagctaaagaggccttggacgtgatcgtctccctcctagaggaacatggccagggagggaattacttcgaggatgcgaatagctgtcattcgttccaatctgcgtacctgattgtggacagggacgaggcctgggtactggaaaccatcggtaagtactgggccgctgaaaaggtgacggaaggtgtcagatgcatctgcagccaactgtctctgacgaccaaaatggacgccgaacacccagagctccggtcctacgctcagagccagggctggtggaccggagagggcgagtttaactttagcgaggtgttttccccagtcgaagaccacttagattgcggagccggaaaggactctcttgagaagcaggaagagtcgatcactgtgcagactatgatgaatactttgcgggacaaggcatcgggggtgtgtattgatagtgagttttttctaacgactgccagtggtgtgagtgtgctgccccagaacagaagttccccgtgcattcactatttcactggaacccctgatccctcgcgcagcatctttaagccatttattttcgtggacgatgtcaagctcgtgcccaaaacgcagagtccatgtttcggcgatgatgatcccgcaaaaaaggagcctcgctttcaggagaaaccagacagacggcatgagctgtataaggctcacgagtgggctcgcgctatcatcgaatctgatcaagaacagggcaggaaactgcgctccactatgttggagctggaaaaacagggcctcgaggctatggaggaaattttgacgtccagtgaaccactcgaccctgcggaagttggcgatctcttttatgattgcgtagacacggagattaaattttttaaatag

SEQ ID NO: 30102 - DNA, 1620 bp, synthetic construct
  source 1..1620: mol_type = other DNA; note = Synthetic coding sequence
atggcaacttctgctcccctgcggtccttagaggaagaagttacctgttcgatctgcctggattaccttcgtgatcctgtcactatagactgtggacacgtcttctgtcggtcttgcaccacagacgtgaggccaatcagcggcagcagacccgtgtgccccctttgcaaaaaacccttcaagaaggaaaacattcgccctgtctggcaactggctagtctggtggagaacatcgaaagactcaaggtagataaaggaaggcaacccggagaggtcactagagaacagcaggatgctaagctctgcgaaagacaccgagagaagctccattactattgtgaggacgatggcaaactgctatgcgtaatgtgccgtgagtctagagaacaccggccacatactgctgtgctcatggagaaggcggcacaaccccacagggagaaaattctgaaccatttgtcaacattacgcagagatagggataaaatccagggctttcaggccaaaggagaggccgacatactggctgccctcaaaaagctgcaggatcagagacagtatatcgttgctgagttcgagcaaggacatcagtttcttcgggagcgcgaagagcacctccttgagcagctcgccaagctcgagcaagaacttactgaaggcagagaaaagtttaagtcacgaggagttggggagttagccaggcttgctctcgtgatttcagaactggaaggcaaagcccagcaaccagccgcagaattaatgcaggatactcgggattttctaaaccgctacccaaggaaaaaattttgggtcgggaagccaatcgcgagagtcgtgaagaaaaagacaggagaattctccgacaagttgctgtccttgcagaggggcctccgcgaatttcaaggtaagctgctccgagacttggaatacaaaacggtcagcgtaacgttggatccccaatccgcgtccggctacctgcagctgagcgaagactggaaatgtgtcacctatacttcattgtacaagtccgcttacctgcacccacaacagttcgactgcgaacccggagtcttaggtagcaaaggttttacctggggcaaagtatactgggaagtcgaggtggagcgcgaggggtggtccgaggacgaagaagaaggtgatgaagaagaggagggtgaggaggaagaagaggaggaagaagccggatacggcgatggatacgacgactgggaaacagatgaagacgaggaaagccttggggacgaagaggaggaggaggaagaggaagaggaggaagttctcgaatcttgcatggttggtgtggcacgagactcagttaagcgtaaaggggatttaagcctaagacctgaagacggagtctgggccttacggctctcctctagtggcatttgggctaacaccagcccagaagccgaactatttcctgcgctgcggcctaggagggtgggtatcgcgctagattacgagggaggcactgtcaccttcacaaatgctgagtcccaggagctgatctatacattcactgcaacgtttaccagacggctcgtgcctttcctgtggctgaaatggcctggtacacggttgttgctccgcccatag

SEQ ID NO: 30103 - DNA, 390 bp, synthetic construct
  source 1..390: mol_type = other DNA; note = Synthetic coding sequence
atggccgagctgatacaaaagaaactccagggtgaagtcgaaaaatatcagcagctgcagaaggacctatccaagagcatgtccggcaggcagaaattggaggcgcagctgaccgaaaacaatattgttaaggaggaattggcactgctggatggatcaaatgtcgtgtttaagctcttgggaccagtgttggtgaagcaggagctgggcgaagctcgcgctaccgtcggaaagaggctcgactatatcaccgccgagatcaagcggtacgaatctcagctccgtgacctcgagcgtcaatctgagcagcagcgcgaaacacttgcacagcttcagcaagagtttcagcgtgcccaggcagccaaagcaggtgcgccaggaaaggcttag

SEQ ID NO: 30104 - DNA, 1740 bp, synthetic construct
  source 1..1740: mol_type = other DNA; note = Synthetic coding sequence
atgagcgcggcaaatcccgagacacctaacagcaccatttcacgcgaagctagtacccagagttcgtctgccgcagcctcacaggggtgggtcttgccggagggaaagatcgtcccgaacacagtcttcgtcggaggcatcgacgccagaatggacgaaaccgagatcggttcttgctttggaagatatggcagtgtcaaggaggtgaaaataatcactaacaggaccggtgtatcaaaaggctatggctttgtgagctttgtgaacgatgtggatgttcagaagatcgtcggttctcagattcacttccacggcaaaaagctgaagctcggcccagcaatccggaagcagaagctgtgcgcacgccacgtacaaccacgacccttggtagttaacccaccaccacctccccagtttcagaatgtttggagaaaccccaacaccgaaacatacttacagccacagataacaccaaatcctgtgactcagcatgtgcagtccgccgctaaccctgaaactcccaatagcaccatctcccgagaagcatctacgcagtccagcagcgcggcagcaagccagggctgggttcttcccgaagggaagattgtgccaaacactgtgttcgtgggagggattgacgccagaatggacgaaactgaaatcggatcctgcttcggtcggtatgggagcgtgaaggaagtgaaaataattaccaaccggactggagtcagtaagggatatggcttcgtgagttttgtgaacgatgtggacgtgcagaaaatagtggggtcccagatacacttccacggcaagaaacttaagctcggacccgctatcaggaaacaaaagctttgcgcccgtcacgtgcagcctcggcctcttgtggtcaacccaccccctcccccacaattccaaaacgtgtggcgcaaccccaacactgagacatatttgcagcctcagattacacctaacccagttacccaacacgtgcaggcatattccgcttatccgcatagccccggacaagtaatcaccggttgtcagctactggtctacaactatcaggagtatcctacctatcccgacagcgccttccaggtgaccactggttaccaactgcctgtgtataattatcagccatttccggcatatccccgatccccctttcaggtgacggcaggttaccaactgcctgtatacaactatcaggcattccctgcttatcccaattctccatttcaggtagccacgggataccaatttcccgtgtataactatcagcccttcccagcctaccctagctcaccgttccaggtaaccgcaggttaccagctgccagtgtataactaccaggcattccccgcatatccgaattcaccatttcaggtagctaccggctaccagtttcctgtgtacaattaccaggcctttcctgcttatccgaatagcccagttcaggttacaacgggttaccagcttcccgtctacaactaccaagccttcccagcttacccaagctcgcccttccaggtaacaacaggttatcagctccccgtgtacaactaccaggcatttcctgcatatcctaactcggcggtccaggttacgaccggttatcagtttcatgtttacaattaccagatgccgcctcagtgtcccgtgggcgagcagagacggaacttgtggaccgaagcgtacaaatggtggtacctggtgtgcctgatccaacggagggactag

SEQ ID NO: 30105 - DNA, 831 bp, synthetic construct
  source 1..831: mol_type = other DNA; note = Synthetic coding sequence
atgtacgcaagctggacgaaggcgtgccgaggtctggaggaactgattaacctaacacgcctgaatgtaagctacaaccatatcgacgatctcagtggacttatccctctgcacgggataaaacacaagttacgctatattgatttgcattcaaatcggattgactccatccaccatttgcttcagtgcatggtggggctgcactttctgaccaatctgattcttgaaaaagatggcgatgataatcccgtgtgtcgcttacccggatatagggccgtgattctgcaaacactgccgcagcttaggatcctggactgcaagaacatattcggcgagccagttaacctaactgagataaactcttctcagctccagtgtctggaaggattattggacaacctcgtctcttctgatagcccattgaacatctctgaggacgagatcattgatcggatgccggtgataaccgcacccatagacgaattggtcccattggagcagtttgcaagcaccccttcagatgcagtcttaacgtcttttatgtcggtgtgtcagtccagcgagcccgaaaagaataaccacgagaatgacctgcagaacgagatcaagctgcaaaagctggatgaccaaattttgcagctcctgaacgaaacatctaattccatcgataatgtgctcgaaaaggacccccgaccaaagcgagataccgatatcacatcggagtctgactatgggaactcacgtaagaacggggagactaaaaaagccgctgccggttctacagataagaccgatcccagaggaggcacacagtccttttcttgtcgttag

SEQ ID NO: 30106 - DNA, 1995 bp, synthetic construct
  source 1..1995: mol_type = other DNA; note = Synthetic coding sequence
atgggtgatgatggctctcctccagccaagaagatgatcaccgacatacatgctaacggcaagaccattaacaaagtgcccaccgtgaaaaaagagcatttggatgactatggcgaggctcccgtggagacggacggggagcatgtaaagagaacctgcacttctgttccagaaacacttcacttgaatcccagcctgaaacatacgctagcacagtttcacttgtcatcccagtcgtctctaggaggaccagccgctttctcagcgaggcactcccaagaaagcatgtccccaacagtcttcttgcccctcccgtcaccacaggtactgccgggacctctcctgatccctagcgactcctccacagagctcacacagaccgtgctggagggcgagtccattagctgctttcaagtgggcggtgaaaagcgcctatgtcttcctcaggtactcaatagcgtcctgcgagaatttacactccagcaaattaacaccgtctgcgatgagctgtacatttattgcagcaggtgtaccagcgatcaacttcacatccttaaggtgctgggcatcctgcctttcaacgccccttcatgtggcctaattacccttactgacgcccagagactttgtaacgccctcctgcgacctcggacctttccacagaacggctcagttctgcccgcaaagtccagccttgctcagttgaaagagactggatctgcctttgaagtggaacacgagtgcctgggaaaatgtcaggggctttttgcaccccaattttacgtgcagcccgatgccccttgcatccagtgtctggaatgctgcggcatgttcgccccacagacctttgtgatgcatagccatcgctccccagacaagcgtacctgtcactggggttttgaatccgcgaaatggcactgttaccttcatgtgaatcagaagtacctgggcacgccagaggaaaagaagctaaagatcattctagaagaaatgaaagagaagtttagcatgcgtagtgggaagagaaaccagagcaagactgacgcgccaagcggcatggaactgcagtcctggtacccggttatcaaacaagagggggaccatgtttcccagactcacagttttttgcacccctcttactatctgtatatgtgcgataaagtggtggctcccaatgtgagtttaacatcagccgtctctcagtccaaggagctgacaaaaacagaagccagcaagtctataagccgccagtctgagaaagcacactccagcgggaaactgcagaaaacggtctcataccccgacgtgagtctggaggagcaagaaaagatggatctaaaaacctcacgcgagctgtgctccagactggacgcatcaattagcaataactctacctccaaacgtaaatccgagtcagccacctgcaacctcgtgagggacatcaataaagtgggaatcggactggttgccgcagcttcctcccctctgctcgtgaaggacgtgatttgcgaggacgacaagggaaagattatggaagaagtcatgaggacttatctcaaacagcaagagaagctgaacctcatattacagaaaaagcagcaactccagatggaggttaagatgctgagctcgagtaaaagcatgaaggaactgacggaagagcagcagaatctccagaaagagctagaatcacttcagaatgaacacgcccagagaatggaagagttttacgtagagcagaaagatctcgaaaaaaagctcgaacaaattatgaagcagaagtgcacatgcgactcaaacctcgagaaagacaaggaggcagagtacgcaggccaattggccgagctcaggcaacgtctggaccacgcagaggctgatagacaggagctccaggatgaactacgccaggaacgagaagctagacagaaactggaaatgatgattaaagagctcaagctgcagatacttaaaagttccaagaccgctaaagagtag

SEQ ID NO: 30107 - DNA, 1068 bp, synthetic construct
  source 1..1068: mol_type = other DNA; note = Synthetic coding sequence
atgggacgtagagaccttgtgtctggaggcagtaacgaaggaaacggcaaggaagactgggctatgaaaacagtgagcctaaggtggaccaagctgccacctgtaaagtctgccataagagggcaggctccagttgtcccatacatgcggtacggacactcaaccgtgttgatcgatgatacagttttgctctggggtggcagaaatgacactgaaggggcttgtaacgttctttacgcattcgacgtgaacacacacaaatggttcactccaagggtgtcaggcactgtgcccggagccagagatggccatagcgcctgcgtgcttggcaaaatcatgtatatcttcggcggttatgagcagcaggccgactgtttctctaacgacatacataaactcgacacgagtactatgacgtggacccttatttgcaccaaaggctcacctgccaggtggcgcgattttcattccgcaacaatgctaggctctcatatgtatgtgttcggcggaagggccgaccgattcggaccctttcattctaacaacgagatctattgtaatcggatcagggtctttgacactcgaactgaagcatggctggattgcccccctactccggttctccctgagggccgacgatcacactcagccttcgggtacaatggggagctgtatatcttcggtgggtacaacgccaggctcaataggcattttcatgatctgtggaagttcaatcccgtctctttcacatggaagaaaatcgagcctaaaggcaagggaccgtgccccaggagaaggcagtgctgttgtatagttggagacaagatcgtgttgttcggcggtacatcccccagccctgaagaaggacttggcgatgaatttgatcttattgaccacagcgacctacacatactggacttttctcctagcctgaagaccctgtgcaaactggcagtaatccagtataatctggaccagagttgcctaccacacgatatcagatgggaactcaacgctatgacaaccaatagtaatatcagtcggccaatagtttcaagccatgggtag

SEQ ID NO: 30108 - DNA, 1245 bp, synthetic construct
  source 1..1245: mol_type = other DNA; note = Synthetic coding sequence
atggccgctgccccaccatcttattgctttgtagcatttcccccaagagccaaggacgggctggttgtattcgggaaaaacagtgcacggcctcgggatgaggtacaggaagttgtatacttttctgcggctgaccacgaacctgagagtaaagttgagtgtacttacattagcatagatcaggtgcctaggacttacgccatcatgatatccaggccagcgtggttatggggcgctgagatgggggctaacgaacatggggtttgtattgccaacgaggctattaatacacgggagcccgctgctgaaatcgaggcactacttgggatggaccttgtgcggctgggtctggaaaggggggagaccgctaaggaggctttagatgtcatcgtcagtctgctggaggagcacggtcagggtgggaattactttgaggatgccaatagctgtcactcatttcagtctgcttacctgatcgtcgaccgggatgaagcctgggtcctggagaccattggtaagtactgggctgctgagaaggtaaccgaaggagtccgttgtatctgttctcagctctccttgacaacaaagatggatgctgaacatccagaactcaggtcttatgcgcagtcccaggggtggtggacgggcgagggtgaatttaacttcagcgaagtcttttcccccgttgaggaccacctggattgcggtgcagggaaagacagcttagaaaagcaggaagaatccataactgtgcagacgatgatgaatacccttcgggacaaggccagtggcgtgtgcattgattcagagtttttcctgaccacagcctccggcgttagcgtgctgcctcagaaccgcagctccccatgtatacactacttcacaggcacacccgatccttcccggtcgatattcaaaccttttatattcgtggacgatgtgaaactggttccgaaaactcaatccccctgtttcggtgacgacgatcccgctaaaaaagagcctcgcttccaggagaagcctgatcgcagacatgaactatacaaagcacacgagtgggcaagagcgataatcgagtctgatcaagaacagggcagaaaactccgaagcaccatgctagagttggaaaaacaagggctggaggccatggaggaaattctgacctcctctgagcctttagatcctgccgaggttggggacctgttttacgactgcgtggatacagaaattaaattctttaaatag

SEQ ID NO: 30109 - DNA, 1200 bp, synthetic construct
  source 1..1200: mol_type = other DNA; note = Synthetic coding sequence
atggcaaccggggatcttaagcgatcactcaggaatttagagcaagtgcttcgtcttctcaattaccctgaagaggtggactgtgtcggactaataaaaggagacccagccgcaagcttaccgatcatttcctactcattcactagttactccccatacgtgaccgagctgatcatggaatctaacgtcgaattaattgccaagaatgacctgcgttttattgacgctgtgtacaagttgctgagagatcagtttaattataaacctatcttgacgaagaaacagtttatccagtgcggttttgcggagtggaaaattcagatcgtgtgcgacattctaaactgtgtgatgaaaaaacacaaagagctgtcctctttgcaaaagattccttcgcaacagcgcaagaaaatatcaagtggtaagtccgaacccccactcggtaatgagaagatctccgctgaagcggtgggagtggacatatccggccgtttcatgacctctgggaaaaagaaggcagtggttatcagacacctgtacaacgaggacaatgtggacatctccgaggacactctgtcacccattactgatgtgaatgaggctgtggatgtgtccgacctgaacgcgactgaaatcaaaatgccagaagtaaaagtgccagaaatcaaggctgaacaacaggatgttaacgtcaaccctgaaataaccgctctgcaaacgatgctagcggagtgccaggaaaacctcaagaagctaactagcattgaaaaaaggctggactgcctggaacagaaaatgaagggcaaggttatggtggatgaaaacacatggaccaacttgctgtcaagggtgacgctgctcgaaacagagatgctgctctctaaaaagaatgatgaattcatagagttcaatgaggtgtctgaggactatgcaagctgtagcgacatggatctcctaaatccccacaggaagtctgaggtggagcgcccagccagcataccccttagctccgggtactccacagctagctccgacagtacgcctagagcttcaacagtgaactactgtggcctcaatgagatcagcgagaactttcctgcatggtccgccacatctagttgctctagtctgagctggctgctgcggggacacactagctacctaagctctcagtcatttgcctggcccctgtcctgcgtctag

SEQ ID NO: 30110 - DNA, 1317 bp, synthetic construct
  source 1..1317: mol_type = other DNA; note = Synthetic coding sequence
tgatgtgccggtgcagagcgcccaaggaggagaggtaggctgtgggactcaagtggcgtaccacagagacagaaacggcctggaccttggcgcacccagacacaggagcagatgagccgcgatgtgtgtatacacacttggccttgtacatactacctcgagcccaaacggcgatgggtaaccggccagctgagcctgacttccttatctctgagattcatgacggatagtaccggcgagatccttgtgtcatttcccctttctagtattgtagaaatcaaaaaggaggcctcccacttcatcttttcctctatcactatactcgaaaagggccatgccaaacattggttttcctccttgagacctagcagaaatgtagtgttcagcattattgaacacttttggagggagctgctgctgtcccaacccggagccgtggccgacgccagcgtgcccaggacccggggagaggagttaaccggtcttatggccggtagtcagaagcggctggaggatacggcaagggttttacatcatcagggccagcaactggacagcgtcatgcgcggattggataaaatggagagcgatttagaggtggctgaccgattgctcaccgaactggagagtccggcatggtggcctttttcttctaaactgtggaagacaccgcctgagactaagcccagggaggacgtgagcatgacctcctgcgagccgttcgggaaagagggcattctcatcaaaatcccggcagttatctctcacaggactgagtcccatgtgaagcctggtagactgacagtgctcgtgtccggactagaaatacacgactctagttctctgttaatgcacaggtttgagcgtgaggacgtggacgacatcaaagtgcattccccttacgaaattagcatccgccagagattcatcggtaagcccgacatggcctatcggctgattagcgcaaaaatgccagaagtcattcctattcttgaggttcagttttccaagaaaatggaactacttgaggacgcactggttctcaggtcagccaggacatccagtcccgctgaaaagagttgtagcgtttggcacgccgcttcgggactaatgggcaggacattacatcgggaaccaccagccggagatcaagaaggtaccgcgttgcatttacagacttccctgcctgccctctccgaggcagatactcaggaactcacacaggggttcagacccatgtctcttagtacccaaacggtccttgtgatgttatgctctgagagcgcaggcgctctgtggcggcaacggttatcatag

SEQ ID NO: 30111 - DNA, 711 bp, synthetic construct
  source 1..711: mol_type = other DNA; note = Synthetic coding sequence
atgaccggatatgaggcgaggctgattacgtttgggacttggatgtacagtgttaataaagaacaactggcacgcgcaggtttttatgccatcggccaagaagacaaggtccagtgcttccattgcggaggcggactggcaaactggaagcccaaggaagacccttgggagcagcacgccaagtggtaccccggatgcaaatacctcctggaagaaaaaggccacgagtacatcaacaatattcacctaacgcggtcccttgaaggcgctcttgtccagaccacaaagaaaacaccatcactgaccaagcgcatttctgataccatctttcctaaccccatgttacaggaagcaatcagaatgggattcgatttcaaggacgtgaagaagattatggaggagcgcattcagacctctggctctaactacaaaacattggaagtcctggtcgcagacctggtttctgcccagaaggatacgacggaaaacgagctgaatcagacatcactgcagcgggagatcagtccagaagagcctctgaggcggctccaggaggaaaagttgtgcaagatctgtatggatcggcacattgccgtcgtcttcattccatgcggccatctggttacctgtaagcagtgcgccgaggccgtggatagatgtccaatgtgcagcgccgtaatcgactttaaacagagggtttttatgagttag

SEQ ID NO: 30112 - DNA, 285 bp, synthetic construct
  source 1..285: mol_type = other DNA; note = Synthetic coding sequence
atgaatccaacaaatcctttctcagggcagcagcctagcgcgttttcagccagtagctctaatgtgggcactctgccttctaagcctccttttagattcggtcagcctagcctatttggacagaacagcaccctgtcaggaaagtcatccggcttctctcaggtgagttcattccccgcatctagcggggtctcccattcctccagcgtccaaactctgggcttcacccagactagttccgttgggcctttctcgggtctcgagcacacctccacgttcgtgtag

SEQ ID NO: 30113 - DNA, 723 bp, synthetic construct
  source 1..723: mol_type = other DNA; note = Synthetic coding sequence
atggctatagtgcagaccctgcccgtgccattggaacccgctcccgaggcggcaactgcgccacaggcccctgtcatgggttcagtctccagcctgatctccgggagaccctgccccggtgggccagctcctccacgacaccatggcccaccaggccctacattttttagacagcaggacggactgcttagaggaggctatgaggctcaggagcctctctgtcccgcagtgcctccgagaaaggccgtgccggtgacgtcctttacctacatcaatgaggacttccgaaccgaaagcccacccagcccatctagcgacgtggaagacgccagggagcagagggcacacaatgcccatctgcgcggaccccctcctaagctgataccagtgagtggtaaactcgaaaagaatatggagaaaatcctgatccgtccaactgcttttaaacccgtactgccaaaaccacgtggagcaccttcgttgccaagtttcatgggtcctagagccaccgggctgagtggcagccagggcagtctcacacagctgttcggtggccctgcaagcagttcgagcagcagttcctcttcatccgctgctgacaaacctctggccttttcagggtgggccagcgggtgcccatccggcacgttgtccgatagcggtcgaaacagtctgtcaagtttgcccacctactctaccgggggtgctgagccaacgacgtag

SEQ ID NO: 30114 - DNA, 1317 bp, synthetic construct
  source 1..1317: mol_type = other DNA; note = Synthetic coding sequence
atgtgtcccaaaaatgcctcttactacggaaaccgggctgctacactgatgatgctcggcagattccgtgaggccctcggcgatgcacaacagtctgtgcgtttggacgattccttcgtccgtggacacttacgcgagggaaaatgtcacctgagcctcgggaatgccatggcggcatgtcggtctttccagcgggctttggagctggatcacaaaaatgctcaggctcagcaagagttcaaaaatgccaatgccgttatggagtacgaaaaaattgctgagacagattttgaaaagcgcgatttcaggaaagttgtgttctgtatggacagggcactggagtttgctccagcctgtcatcgttttaaaatccttaaagcagagtgcttagctatgctggggaggtacccagaggcacagtccgtagcatccgatattttgagaatggactccacaaacgcagatgctctgtacgttcgagggctgtgtctgtattatgaggactgcatagaaaaggcagtgcaattttttgtccaggctctgagaatggcccctgatcacgagaaggcatgcatcgcatgtcgcaacgcgaaagcgctgaaagctaaaaaggaggatggtaacaaggccttcaaagaaggcaactataaattggcgtatgaactctatactgaggcgctgggcatcgatcctaacaatatcaaaactaacgcaaagctatattgcaataggggcaccgttaactctaagctgaggaagctcgacgatgctatagaggactgcaccaatgccgtgaaactcgatgatacttatatcaaggcgtatcttcggagagcgcagtgctacatggatacagagcaatatgaggaagccgtccgagactacgagaaggtgtaccaaacagaaaagaccaaagagcataagcagttgctgaaaaacgcccagttggagcttaaaaagtctaagcgaaaagattactacaaaattctgggagtcgacaaaaatgcctccgaggacgagattaagaaggcctaccgaaaacgcgcactgatgcatcatccggataggcacagcggcgctagcgcagaggtgcagaaagaagaggagaaaaagtttaaggaggtgggggaggcattcaccattctgtccgatcctaagaagaagaccaggtacgacagtggccaagacttggacgaggaggggatgaatatgggcgacttcgaccccaacaatattttcaaggccttctttggcggaccaggcggtttctccttcgaggcatccggcccaggaaactttttcttccagttcgggtag

SEQ ID NO: 30115 - DNA, 678 bp, synthetic construct
  source 1..678: mol_type = other DNA; note = Synthetic coding sequence
atggaggaagaagagatgaatgatggaagtcagatggttaggagccaagagagcttgacttttcaagatgtggctgttgattttacacgggaggagtgggaccaactgtaccctgcccagaaaaatttgtaccgggacgtgatgctcgaaaactatagaaacctggtggcccttgggtaccaactgtgcaaacctgaagttatcgcccagttagagctggaggaggagtgggtcattgaaagagacagtcttttagatacccatccaggggaccaatctcatgtgatgtccgtggtccgctccagcgtgcacgccagatggattgttggaaaagtgatcggcacgaagatgcaaaaaaccgccaaggtcagggtaacccgactggtactggatccctacctactgaaatattttaacaaaagaaaaacttacttcgcacatgacgccctacagcagtgcaccgtgggggacatagttctgctacgagctctgccagtgccgagagcaaaacatgtaaagcacgaacttgccgagattgtgtttaaagttggaaaggtcattgaccccgtcacgggaaagccttgtgccggtaccacttatctggaatcaccgctgagtagcgagacaacccagctctcaaagaacctggaagaattgaacatctcgtcagcccagtag

SEQ ID NO: 30116 - DNA, 753 bp, synthetic construct
  source 1..753: mol_type = other DNA; note = Synthetic coding sequence
atgactaccaagaatctggagaccaaggttacagtcacctcctcacccatccggggtgctggagacggtatggagacagaggaaccacccaagagtgtagaggtcacatcgggggtacagagcaggaagcaccattccctccagtccccgtggaagaaagccgttccttccgagtcaccaggcgtgttacagctgggaaagatgttgaccgagaaagctatggaggtgaaagccgtcagaatcttggtgcctaaggctgcaatcacccacgacatacctaacaaaaacacgaaagtgaaatccttaggtcaccataaaggcgagtttctgggtcagtccgaaggcgtgatcgagccaaataaggagctgagtgaggtcaagaacgtcctcgagaaactcaagaactcagagcggaggctgctccaggacaaagaaggtctttctaatcagctccgagtgcagacagaagtcaatcgagagctcaagaagcttctggttgcatccgtaggcgatgatttacagtaccattttgagaggctcgctcgggagaaaaatcagttgatcctcgagaatgaagccctgggaagaaataccgctcagctctccgaacagctagaacgcatgagtatccagtgtgacgtctggaggagcaagttcctcgcctctcgagtcatggcagacgaactgaccaacagtcgcgctgcactgcagagacagaaccgggatgcacatggagctatacaggatttgtag

SEQ ID NO: 30117 - DNA, 387 bp, synthetic construct
  source 1..387: mol_type = other DNA; note = Synthetic coding sequence
atgttatgttggggatattggagtctagggcagccaggcatctcgacaaacctgcaaggcattgtagccgagccccaggtgtgcggctttataagcgatcgcagtgtgaaggaagtggcctgcgggggaaatcacagcgtttttctcctggaagatggtgaggtgtacacatgcgggctcaacaccaagggccagctcggccatgagcgcgagggcaataaacctgagcaaatcggggcactggccgatcaacatatcatccatgtagcctgcggcgaatctcactcactggccctatccgatcgcggtcagttgttctcttggggggcaggatccgacgggcagttgggactcatgactaccgaggattcggtggctgtgccctag

SEQ ID NO: 30118 - DNA, 1617 bp, synthetic construct
  source 1..1617: mol_type = other DNA; note = Synthetic coding sequence
atggacgtggataaggagctggggatggagagcgttaaggccggtgcatccgggaaaccggagatgcgcctgggaacccaggaggagaccagcgagggtgatgccaatgaatccagccttcttgtgctgtccagcaatgtgccactccttgctctggaattcctagagatcgcacaggccaaagagaaggccttcctccctatggtatcacacacattccacatgaggaccgaagagagtgacgcttctcaggaaggggacgacttacctaaatcctccgccaataccagccacccaaagcaggatgattcacccaagagttctgaggaaacaattcagccaaaggagggtgacattcctaaagcacccgaggaaacaatccagagcaagaaggaagacctgcccaagtctagtgaaaaggccattcaaccaaaggaaagtaacattcccaagagtagcgctaagcccatccaaccaaagctgggcaatatcccaaaggcctctgtaaagccgtcacagcctaaagaaggcgatattcctaaggcccctgaggagacgattcaatccaaaaaggaggacctgcccaagtcctcggaggaggccatccaacctaaagagggggacatccccaagtccagcgctaaacctatacaacccaagctaggaaacattgccaaaactagtgtgaaaccttctcagccaaaggagagtgacatacctaagagccctgaggagacgatacagcctaaagagggcgatattccaaaatcatcagctaaaccaatccaacccaaacttgggaatatacccaaagcatccgtgaaaccatcacagcccaaggaaggcgacatctccaagtcgccagaggaggccatacagcctaaggaaggcgacctgcccaaatccctcgaggaggccatccagcctaaagaaggcgacattcctaaatctcttgaggaggccattcagcctaaagagggagacatcccaaagtcgcccgaagagacaatccaacccaaaaagggggatataccaaagagcccagaggaggcgatccaaccgaaggagggcgatatacctaagtcaccaaaacaggccattcagcctaaagaaggcgatatcccaaagtcccttgaagaagctatcccaccaaaggaaatagacatccctaaaagccctgaggagaccattcagcccaaggaagacgattccccgaaatcattggaagaggccaccccgagtaaagagggtgacattctcaagccagaagaagagaccatggagttccccgaaggtgataaagtgaaggtgattttgagcaaggaagacttcgaggcctcgctgaaggaggcaggtgaaagactggtcgccgtggactttagcgctacctggtgtggcccatgtcggacaattagacccttttttcacgctctgtccgtgaaacacgaggacgttgtgtttctagaagttgacgctgacaattgtgaggaggtcgtcagggagtgcgcgatcatgtgtgtgcctacatttcagttttacaagaaagaggagaaagtggacgagctgtgcggggcactgaaggaaaagttagaggctgtcatcgcagaattgaaatag

SEQ ID NO: 30119 - DNA, 153 bp, synthetic construct
  source 1..153: mol_type = other DNA; note = Synthetic coding sequence
atggcgtccgaggaactccagaaggacttagaagaagtgaaagtacttctcgagaaggcaacacggaagagagtgagggatgcgctgacagccgaaaagtctaaaatcgagaccgagattaaaaataagatgcagcagaagagccagaaatag

SEQ ID NO: 30120 - DNA, 1527 bp, synthetic construct
  source 1..1527: mol_type = other DNA; note = Synthetic coding sequence
atggccactgattggctggggtcgatcgtgagtatcaattgtggggacagccttggagtctatcagggacgcgtctccgctgtggaccaggtatcacaaactatcagcctgacaaggccattccataacggcgtcaaatgtcttgtccccgaagtgacctttcgggcaggtgatattaccgagcttaaaatcctggaaatccctggcccaggggacaatcagcacttcggcgatctccaccagactgagctgggaccatctggcgcaggttgtcaggtgggaataaaccagaatgggaccgggaaatttgtaaaaaaacctgcaagcagctcctctgcccctcagaatatacccaagcgtaccgacgtgaaatcccaggatgtggccgtgagcccgcagcaacaacagtgcagcaagtcatacgttgacaggcacatggagtcgctctcccagagcaagtcatttcgcaggagacacaactcctggagctcctcctcccgtcaccccaatcaggccactcctaagaaaagcggtcttaagaacgggcaaatgaaaaacaaagatgacgaatgctttggagacgacattgaggaaataccagacactgatttcgacttcgagggcaaccttgccctgttcgacaaggcagctgtcttcgaggagatcgatacttacgaacggcgatccggtactcgatctaggggaatccctaatgaaagaccgacccggtacagacacgatgagaacatccttgagagtgagccaattgtgtatcgccgaatcattgtacctcacaacgtgtctaaggagttttgcaccgactctgggctggtagtccccagcataagttacgagttacacaaaaaactcttaagtgttgctgagaaacatggtttgaccctggaacgccgtctagaaatgactggggtttgcgcctctcagatggcccttactttactaggcggaccaaaccgacttaaccctaaaaacgtgcaccagagaccgactgtggcgctgctctgtgggcctcacgttaagggtgctcagggaataagctgcggtagacatctggccaaccatgacgtacaggtgattctgttcctgcctaatttcgtcaagatgctggagtccattactaacgaactctctctgttctccaagacacagggacaacaagtgtcctctttgaaggaccttcctacatccccagtggatctggtgatcaattgtctggactgccccgaaaacgtgttcctccgcgaccagccttggtacaaggcggcagtggcttgggctaatcagaaccgcgcacccgtgctgtcaatcgacccaccggtccacgaggtggaacagggcattgacgccaagtggagcctcgcactgggactgcctctgccactgggggaacacgccggaagaatatacttatgcgatatcggcattccccagcaggtcttccaggaggtggggattaattatcactcaccattcggctgtaagtttgtcattcccttgcacagcgcctag

SEQ ID NO: 30121 - DNA, 3846 bp, synthetic construct
  source 1..3846: mol_type = other DNA; note = Synthetic coding sequence
atgaccttttatagttggattccttaccataggcaagcaccactgaatcaccggcgagtgtgtagcgccgaaggtgccggatctcccggaccagcccttgatcctaggtggttgccaacagaagctcacctgctcgaagcgcatcgtcttctgctgcagtccgttctgtgtgacagacccagggagagcatccagttgcattttcggctctctatggcctctcagctccaggtgttttctccacccagtgtaagtagcagcgctttctgtagtgccaaaaagcttaagatagagccaagcgggtgggatgttagtgggcagtccagcaatgacaaatattatacccacagcaaaacgctgcccgcaactcaaggtcaggccaatagtagccatcaggtggccaattttaatatcccagcctacgatcagggtttgctcctgcctgcccctgccgttgagcacatcgtggtaacagccgcagatagttccggttcagctgccaccagcacctttcagtcttcccagacattaacccatcgtagtaatgtttccctgcttgaaccctaccagaaatgtgggttgaaaagaaagtctgaggaggtggattcgaatggcagcgtgcaaatcatcgaggagcacccacctctgatgctgcagaaccgcaccgtggtcggggctgccgctacgaccactactgtcaccactaaaagctcctcaagttctggcgagggggactatcaactggtacaacacgaaatattgtgttcaatgacgaactcttacgaggttctggagttcctgggtcggggtactttcgggcaggtggccaagtgttggaagcgctctacgaaggagattgtggcgattaagatcctgaaaaatcatccaagttacgctcggcagggacaaatagaggttagcatcctaagcaggttatcgagtgagaacgccgatgaatataattttgtgaggagctatgagtgcttccagcataagaatcacacctgtctagtcttcgaaatgctggaacagaacctgtacgacttcttgaagcaaaacaagtttagccccctgccacttaagtatatccggccaattctgcaacaggtcgccacagcactgatgaaattaaagtctctaggcctcattcatgccgacctcaaacctgaaaacatcatgctggtggacccagtaaggcagccttatcgagtaaaggtgatagacttcggtagcgctagccatgtgagtaaggccgtatgttccacttacctgcagagcagatattatagggcccctgagataattcttggactacctttttgtgaggccatcgatatgtggagtctcggatgcgtaatagccgaactgttcctggggtggccactctaccccggtgcctccgaatatgaccaaattcggtacatcagccagacgcaggggttgcctgctgagtacctgctctccgccggaactaagaccacgcgattctttaatagagacccaaacctaggctacccactctggaggttaaaaactcccgaggagcatgagctcgagaccggcatcaagagtaaagaggccagaaaatacatttttaattgcctcgatgatatggcgcaggtgaacatgtccaccgacttagagggaaccgacatgctggcagagaaggcggaccgtcgcgaatacatagacttgctgaaaaaaatgctcactatcgacgctgacaaacgcattacgcctttgaagaccttgaatcaccagttcgtaaccatgacccaccttctggactttccgcattccaatcacgtgaagagctgcttccagaacatggagatctgtaagagacgggtgcatatgtatgacaccgtgagccagattaaatcacctttcacaacacatgtggcacccaacacgtcgaccaacctgactatgtcatttagcaatcagcttaacacggtccacaaccaggcgtctgtcctggcctcttcctccaccgccgctgctgcaaccctgagcttggccaacagcgacgtgtccctgctgaattatcagtctgccctctacccctcctccgccgcacctgtgccaggggtggcccagcaaggcgtttctttgcaaccgggaacaacccagatctgtacacagacggatccttttcagcagactttcatagtgtgtccccctgcttttcaaaccggcctgcaagcaacaacaaagcatagcgggttccctgtgcggatggacaacgccgtccctatcgtcccccaggcacccgcagcacagccactgcagatccaatccggagtgctcactcagggctcttgtacccctctaatggttgccactctgcatcctcaggttgccacaataaccccccagtatgctgtgccttttacattgtcttgcgctgccggacggccagcccttgttgaacagactgctgcggtcctgcaggcctggcctggtgggacacagcagatcctcctcccatctacctggcagcaattacctggagtcgcactccacaactccgtccaacccacggccatgatacccgaggccatgggatctggtcagcagctcgcggattggcgcaacgctcattcacacgggaaccagtactcgacaattatgcagcagcccagtcttctcacaaatcacgtgaccctcgcgactgctcagccattgaacgtgggggtggctcacgtggtgagacaacagcagtcttccagtttaccgagcaagaagaacaagcagtctgcaccagtctcctcaaaaagttccctggacgtgctaccatcacaagtgtatagtctagtaggctcttctcccctgaggacaacctcatcctacaattcgctggtaccagttcaggatcagcaccagccgattatcattcctgacactcccagtccgccagttagcgtcattaccatccgctcggacaccgatgaggaagaagacaacaagtataagcctagcagcagcggactgaagcctaggtcgaacgttataagctacgtaacagtgaacgacagccccgattcagatagctcgctgagcagtccctacagtacagacactttgagcgctcttcgaggaaactccggtagcgtcctggaggggcctggccgtgtagttgctgacggaaccggaacgaggacaataattgtccccccacttaagacacagctgggggattgtacggtagctactcaggctagtgggcttctctctaataaaaccaagccagtggccagtgttagcggccagagctcaggctgctgcatcacaccaaccgggtatcgggctcaaagggggggtacttctgctgcccagccgttaaatctgtctcagaatcaacaatcctccgctgcccctacgtcccaggaacgaagctccaatcccgctcctcggaggcaacaggcattcgtcgctccgttaagtcaggccccatatacgtttcaacacgggtcacctctccactctactggtcacccccacttggccccagctcctgcccacctcccctcccaggcacacctgtatacctatgccgcacctacatccgccgctgcattgggctcgacttcaagtatcgcacatttgttctctccccagggttcatccagacacgcggctgcatacacgacgcatcctagcactctcgtccaccaggtacccgttagcgtgggcccatccctgttgacctccgcctcagttgcccctgcacaatatcaacatcaatttgcgactcagagctatattggctccagtcgcggttcaacaatttacactggctaccccctttcccccactaagatctcccagtatagctatctctag

SEQ ID NO: 30122 - DNA, 1071 bp, synthetic construct
  source 1..1071: mol_type = other DNA; note = Synthetic coding sequence
atgacctcagttacacggtcggagatcatagatgaaaaaggaccagtgatgtcgaaaacacacgatcaccagctggaatcatcactgagccccgtggaagtattcgcgaaaacaagcgcctccctagagatgaatcagggtgtgtcagaggaacggatccacctcgggagcagtccaaagaagggcggtaactgcgacttgtctcaccaagaacgcctgcaaagtaagtctctgcatttgtcaccacaggaacagtctgccagctatcaggaccggaggcagtcttggaggagagcatcaatgaaagaaaccaatcgcaggaaaagcttgcaccccatccaccagggcattaccgagctgagtcggtcgatctccgttgatctggccgaaagtaagagactgggctgtttgctgttatcatccttccagttttcaattcagaaactggagccttttcttcgtgatactaagggcttcagcctggaatcatttagggccaaggcctcttccctgtcggaggagctaaagcacttcgcagacggcctggagaccgacgggactctacagaagtgctttgaggactctaatggaaaggcatccgactttagtttggaagctagtgtggcagagatgaaagaatacatcacaaagtttagtctggaaaggcagacctgggaccaactgctgctgcactaccagcaagaagctaaggagatcctgagtaggggtagtactgaggccaaaataacggaggtgaaggtcgaaccaatgacctacttggggtccagccagaacgaggtgctgaacacaaagcccgactatcagaagatcctgcaaaaccagtccaaagtttttgattgtatggaactggttatggacgagctgcaggggtcggtgaaacaactgcaggcctttatggatgaatccacccagtgtttccagaaggtctccgtccagctgggcaagcgctccatgcagcagctcgatccaagtcctgcccgtaagctcttaaaactgcagcttcagaacccacctgcaattcatggtagtggttccggcagttgtcaatag

SEQ ID NO: 30123 - DNA, 2748 bp, synthetic construct
  source 1..2748: mol_type = other DNA; note = Synthetic coding sequence
atgcagggccctgacgcccctttactgctgtccgcaagggaactcggacccggaagacggggaagcgcgagctggtatcgacaggaaggaggtgccgtctgcaattggctgagaaagccccagccactggaacccaggacctcttttcccagtgccagacgctccgaatttagacccccacgcagactcccatgggcaggccctgcctcagcccagagcgaggaaggccacgctgggggtaggtgccaggcgggtagccccgctcccgctagacggctctctggtgcgtttaaaactttggtgcccggaacccacgctcagggggctagcgatacacaccccctgggccctccccatacccccgtcttggaccccagccctcaagatgggttccctgtgctttggaggggctccagcaaggcatctcacatgaatagactccgtaacgccaagatttatgtggagcgtgcagtgaagcagaaaaaaatattcactatccagggttgctaccctgtgatccgctgtcttctaaggcgccgtggctgggttgaaaagaagatggtgcatagatctggccctacattactgccgccacagaaagatttggacagctcggcgatgggcgacagcgatacaaccgaagatgaggatgaggacgaggatgaggagttccagccttcacagctctttgacttcgacgatctgctcaagttcgacgatcttgacggaacccatgcgttgatggttggactctgtctcaacctgagaaacctcccctggttcgacgaagtggacgcaaacagcttcttcccgagatgttattgccttggggcagaagatgacaagaaggcctttatcgaggacttctggctgacagccgcacggaacgtgttgaagttggtggtgaaatccgagtggaagagctatcccattcaggccgtggaagaggaagcctcgggagacaaacagcccaaaaaacaggagaagaatccggttctcgtgagtcctgagttcgttgacgaagcgctatgcgcctgcgaggaatacctgtccaatctggcccacatggacattgataaagatctcgaagcccctctttacctgacccccgagggctggagtcttttcctgcagagatactaccaggtggtgcacgagggggcagaactgcgacacctcgacacgcaggttcagagatgtgaagacatcctccagcagctccaggcggtagtacctcaaattgatatggagggcgacaggaacatctggatagtcaagccgggagccaagtcacgaggtcggggtattatgtgtatggaccacctcgaggagatgttgaagcttgttaatggtaatccagttgtgatgaaggatggaaagtgggtcgtgcagaaatacatcgagaggcctcttcttattttcggtacaaaattcgacctgcgccaatggtttttggtcactgattggaatccacttaccgtctggttctacagagactcctatatccggttctcgacccaaccatttagcctgaagaaccttgacaattccgtacatctgtgcaataatagtatacaaaaacatctggagaacagttgccatcggcaccccctgctgcctcctgacaatatgtggtcctctcaaaggtttcaagcccacttacaggagatgggtgcccctaacgcctggtctaccattatagttccaggcatgaaagatgcagtgatccatgcactacaaacttcccaagataccgtacagtgtaggaaagccagtttcgaactgtacggcgctgatttcgtgtttggggaagacttccagccctggctgattgaaatcaatgcctctcctacaatggccccaagcaccgcagtcaccgccagactgtgcgccggagtgcaggctgacacccttagggtggtcatcgatcgtatgctggacagaaattgcgacactggggcatttgaactcatttacaagcagccagccgtcgaggtccctcagtacgtcggcattagactgttagtggagggcttcaccattaaaaaaccaatggcgatgtgccatcggcgaatgggggttcgaccagccgtacccctgctgactcaacggggtagcggtgaagccagacatcactttcccagcttgcatacgaaggctcagttgccctcaccccatgttctccggcaccagggacaggttctccggcgacaacatagcaaactggtaggcacaaaggctctgtcgactacaggcaaagccctgcgaactctgccgacagcaaaagttttcattagtttgcccccaaatctcgattttaaagtggccccatccattctgaagccacggaaggccccagccttactgtgcctcagagggccacagctggaggttccctgttgtctgtgtccgcttaagagtgaacaatttctggccccagtggggaggtcgcgtcctaaggccaacagcagacccgactgtgacaaacctagggcagaagcttgccctatgaagagactgtcccccttgaagccacttcccttggtcggtactttccagaggcggagagggttgggggatatgaagttgggtaagcctctgctccggttccccaccgcactcgtcttggacccgacacctaataagaaaaagcaggttaaatatcttggacttgactcgatagctgtggggggttccagagtagacggggcacggccttgtactcccggatctactgccagggcctag

SEQ ID NO: 30124 - DNA, 2463 bp, synthetic construct
  source 1..2463: mol_type = other DNA; note = Synthetic coding sequence
atgcggatctcttcatgcagcgatgagtccagtaatagcaatagttctcggaaaagcgacaaccacagcccggcagtagttaccacaacagtttcaagtaaaaagcagcccagcgtgctggttacattccccaaagaggagcggaagagcgtgagcggaaaggcatctatcaaactgtctgagactattagcgaaggaacaagcaattccctctctacatgcaccaagagcggcccaagccccctttccagccccaatgggaagctgactgtcgcctctccaaagaggggccagaagcgtgaggagggttggaaggaagtggtcagaagatcaaagaaagtatccgtgccctcaactgtcattagtcgggtcattggcagggggggttgtaacatcaacgcgattcgcgaattcaccggagcccacatcgacatcgacaagcagaaggataagaccggagatcggatcataactatcagaggcggaacggagtccacccgccaggcgacccagctgataaatgctctgattaaggatcctgacaaagagattgatgaattgatccctaagaacaggctgaaatccagctcagctaactcaaagatagggtcatcagctccaacaaccaccgctgctaacacatccctgatgggcatcaagatgacaactgtggccttgtccagcacatcccaaacagcaaccgctctgactgtaccggcaatttcctccgcaagcactcacaagaccattaagaaccccgttaacaatgttaggccaggcttcccagtgtccttgccgctcgcttaccctccacctcagtttgctcacgcattactcgctgcacagactttccagcaaatcagacctcctcgactgcctatgactcactttggaggcacatttccaccagcacagtccacttgggggcctttcccggttcgccctttatcacccgcaagggccacaaattccccgaaaccccacatggtcccccgacatagcaaccaaaactcaagcggatcccaggtcaacagtgctggtagcctcacttcctctccaacaacaacaacttcgtcctcagcaagcaccgttcccggaacctcaaccaacggcagcccctcttcgccaagcgtgagacggcaactgttcgtcaccgtggtgaaaacgtccaacgctactacaacaacggtgaccactacagcctcaaataacaacacggcccctactaacgcaacttaccccatgccaactgctaaggagcactaccctgtgagctcgccctcaagtccctcaccaccagcccagccgggaggagtctctcggaacagccctctggactgtggcagcgcctctcccaataaagtagcttcttcatctgagcaggaggccggttctcctccagtggtcgaaaccaccaacaccaggcctccgaactcatctagttcatctggatcatcaagcgcacactccaaccagcaacaaccccctggctctgtatctcaggagccacgtcctcccctccaacaatctcaggttcccccacctgaagttagaatgactgtcccccctcttgctactagcagtgcacccgtggctgtcccaagcactgccccagtcacctacccaatgcctcagacccctatgggctgtccccaaccaactcccaaaatggaaacgcccgctatcaggccccctccccacggaaccaccgcacctcataaaaattccgcttccgtgcaaaactcctcagtagccgtgctgagcgtgaaccacattaagcgacctcattctgtaccatcttccgtccagctgcctagtaccctgagcacacagtccgcgtgccaaaacagtgtgcatcctgccaataagccaatcgcccctaactttagtgccccactgccctttgggccattttcaacactgtttgagaacagtcctacttcggcccatgccttttgggggggatcggtggtgagcagtcagtcaacccccgaaagtatgttaagcggaaagtcttcctatcttcctaacagcgatccactgcaccagtctgatacctccaaagcaccaggcttcaggccccctctccagcgtcctgctccatctccttctgggatcgtgaatatggactccccctatggaagcgttacaccctctagcacccacctgggtaattttgcctctaacatttcagggggacagatgtacggcccaggtgcacctctgggtggcgcacccgcagccgcaaattttaaccgacagcacttctctccccttagtttgttgaccccatgctcttcagcctcaaatgatagcagtgcccagagcgtttcttccggggtgcgcgcacccagcccagcaccctcgtctgtgccgcttgggtcggagaagccctcaaatgtgagccaggatatcgtagcatctggacccctcaaaggcctcgttgctatcaagacgaagtag

SEQ ID NO: 30125 - DNA, 6032 bp, synthetic construct
  source 1..6032: mol_type = other DNA; note = Synthetic coding sequence
atggagaaagctacagtgccagttgctgctgcaaccgcggctgagggggaagggtcgcccccagctgtcgcagccgtggcgggaccgcctgcagcagccgaagtcgggggaggagttggcggttcctcgcgagcacgtagtgcatctagccctcgagggatggtgcgtgtctgcgaccttttattgaaaaagaagcccccacaacagcagcatcacaaagcaaaacgcaaccggacatgtaggcccccatcctcatccgaaagtagcagcgattccgacaactctggaggcggtggaggcggaggcggtggcggtggaggcggtggcggtacatcctcaaacaacagtgaggaggaagaggacgatgatgacgaggaagaggaggtgtcagaggtcgagtcgtttatcttagaccaggacgatctagagaaccctatgttggaaactgcttccaaactgcttttaagtggcaccgctgatggggcagatttacgaaccgttgatccggagacacaagccaggctcgaggccctcctagaggccgcagggattggaaaactgagcaccgccgacggtaaagcatttgctgatccagaagtgctgcggcgactgacctctagcgtcagttgtgccctggacgaggcagccgcagccctcactcgcatgagagcagaatccactgcaaacgcaggacagtccgataaccgttcactagcagaggcttgcagcgaaggtgacgtgaatgccgttagaaagctgttgatagaaggcaggtccgtgaacgaacacaccgaagagggggaatctctgctttgtctggcgtgctctgccggatactacgaactggctcaggttcttcttgccatgcacgcaaacgtggaggaccgcggaattaagggtgacattaccccgctcatggccgcagccaatgggggacacgttaaaatagtcaaactgctgcttgcccataaagctgacgtcaacgcccagagctcaaccggcaataccgctcttacatatgcctgcgccggagggtatgtggacgtggttaaagtgcttctggagtcaggagcctctatcgaggaccacaacgaaaacggacacaccccgctcatggaagctggctctgctggccatgtggaggtggcccgattgctcttggaaaatggtgcgggaattaacactcacagtaacgagtttaaagaaagcgctctaactctcgcctgttataagggccatctggaaatggtgcgatttctgctggaggcaggcgctgaccaagaacacaagacagatgaaatgcacacggcgctcatggaagcgtgtatggatggacatgttgaagtcgctaggttactgcttgatagcggagcccaggtgaacatgccagctgattcctttgagtctcctctgactctggccgcttgcggaggacatgtggagcttgctgccctgctcattgagcgaggtgctagcctcgaggaggttaacgatgagggctacaccccactcatggaggcagctagagaggggcatgaggagatggttgctctcctgctggggcagggtgctaacattaatgcccagactgaagagacacaggagactgctctgaccctggcctgctgtggagggtttctggaggtagccgatttcctaattaaagccggtgcggatattgaactgggatgctctacacctcttatggaagctgcacaggagggccacctagaactcgtgaaatacctgctcgccgcaggggcaaacgtacacgcaacgacagctacgggagacactgcactcacctacgcctgcgagaacggtcatactgatgtggcggacgtcctgttgcaggccggagccgatcttgaacatgagagcgaaggtggacggacacccttaatgaaagcagcgagagccggacacgtgtgcacagtgcagttcctcatcagtaaaggtgcgaatgtgaaccgaacgacagcaaataatgaccacaccgtgctgtccctggcctgcgctggcggacatcttgccgtcgttgagcttctattggcccatggcgctgatccaacccatagactgaaggacggttccactatgctaattgaggccgctaagggaggtcataccagcgtggtatgttatttgttggattacccaaataacttgctgtccgccccaccaccagatgtgactcagctgacccctccttcccatgaccttaaccgggcaccgagggtgccagttcaggcccttcccatggtggttccgcctcaagagccagataaacctcctgctaatgtggcaaccacattgccaattcgcaacaaggctgctagcaagcagaaaagctctagtcaccttcccgctaattctcaagacgtgcaggggtatatcaccaaccagtctccagaaagtatcgtggaggaggctcagggcaagcttacagagttagagcaacgcataaaggaggcaatcgagaaaaatgcgcagctacaaagcctcgaactagctcacgccgatcaactgactaaggagaagattgaagaacttaacaagacccgggaggagcagatccagaagaaacagaaaatcctggaagagcttcagaaggttgaaagagagttgcagctcaaaacacagcaacaacttaaaaaacagtatctcgaagttaaagcccagagaatccagctacagcaacagcagcagcaaagctgtcagcacctaggattgctgacccctgtgggagtcggcgagcagcttagcgagggcgactatgcacgtctgcagcaggttgaccctgtgctgcttaaggatgagcctcaacagaccgctgctcagatggggtttgcaccgattcagcctttggctatgcctcaagccttgccactggcagctgggcctctgccacccggttctattgccaatctcaccgagctgcaagtcctgtcatcgttgctacaaccctgcttccttagtaccttgcctctcatccttatgcaccgccttagagtaatcatgaccagacctaagtcatcttctacctctgaatctggcgattccgacaatatgaggataagctcttgcagtgacgaaagcagcaatagcaattcatccagaaagtcagacaaccattcacccgctgtggttactaccacagtgtccagcaaaaagcagcctagcgtgcttgtcaccttccctaaggaagaaaggaaatcggtgagcggtaaggcaagtatcaaactatctgagacgataagcgaggggaccagcaacagcttgtcaacatgtacgaaaagtggtccttcccccctctctagcccaaatggaaagttaacagtggcaagtcccaagagggggcagaagcgggaagaaggctggaaagaagtcgtgcgcaggtcaaagaaagtgtccgtgccctcaaccgttatttccagagtaatcggtcgcggaggttgtaatatcaacgcaatccgtgaattcaccggggcacatattgacatagataaacagaaggacaaaactggagacaggataatcaccattcggggaggcacagagtctacaagacaggccacccagctcattaatgcattaataaaggaccccgataaagaaatagatgagctgatcccaaaaaatcgtctgaagtccagctccgccaatagtaagattggctctagcgcccctacaaccaccgctgccaacacaagcctaatgggcattaagatgaccactgtcgctttgtcatcaacttctcagaccgccaccgctctgaccgttcccgcaatatcttccgcctcgacccataaaaccataaaaaacccagtgaacaacgtccgaccaggatttcccgtgtcacttccgcttgcctatcctccccctcagttcgctcacgccttactagccgcacagacattccagcagatcaggcctccaaggctgcccatgacacatttcgggggaacttttcccccagctcagagcacctgggggccattccccgtccgcccactgtctccagcgagggctacgaactctcccaagccacatatggtcccccgacattcgaatcagaacagctctggctcccaggtgaattccgcagggtcactcacctcctcccccacaacaactacatctagctccgcctctacagttcctgggacgtcaacaaacggctccccgtctagtccttcagtccggaggcagctcttcgtgaccgttgtgaagaccagcaacgccactactaccactgtgacaaccacagcaagtaacaataataccgctccgaccaacgccacctaccctatgcccaccgccaaggagcactatccagtctcctcaccgtctagtccttcaccaccagcgcagccaggcggagtcagccgaaactcacccctggactgcgggagcgccagtccgaacaaggtggcgagttcctctgaacaggaggcgggttcccctcctgttgtggagaccacaaacacaagacccccaaactccagcagcagttcagggtcaagcagtgcacattcgaatcaacaacagcctcccggttctgtttcacaggagcctagaccacccctgcagcaaagccaggtgcctcctccggaagttcgaatgacggttccccctctagcaacttcctccgccccagtggccgtccctagtaccgctcccgttacctaccctatgccacagacacccatgggctgccctcagcccacaccgaaaatggagacgccagccatccgtcctccacctcacggtaccacggcacctcataagaacagcgcttcagtccagaactctagtgttgctgtgcttagcgttaatcatatcaagcggcctcacagcgtgccaagctcagtgcagctgccgagtactttgagtactcagagtgcctgtcagaacagtgtccaccctgcgaataaaccaattgcacccaatttcagtgcgccactgccattcggtcccttcagcacgctgttcgagaacagcccaaccagcgcccacgctttttggggcggatcagttgtgagcagccagagcactccggagagcatgctctccggaaagagttcctacctcccaaatagtgatccgctgcaccagagtgacacttccaaggcaccgggatttaggcctcctctgcagcgtcctgctcccagcccctcaggaatcgtgaacatggactccccttacgggtccgtgactccaagcagtactcatctgggcaatttcgcctcgaacatttccggcggacaaatgtacgggcctggcgcaccattggggggtgcacccgcagcggcaaacttcaataggcagcatttcagtccgttaagcctgctaacaccatgttcatcggcttcaaatgattcttccgctcagtcagtgtcaagcggcgtgcgcgcacctagccctgcaccatcttccgtacctctcggttccgaaaaaccaagcaatgtgtcccaagaccggaaagtgcccgtgccaatcggcactgagagatccgctaggataagacaaacgggcacaagtgcaccaagcgtgatcggcagcaatttatctaccagcgtcggacatagtggcatttggagctttgagggcattgggggaaatcaagacaaggtggattggtgcaaccctggtatggggaatcctatgattcatcgacctatgagtgatcccggtgtgtttagtcagcaccaggcaatggaacgggattctactggcatcgtgactccgtcagggacatttcatcagcacgtccctgccggatatatggactttcccaaggtcggcggtatgcccttctctgtgtatggaaacgccatgatcccccctgtggcccctatacccgatggagcaggaggcccaatttttaacggccctcacgctgccgatccttcatggaactctctcattaagatggtatcctccagcaccgagaataatggaccacaaactgtttggacagggccttgggccccacatatgaattctgttcatatgaaccagctggggta

SEQ ID NO: 30126 - DNA, 1446 bp, synthetic construct
  source 1..1446: mol_type = other DNA; note = Synthetic coding sequence
atggccagtgcagcctccgttactagtttagccgatgaggtcaactgtcccatttgccagggaaccctccgcgaaccggttacgattgactgcggacataacttctgtagggcttgcctcacccgctattgcgagattcccggacccgatctggaagagagcccaacctgcccattatgtaaggagcctttccgtcctgggtcttttagaccgaactggcagctcgcgaacgtggtcgaaaacatcgaaaggctgcagttggtctctacgctgggccttggggaggaggacgtttgccaggaacatggcgaaaagatctattttttttgcgaggacgacgagatgcagctgtgtgtcgtatgtcgagaagctggtgagcatgctacacatacgatgagatttctggaggatgcagccgctccttaccgcgagcagatccataaatgcctgaagtgcttaagaaaggaacgggaggaaatccaggagattcagagtagggagaacaaacgtatgcaagtgttgctgacacaagtcagtactaaaagacagcaggtgattagcgagtttgcacatctcagaaagtttctggaggaacagcagtctatcttgctggcccagctagagtcacaggatggagacatcctccggcagagggacgagtttgacctgttggtggccggtgaaatctgcagattctccgcccttatcgaagagcttgaggaaaagaatgaaaggccagcccgtgaactcctcacagacattaggtcaacactgatccgctgcgagacacgaaaatgcaggaagcctgtcgccgtgtcgcccgagctgggccagcggattagggacttcccgcagcaggcgctacccctgcaacgagaaatgaagatgttcctggaaaaactgtgtttcgaactcgactacgagcctgcccatattagtttagacccccaaactagccacccgaagctgctgctgtctgaagatcaccagagggcacagttctcttacaaatggcaaaatagtcccgacaatccacaacggttcgatagggctacatgcgttctggcccataccggcatcacgggaggaagacatacgtgggttgtgtctatcgatctagcacatgggggatcctgcacagtcggcgttgtaagtgaggacgtgcagagaaaaggcgaactgcgtctcaggccagaagaaggggtctgggccgtaaggcttgcctggggtttcgtgtctgccctcggatcattccctacgcgtttaactctcaaagagcagccccgacaggtgcgtgtgagcctggactacgaggttggctgggtgaccttcacgaatgccgttacccgggaacctatatatacattcaccgcttcttttacccggaaagtgatcccattctttggcctttggggcaggggttccagcttcagcctttcctcctag

SEQ ID NO: 30127 - DNA, 1566 bp, synthetic construct
  source 1..1566: mol_type = other DNA; note = Synthetic coding sequence
atgccttctccccaactccttgtgctgtttggctctcagaccggaacagcacaggacgtatctgagaggttggggagagaagctcggagacgcagactggggtgccgagttcaagctcttgatagttatcccgtcgtgaatctcatcaatgaacccctcgtgatcttcgtgtgcgctacaacgggtcaaggtgatccccctgataatatgaagaatttctggaggtttatctttcgaaagaatctcccttccaccgcgttatgccagatggactttgcagtcctggggctgggggactccagctacgcaaagttcaattttgttgcaaaaaagctacacagaagacttcttcagctgggcggaagcgcattacttccagtttgcctcggagatgatcagcatgaactgggcttgccaagcaagtttacccttctgtttctgcaagaagctccttctaccggatctgaagggcagagagttgcacaccccggtagccaggagcctccctcagagagcaagccattcctggccccaatgatcagtaatcagcgggtgactggcccttctcatttccaagatgtgcggctcatagagtttgatatcctagggagtgggatctcctttgctgcaggcgatgtcgtgcttatccagccgtcgaatagcgccgctcatgtccagagattctgtcaggtcttgggtctagaccccgaccagttgtttatgctgcagcctagggaacctgatgtgtcctctccaacacggctgccacagccttgctccatgcgccacctggtgagccattatctggacatcgccagcgtgccaaggaggtcttttttcgaactactcgcatgcctcagtttgcacgaactggagcgagagaagcttctggagttttcctcggcgcagggccaggaagagctgtttgagtactgcaaccggcctagacgcacaattttggaagtcctgtgtgatttccctcacacagctgccgctattccgcctgactacttgctggacctgattcccgttattcgaccacgggcattcagcatcgcctctagtcttctcacccaccctagccgcttgcagatccttgtggctgtggtgcagttccagaccagactgaaggaaccaagacgagggctgtgctcatcctggctggcatctcttgaccccggacaaggccctgtacgggtgcccctatgggtgaggcccggatctctcgctttccctgaaacccccgacacccccgttattatggtgggcccaggcaccggcgtcgcacccttccgtgccgcaatccaggagcgcgttgctcagggacagacgggcaattttcttttttttggttgcaggtggcgagaccaggatttttattgggaggccgagtggcaagaactggagaagagggactgcctgaccctaattcctgctttcagccgggagcaggagcagaaggtgtacgtgcaacataggctacgagagttggggtcactggtgtgggagttattagacagacaggctacgccttcaccctgccagcgtacctcccgcaagccttag

SEQ ID NO: 30128 - DNA, 753 bp, synthetic construct
  source 1..753: mol_type = other DNA; note = Synthetic coding sequence
tgacagccgagtcccgtggagccgagaggcccattctacttctgtaggctgcttctcgatgacctgggtatgaattcctgggaccggcgtaaaaacttccatctgctgaagaagaacagcaagttgcttcgcgaattaaaaaatctggactcaagacagtgccgagaaacacacaagattgcagtgttctatatcgccgaagggcaggaagataagtgtagtattttgtccaacgagcgagggagtcaggcttacgaagattttgtcgccggactaggatgggaggtggacctgtcaactcattgtggatttatgggcggtctgcagcgcaacggctctacgggtcagaccgccccttactatgccaccagcacagtggaagttatcttccatgtttcaacaaggatgccctccgattccgacgacagcctaaccaagaagctcagacatttgggtaatgacgaggtgcatattgtgtggtccgaacactccagagactatcgtcggggaattatacctactgcattcggtgatgtgtccatcattatctaccctatgaagaatcacatgttctttatcgcaatcaccaaaaagccggaagtccccttcttcggcccactgtttgacggggctatcgtctccggcaaattgctgccaagccttgtctgcgccacgtgcattaatgcttcgcgggctgttaaatgtctgattccgctgtatcaaagtctttacctgtttgcgctgaacgtttag

SEQ ID NO: 30129 - DNA, 345 bp, synthetic construct
  source 1..345: mol_type = other DNA; note = Synthetic coding sequence
atggtcttaattctggggagaagactgaaccgcgaggatctcggcgtgagagactctcctgccaccaagcggaaagttttcgagatggatcccaagagcctgacaggccacgaattctttgacttctcaagcggctcctcccatgccgagaacattctgcagatcttcaatgagttccgtgactctcgattattcactgacgtcatcatctgcgtcgaggggaaggagttcccatgtcacagggccgtcctgtcggcttgttccagctactttcgggcaatgttctgcaacgatcaccgcgaaagtcgggagatgttagtcgagattaatggcattctggcttag

SEQ ID NO: 30130 - DNA, 1830 bp, synthetic construct
  source 1..1830: mol_type = other DNA; note = Synthetic coding sequence
atggctagccttagtcgagcacttagagttgctgctgcacaccctagacagtcccctacgcgtggtatggggccatgcaacctgtcctctgcagccggtcccactgctgaaaaatcggtcccgtaccaacgtacgctcaaagagggacagggcaccagcgtcgtggcacagggaccatcgcgccctctgccatccacagcaaacgtcgtggtaattggcggaggcagtctaggatgtcagacactgtaccatttagcaaagctgggcatgtcaggcgctgtacttctagagcgggagcgcctgacaagcgggaccacttggcacacagcagggttactctggcagcttcgacctagcgacgtcgaggttgagctgcttgcccatactcggagggtggtaagccgagagttggaggaggagacaggactccacacgggctggattcagaatggagggctgttcattgccagtaatcgccagcgtctggatgaatataagagactgatgtcactcgggaaggcgtacggagtggaaagccacgtcctgtccccggctgaaaccaaaaccctgtaccccctgatgaatgttgacgacttgtacggcaccctgtatgtcccccatgatggtaccatggatccagctggtacctgcaccactttggcacgcgcagcctcggcccgaggagcccaggtcatagagaattgtcctgtgaccggtatacgcgtgtggaccgacgactttggtgtccgaagggtcgcaggcgtagagactcaacacgggtcaattcagaccccttgtgttgtgaactgtgcaggggtctgggcctccgcagtgggaagaatggccggagtcaaagtgcctttggtcgctatgcaccatgcttacgtggtgacagaacgcattgaaggcatccagaatatgccaaatgtgagagaccatgatgcatctgtgtacttgcggttacagggcgacgcacttagtgtcggaggatacgaagccaatccaatcttttgggaggaggtatcggataaatttgccttcggcctgttcgatctggattgggaagttttcacacagcacatcgaaggggcaataaacagggtgcccgtgctggaaaagactggaattaagtctaccgtgtgcgggcctgaatctttcacaccagaccataagcctctgatgggtgaggctcctgagctgcgaggcttcttcctgggctgtgggttcaacagcgcaggcatgatgctgggcggaggttgcggacaggaactggcacactggatcatccacgggaggccagagaaggacatgcacggctatgacatccggaggtttcaccacagtctgaccgaccatccaaggtggataagggagcgatcccatgaatcttacgctaaaaattactctgttgttttccctcacgatgagccattagccggaaggaacatgagaagggaccccttgcacgaggagttactgggtcagggatgcgtctttcaagagcgtcacggctgggagcggcctggatggttccatcccagaggacctgcccctgtgctcgagtatgactactacggcgcatacggatctcgggcacatgaggattacgcttaccggagactcctagctgatgagtacacctttgctttccctccacaccatgatacaatcaagaaggagtgtcttgcttgccggggagcagccgctgttttcgatatgtcttactttggcaagttttacctggttggcctcgatgccagaaaggccgctgattggctgttttctgccgatgtgtcacggcctcccggattacaccgggtgcatgtatag

SEQ ID NO: 30131 - DNA, 129 bp, synthetic construct
  source 1..129: mol_type = other DNA; note = Synthetic coding sequence
atggataatatgagccctagactccgcgcttttctgtccgaacccatcggcgagaaagatgtgtgttgggttgacggcatctcccacgagcttgccattaacttggtcaccaaggggataaacaagtag

SEQ ID NO: 30132 - DNA, 3120 bp, synthetic construct
  source 1..3120: mol_type = other DNA; note = Synthetic coding sequence
atggtttcatcggctcaaatgggttttaaccttcaggccctcctcgagcagctgtcccaggatgagctgagcaagtttaagtatctgattactaccttttccctggcccacgagctccagaagattccacacaaggaaatggcaagcttgcaggtattcgagaaaatgcacagaatggacctgtccgaaagagcaaaagacgaagtgcgtgaggcagctttgaaaagtttcaataagaggaagcctctcagcctgggtatcacacggaaagaacgccctcccttagatgtggatgagatgctggagcgctttaaaacggaggcccaggcgttcaccgagaccaaaggaaatgtgatatgtctcgggaaggaggtatttaaggggaaaaaacccgacaaagacaatcgctgcagatacatcctaaagacaaagtttagggaaatgtggaagtcatggcccggagactccaaagaggtccaggtgatggcagaacggtacaaaatgttaatccccttttcgaatccgagggttctccccggacctttttcatatacggtcgtgctgtacggcccagccggtcttgggaagaccaccttggcccagaaacttatgctagattgggctgaggataatctgatccataagttcaaatacgcattctacttgtcttgcagggaactgtctcgactgggtccttgttcttttgcggaactggtgttcagagactggcccgagctgcaagacgatatcccacacatcctggctcaggctcggaagatattgtttgtgatagacggctttgatgagctgggtgctgcccctggagcattaattgaagatatttgcggtgactgggagaaaaaaaagcctgtgcctgtgctgttggggagcctgctaaaccgcgttatgctccccaaagcagccttactggtgaccacacgaccaagagcccttagggatcttagaatactggcggaggaacccatttacattcgtgttgaaggcttcctggaggaggacaggcgcgcatatttcctgcgtcattttggggatgaggatcaagctatgagagctttcgagctcatgagaagcaatgcagccctgttccagctgggcagcgccccagcggtttgctggatcgtctgtacaactttgaaacttcagatggagaagggggaggaccctgttcctacttgtctgaccaggaccggccttttcctccggttcctttgtagtcgattcccccagggcgctcagctccgaggggcattgaggactttatccctgctggccgcacaagggctttgggcacagacatcagtactccaccgagaggacctcgaacgccttggcgttcaggagagcgacctaaggctgttcctggatggggacatcctgcgacaggaccgggtgtccaaagggtgttactcattcatccatctcagttttcaacaattcctcacagcactattttacaccctggagaaagaagaggaagaggacagggacggccacacctgggatattggtgatgtgcaaaagctccttagcggagtggagagattgagaaacccggatctcatacaagcaggctattacagctttgggctcgcaaatgagaagagagcaaaggaacttgaggcaacatttggatgccgcatgagtcccgacatcaaacaagaactgctacggtgcgacatttcatgcaaaggcggacacagtaccgtcacagacctgcaggagctgttagggtgcctttacgaaagtcaggaagaagagttagtaaaggaagtcatggctcagtttaaagaaatcagcttgcacttaaacgccgtcgacgttgtgccttcctctttttgcgtcaagcactgccggaatctgcagaaaatgtccttgcaagtgattaaggagaacctgccagagaatgtgacggccagtgagtccgatgcagaggtagaaaggtcacaagatgatcaacacatgctccccttctggacagacttatgctccatttttggcagcaacaaagatctgatgggactcgctataaacgattcctttttatccgcctcactagtccggattctgtgcgaacagatcgcaagtgacacatgccacctgcagcgggttgtgttcaagaatatatctcccgcagatgctcaccgcaatctgtgcctggccctgagaggacacaagaccgttacctatctcacactccaggggaatgatcaggatgatatgttccccgcattgtgcgaggttcttcgccacccagaatgcaacctccgatatttgggcctagtgtcctgtagtgctaccactcagcaatgggctgacttgtcactggctctggaagttaaccagagtttgacatgtgtgaacttaagtgataacgagctactcgacgagggggctaaactcctctacaccacactcagacaccctaaatgcttcctgcaacgcttgagccttgagaactgtcatttaacggaagcaaactgcaaggacctcgccgctgttttagtagtgtctcgcgagctgacgcacttatgcttggctaaaaatcctattggcaatactggtgtgaaattcctttgtgagggattacggtatcctgaatgcaaactgcagacgctggtactctggaattgcgatatcacttccgatggatgctgtgacttgaccaagttgctccaggagaaatcaagccttttatgtctcgatctgggacttaaccatatcggcgttaaaggaatgaagttcctgtgcgaagccctgcgaaagcccctttgtaacctaaggtgcctctggttatggggatgttccattccaccattttcttgcgaagacttgtgctctgctttgagttgtaaccagagtctagttacccttgatttggggcagaatccgcttgggtctagcggcgtcaaaatgctgtttgagacgttgacctgcagttcaggaaccttaaggaccttacgtctcaagatcgatgatttcaacgacgagttgaacaaacttctagaggagatcgaggagaagaacccacaactgattatagacaccgagaagcatcacccatgggccgagaggccgtcgtcgcacgactttatgatttag

SEQ ID NO: 30133 - DNA, 1899 bp, synthetic construct
  source 1..1899: mol_type = other DNA; note = Synthetic coding sequence
atggacaccatgatgttgaatgtacgcaacttgttcgagcagctcgtcagaagggtagagatactcagtgaaggaaacgaggtacagtttatacaactagccaaggatttcgaagacttcaggaagaagtggcagcgtactgatcatgaactcggtaaatataaggatcttctaatgaaagcagagaccgagagaagcgccctcgacgtcaagctgaagcacgcacgcaatcaggtggacgtggagattaaaaggagacagcgagccgaggctgattgcgagaaactggaacgacaaattcagctgattagagagatgctaatgtgcgacacgagcggatccattcagctgtccgaagaacagaaaagtgcactggcttttcttaatcgtggacaacctagctcttctaacgcgggaaataaacgcctctctacaatcgatgaatccggctctatcctgtcggatattagctttgacaagactgatgagagcctggattgggattcttctctcgtgaaaaccttcaagctaaaaaagcgcgagaaacgtcgaagcacttcacgtcagttcgtggacggccctcctggtccagttaagaaaaccagaagcattggctccgctgtcgaccaggggaacgaatctattgtcgccaagacaacggtcacagttcccaatgatgggggacctatcgaggctgttagtactatcgagacagtcccctattggacgcgttcacgcagaaagacgggcacactgcagccctggaattctgacagcaccctgaatagcagacagttggaaccccgaacagagaccgactccgtcggcacaccacagagcaacggagggatgcgcttgcatgattttgtgagcaagaccgtgatcaaaccggagtcttgtgtcccatgcggcaaacggatcaaattcggaaaactctcgctcaaatgtcgggactgccgagttgtgtctcaccctgagtgtcgagaccgctgcccattgccatgtattccaactctgattggtactcctgtcaaaatcggagagggaatgctggctgactttgtgtcacagacttcccccatgattccaagtatcgtggtgcactgtgtgaacgaaattgaacagagaggactgactgaaacggggctgtatcgcatttccggctgtgatcgtacagtgaaggagctgaaagagaagttccttagggtgaagaccgtaccactcctgagcaaggtggatgatattcacgccatctgtagtctattaaaggacttcctgcgtaacctaaaggaacctctgctgactttccgccttaaccgagcttttatggaggcagccgagatcaccgacgaagacaattctatcgcagcaatgtatcaggccgttggtgaattaccacaggccaaccgggatactttggcgtttctgatgatacatctgcagcgggtcgcacagtctcctcacacgaaaatggacgtagctaatctcgccaaagtatttgggccaacgatcgtggcccacgccgtacctaatcccgaccccgtgaccatgttgcaggatataaagaggcagcccaaggttgtggagagactgctgtctctcccactcgagtattggtcacagtttatgatggttgaacaggagaacatcgaccccctccatgttatagaaaactccaatgccttctctacccctcagacccctgatattaaggtatctcttctgggcccagtaactacgcccgagcatcagctgttaaaaaccccaagctcaagctccttatcacagcgggtccgctccacactgacaaagaacaccccgaggtttggctccaagagcaagtctgccacgaacctgggtcgccagggcaacttctttgctagtcccatgctgaagtag

SEQ ID NO: 30134 - DNA, 189 bp, synthetic construct
  source 1..189: mol_type = other DNA; note = Synthetic coding sequence
atgtccatatcctctgatgaggtgaattttttggtctacaggtatctccaggagagtggcttcagccatagcgcattcacgtttggcatagagtctcatatttctcagtctaatataaacggcgcacttgtacccccagccgctctcatcagcatcatacagaagggtctgcagtacgtagaggcctag

SEQ ID NO: 30135 - DNA, 417 bp, synthetic construct
  source 1..417: mol_type = other DNA; note = Synthetic coding sequence
atggagcccagcgcacagcagctacagctagccgcatctctgcctgccaatctatctaatttctgccaaggatctgagatgccgacaacgtcacgcccagcactcgacgtcaaagggggtacatcccctgcaaaggaggatgccaatcaggagatgagctccgtggcgtacagtaaccttgcggtaaaagacagaaaggctgtggccatcctgcattacccaggtgtcgcctcgaacggcactaaggcatccggagccccaactagcagttccggttcgccaatcggaagccccaccactactccccctacaaaaccaccttctttcaatctccatcctgccccacacctgctggcctcaatgcacctccagaagttgaattcccaataccaaggaatggccgcagccactccatag

SEQ ID NO: 30136 - DNA, 1473 bp, synthetic construct
  source 1..1473: mol_type = other DNA; note = Synthetic coding sequence
atgaacggcgctctggaccattccgatcagccggatccagatgccatcaagatgttcgtcgggcagatcccccgatcttggagcgaaaaggagctgaaggaattgttcgagccctacggagctgtgtatcagatcaacgttttgagagacaggtcccagaacccccctcagtctaagggctgctgttttgtgacgttttacaccagaaaagccgcactcgaagcacaaaacgcactgcataatataaagacccttccaggaatgcaccaccctattcagatgaaaccagcagactctgaaaaaagcaatgccgtggaggatagaaagctcttcatcggcatggtttctaagaaatgtaatgaaaatgatatccgcgtcatgttcagcccattcggacagattgaagagtgccgtatcttgagggggcctgacggcttgtccagaggatgtgccttcgtgaccttcagtacacgtgcgatggctcagaacgccattaaggcaatgcaccaatcacaaaccatggaaggatgcagttcaccgatcgtagttaaatttgctgacactcagaaagacaaagagcaaaggaggctgcagcagcaattagcccagcagatgcagcagctcaacactgccacatggggaaatctcacggggcttggagggctgaccccccagtatttagccctcttacagcaggccaccagctcttccaaccttggtgcgttttcaggcatacaacagatggctgggatgaacgctctgcagttgcagaatctcgctaccctcgcagctgcggctgctgcggcacagactagtgcaacaagtaccaatgcgaatccactgtctaccacctcaagtgccctgggagccctcaccagccccgtcgcagccagtaccccaaacagcacggccggagccgctatgaactcactgacttccttaggaacacttcaaggcctggccggtgcgactgtcggacttaataatataaatgctcttgcggttgcccagatgctttcaggcatggccgctctcaacggcggattaggggctaccggcctgacgaatggcacggcgggaaccatggatgctctgacgcaagcatactctggaattcaacagtacgcagctgcagcactgcccacgctgtattcccagtcacttcttcagcagcagtcagcggcaggatctcagaaggaagggccagagggcgcaaatctgttcatctaccacctcccacaggagtttggggaccaggacatactgcagatgttcatgcctttcggtaacgtgatctcagccaaggtgttcatcgacaaacaaacgaatctgagcaagtgtttcggctttgtgtcctatgataatcccgtatcggcccaggcagccatccaggctatgaacggcttccaaattggtatgaagagactcaaggtccaactgaaaaggagcaagaacgattctaaaccttactag

SEQ ID NO: 30137 - DNA, 357 bp, synthetic construct
  source 1..357: mol_type = other DNA; note = Synthetic coding sequence
atggccagttcggccagagagcacctcttgtttgtgagaagaaggaacccccaaatgcggtatacgctgagtccggagaatttgcagtctctcgctgctcaatctagcatgccagaaaatatgacgctgcagcgggcaaatagtgacaccgacttagttacgagcgagtcgcgttcatctttgactgctagtatgtatgagtacacactgggccaggctcaaaatctcattatcttctgggatattaaggaagaggttgatccatctgattggattggcctgtaccacatcgacgaaaattcccctgcgaatttctgggactcgaaaaaccgaggagttactggcacccagaaatag

SEQ ID NO: 30138 - DNA, 1620 bp, synthetic construct
  source 1..1620: mol_type = other DNA; note = Synthetic coding sequence
atggccactagtgctccactgcggagcctggaagaggaggtcacatgcagtatctgcctcgactatttgcgcgatcccgtcaccatcgactgcggccacgtgttttgcagaagttgcaccacggacgtgcggccaatttccggatcccgccctgtctgcccactgtgcaagaaacccttcaagaaggagaatatccgcccagtgtggcagctggcttcacttgtggaaaacatcgaaagactcaaggttgacaaggggcgacagccgggagaagtgaccagagaacaacaggacgctaaactgtgcgaaaggcacagggaaaagctccactattattgtgaagatgatggcaagctcttatgcgtgatgtgtcgggaatcacgcgagcacagaccccatacagccgtactgatggagaaagccgcacaaccgcatagggagaaaatacttaaccacctctcaacacttcgcagggatagggacaaaattcagggctttcaggccaagggggaggctgacattctggccgctttaaagaagctgcaagatcagagacaatatattgtcgctgaatttgaacagggccaccagtttctcagggagcgagaggaacacttgctagaacagctggcaaagttggaacaggaactaaccgaagggagagagaaattcaaaagcagaggcgttggagaactggccaggctggcgctggtaatttccgagctcgaaggtaaggctcaacagcctgcggctgaactaatgcaggacacacgcgatttccttaataggtacccaagaaagaaattctgggttggaaaacccattgcaagggtcgtcaagaagaagactggcgaattctctgacaaactgctgtccctgcagaggggcctgcgagagtttcagggaaagctgctcagggacctcgagtacaagactgtttctgtgactctcgatcctcaatctgcaagtggctatttgcagctgtctgaggactggaagtgtgtgacgtatacttctctgtataaaagcgcttaccttcaccctcagcagtttgattgcgagcctggcgtgctgggctctaaagggttcacttgggggaaggtctactgggaagtagaggttgaaagggaagggtggagcgaagacgaggaggaaggagatgaggaggaggagggggaagaggaggaagaagaggaagaagctgggtacggtgacgggtatgatgattgggagactgatgaggatgaggagagtctcggagacgaggaagaagaggaggaggaggaggaggaggaagttcttgaaagctgcatggtgggggtggcccgagactcagtgaaacggaagggggacttgtcactccggccagaggatggcgtctgggcacttagactcagttctagcggaatctgggctaacaccagtcccgaagctgaactatttccagctctgagaccccgaagagtgggcattgccctcgactacgagggaggaactgtgaccttcactaacgccgagtcccaggagctgatctacacattcacggcgacctttactcggagactggtccccttcttatggctcaagtggcccggaacacggcttttactccggccatag

SEQ ID NO: 30139 - DNA, 270 bp, synthetic construct
  source 1..270: mol_type = other DNA; note = Synthetic coding sequence
atgagtgaacagggcgatctaaatcaagcaatcgccgaagaaggcggaactgagcaggagacagccaccccagaaaatggtatcgtcaaatctgagtctttggatgaagaagagaagctagaattgcagaggagattggaggcccagaatcaagaacgcagaaaaagcaagtctggtgccggaaaaggcaagctaaccagaagcctggcagtttgcgaagagagttccgcgcgaccaggaggcgaaagcctacaggatcaaacactctag

SEQ ID NO: 30140 - DNA, 909 bp, synthetic construct
  source 1..909: mol_type = other DNA; note = Synthetic coding sequence
atggtcacagagcaggaggtggacgccataggacaaacattggtggatcctaagcagcccctgcaagctaggtttagggccctgttcacacttcgagggcttggtggacccggagccatcgcctggatatctcaagcctttgacgacgactctgctcttctcaagcacgagctggcctattgtctgggtcagatgcaggacgccagggcgatccctatgcttgtggatgttctgcaagatacgagacaggagccaatggtacgccatgaagccggagaagcactcggcgctataggggatccagaggtgctggagatcctgaaacagtactcgtccgaccccgtgattgaggtcgctgagacttgccagctggctgtccggagactggagtggttgcagcagcacggcggagaacccgctgctggcccatacctgagcgttgacccggcaccacctgccgaggagcgggacgtggggcgactgagagaagcccttctggatgaaagccgccctctgtttgaacgatacagggcaatgttcgccctccggaacgccggtggtgaggaagctgcacttgctctggcagaaggactacattgtggaagcgctctgtttcgccatgaggtgggatatgtcctggggcaacttcagcacgaggccgcagtgcctcagttggcagctgctctggcccgttgcaccgagaaccctatggtgcgccatgagtgcgccgaagcacttggagctatcgccagacctgcctgcttggcagctctgcaggcacacgccgatgaccccgaaagagtggtgcgcgaatcatgtgaggtggccctggacatgtacgaacatgaaacaggtcgcgcttttcagtatgctgacgggcttgagcaacttaggggcgctccaagctag

SEQ ID NO: 30141 - DNA, 1521 bp, synthetic construct
  source 1..1521: mol_type = other DNA; note = Synthetic coding sequence
atgagcgtattatctccgggagatctgaagcccaagcggggatcgccacacagaggatccttggaccggaccgatgcgtccactgacctggctatgcgctcatggccttccgaactaggctccagaacatgctctaccagcgccaccactactgccccatccaattctacacccattgccagacaccccggaaggaccaagggctacaacagcgatgataatctgtgcgagccatctctggaattcgaggtgccaaaccacaggcagtatgtgagccgcccaagcagcttagagagttcaagaaacaccagctccaattcatctcccctcaacctcaagggatcatccgaacaactccatgggcgatcagaatcattctcttcggaggatctgattcccagccgggatcttgcaacactgccgcgagaggcaagcaccccaggacggaacgctctgggtaggcatgagtacccgctgccaagaaatggtcccctaccccaggagggagctcagaaaaggggcactgcaccaccttatgttggggtgcggccttgctccgcaagcccatctagcgagatggtgaccttggaagagttcctcgaggaaagcaaccgcagctctcccacacatgatacgcccagctgccgtgacgacctgcttagtgattattttagaaaggcctcagacccccctgctattggtggccagcccggaccaccagctaaaaaagaaggcgctaaaatgcctacaaacttcgtggcccctactgttaagatggctgcgccaactagcgaaggtcggccactcaaacccggacagtatgtaaaaccgaattttcgactcaccgaggctgaggcacctcctagtgtggctccccgtcaggcccagccaccacaatccctgtctttgggacgtcctcgccaggctcccgaggccctcggaggtagagagacggggagccacacgctccagagtcccgctccaccgagctcgcactcattggctagagaacgcactccgcttgttggtaaggcaggtagcagttgccaggggccaggcccaaggagtagacctctggacaccaggagatttagcctggcccctccaaaggaggagcggcttgccccactgcaccaaagcgccaccgcgcctgcaattgccaccgctggcgctggagcagctgcggctgggtctggttctaactctcagttgctccatttttctcctgccgcagctcccgctgccaggactaagccaaaggcaccccctcgctcaggggaggtggccaccatcactcctgtaagagctggcctctcactcagcgagggcgatggtgtgccaggacaaggttgctctgagggtttgcccgctaagtccccaggccgttcacccgatctcgcccctcaccttggacgcgctcttgaagactgttccagaggaagcgtctcaaaaagctctcccgcttcccccgagcctgggggagacccacagactgtgtggtatgaatacggttgtgtttag

SEQ ID NO: 30142 - DNA, 678 bp, synthetic construct
  source 1..678: mol_type = other DNA; note = Synthetic coding sequence
atggcacaaacggtgccgccttgtgaactgccttgtaaggagtacgacgtggccaggaacaccggagcttatacctctagcggtctggcaacggccagcttcagaacatctaaatatctgcttgaggagtggttccagaactgctatgcccgataccaccaggcattcgctgatagagatcagtccgagaggcagcgacacgaatcccagcagctcgctacagagacgcaggccctggcccagcgcactcagcaggactcaacgaggacggtcggggaacggcttcaggacacacattcttggaagagcgagctccaacgcgaaatggaagctctagctgcagagacaaacctcctactcgctcagaaacagcggttggagagggcactcgacgccaccgaggttcccttttccatcacaaccgacaatctgcaatgtcgcgagaggcgcgagcatcccaacttagtgagggatcacgtagagactgaactgcttaaagccctgcctcctgcactctcccagtgcctgaaaaattcttgttcaagccgaaaattgtccgcgaggaacaagggtacatgccagctgatggaaactttgactgtacacggcgaggctaacccgggtattgaggggagacgcacaagagccctcgcgcacaaagaagtcccgagcggctag

SEQ ID NO: 30143 - DNA, 309 bp, synthetic construct
  source 1..309: mol_type = other DNA; note = Synthetic coding sequence
atggctaatgacagtcctgccaaatccttagtcgacatcgatctgtcttctctgcgggatccagctggcatttttgagcttgtcgaggtggtcggtaatggtacctacggacaggtgtacaaaggccgacacgtgaagaccgggcagctcgccgctatcaaggtgatggacgtgacagaagacgaagaggaggagatcaaactggaaataaacatgttgaaaaaatactcccaccaccgaaacattgctacatattacggcgctttcattaaaaagagccctcccggtcacgatgaccagctgtggtag

SEQ ID NO: 30144 - DNA, 369 bp, synthetic construct
  source 1..369: mol_type = other DNA; note = Synthetic coding sequence
atggcaacttcagccccactacgatcattagaagaggaggtgacatgtagtatttgccttgactacttgcgggatcccgtcaccatcgactgtggccacgtgttttgccgttcgtgtactaccgacgtgcgccctatttccggcagccgacctgtctgccccctgtgcaagaagcctttcaagaaagagaacattcggccagtttggcagctggcctccttagtcgaaaacatagaacgtctgaaggtggacaaggggaggcagccaggagaggtgacccgcgagcaacaagacgccaaactctgcgaacgacatcgcgagaagctgcattattactgcgaggatgacggtaaactgctgtgtgtgtag

SEQ ID NO: 30145 - DNA, 312 bp, synthetic construct
  source 1..312: mol_type = other DNA; note = Synthetic coding sequence
atgagcggcggactgttgaaagccctgcggtcagattcatatgtcgagttatctcagtaccgggatcaacacttcagaggagataatgaggagcaggaaaagctccttaagaagagctatgcggagaacgctatgcggtacatcaacgggacaagacttgatgatcggatcattagaacggactgggatgctggtttcaaggaagggaggcaatatggcagagggaggtctgggggacaggtgcgcgatgagtaccggcaggactatgacgctgggagaggaggttacggcaagctggcgcagaaccagtag

SEQ ID NO: 30146 - DNA, 894 bp, synthetic construct
  source 1..894: mol_type = other DNA; note = Synthetic coding sequence
atgtggccatttccttcccggtccctgttccctccaccaacccaagcgtggctccaaaccgtgagtagcgacccagaagcccagggttggggagcctggaatgaaacaaaggaaatactgggtccagaagggggagaagggaaggaagaaaaagaggaggaggaggatgctgaagaggatcaggacggagatgccggttttctgctctctctgctggaacaggagaacctggccgaatgtcctctccccgaccaagagttggaagccatcaagatgaaagtgtgtgcaatggaacaagcagaaggcacacccaggcctcccggagtccaacaacaagcagaggaagaggaaggaacggccgcaggacaattgctcagtcccgaaactgtaggatgtccactttcggggacacctgaggagaaagtggaggcagaccaccgttctgtgtacgtcggaaacctgtgcctacatcgcgtttgccaccaaggtctgcgcgcaggccgtcgtggcgctggacccgagcctttgcctgggcctggacaccagggggcagccgaaaagaatcagctaccctgggatcagctacaccgccctaggggaccctctcgaacaccaagattacaggggggaaccctgccacctcagcgtccccctggtcaggcccctgctcaaaccacgagggcggaaccaggtccatggaaaattctgaccatggtcttcactgtcctgaaagggcgacccgacttcgaaaggggggctggggcatggatacgctccaagcctttggtgctccatccgggagcaggcgcaggatccggtgcgggagctcgccctgaagagcgaggtgtgcagtcaagccactggccacccttggggggaggcatggcccagtag

SEQ ID NO: 30147 - DNA, 1059 bp, synthetic construct
  source 1..1059: mol_type = other DNA; note = Synthetic coding sequence
atggacatcgataaagatctcgaggccccattatacttgacgccggaaggttggagtctttttctgcagcggtattaccaggtggtgcatgagggtgccgaattaaggcatctggatacccaggttcagcggtgcgaggacatcttgcagcagctacaggccgtagtacctcagatcgacatggaaggggatcggaatatttggatcgttaaacccggtgctaaatcaaggggcaggggtattatgtgcatggatcatctcgaagaaatgctaaagctcgttaacgggaaccccgtggtcatgaaagacggaaagtgggtggtccagaaatatatcgagaggccgctgttaatctttggtacgaaatttgacttgcggcagtggtttttagttaccgactggaaccctttgaccgtgtggttttacagagactcttacattcgatttagcacgcaacctttcagcctcaaaaatcttgacaattctgtccatctctgcaacaacagtattcagaaacatctagaaaattcctgtcataggcaccccctgctccctccagataatatgtggagctcccagcggttccaggctcacctccaggaaatgggggcacctaacgcctggagcacgataatcgtacctggaatgaaggacgccgtcatacacgcactgcagacgagccaggatacggttcaatgccggaaagcgagcttcgagctctacggagccgattttgtgtttggtgaggatttccaaccctggctgatcgagataaacgcctcgccaactatggcaccgtccactgcagtcacggcaagactatgcgcaggggtccaggcagataccctgcgggtggttatagatagaatgctggacaggaactgcgatacaggagccttcgagctcatttataagcagcctgttacgacctcccctgccagtacgcccagaccctcttgtctccttccaatgtattctgacaccagagcccgttcaagtgatgatagcaccgcctcatggtgggctctccgcccatgcagaccacaggccagaccatag

SEQ ID NO: 30148 - DNA, 363 bp, synthetic construct
  source 1..363: mol_type = other DNA; note = Synthetic coding sequence
atggaattagatctcttcctaggactggatgacgtctttcccagactgttacacggtctcctgcacagagccttctcagtgttcctgttcaatactgagaacaaattgctcctgcagcagaggtcagacgccaagattacatttcctgggtgctttacgaatacctgctgtagccaccccctctctaatcctgccgagctggaggaatccgacgccttgggcgttaggcgggctgctcaaaggaggctcaaagcagagctcggcatcccccttgaagaggttacttctagccctacacagccttataaactcaaaccaaagcataccataaaacggttcctgatcaaatttctgaattcctag

SEQ ID NO: 30149 - DNA, 339 bp, synthetic construct
  source 1..339: mol_type = other DNA; note = Synthetic coding sequence
atggaggagatccccgctcaggaggccgcagggagcccgagagttcaattccagagcctggagacgcaatctgaatgtctgtcgcctgagcctcagttcgtgcaggataccgatatggagcaaggcctaacaggagggttccctatttctaaaccggacggtatctcccaactggagcaggacctccaggtctttgatttggaaaccaaaacaagagaagtcttgagagatgattgttctgacggggaaactagagaggaaaataagttgctcatccccaagcagaaaatctcagaggaggtacacagttataaggtcagggttggcagacttaaatag

SEQ ID NO: 30150 - DNA, 1818 bp, synthetic construct
  source 1..1818: mol_type = other DNA; note = Synthetic coding sequence
atgtccgaaatcctgaagcagaaggacacagaacctactaatttcaaggtcgcggcagggacactggatgcgtccaccaaaatctatgcagtgcgtgtggacgccgtgcacgcagacgtatacagagtgctaggcggattaggcaaggatgctcctagcctcgaggaggtggaggggcacgtcgccgatggtagcgcaactgagatggggactaccaagaaagcggtgaaaccgaagaagaagcacctccaccgcaccatagagcagaacatcaataatctgaatgtcagcgaagcagacaggaagtgtgaaatagacccaatgttccaaaaaactgccgcatcctttgatgagtgtagtactgccggtgtgttcctttctacactgcactgccaggattaccgcagtgaattgcttttcccctcggacgtccagaccctgagtactggagaacccttagaattgcccgaattaggctgcgtggaaatgaccgacctgaaagcaccactgcaacaatgcgccgaggatcgccagatatgcccgagcctggcgggttttcagttcacacaatgggactctgagacacacaatgaatctgtgagcgccttggtggacaagtttaaaaagaacgatcaagtgttcgatataaatgctgaggtcgatgagtctgattgtggcgattttccggatggctcattaggcgatgattttgacgccaacgatgaacccgaccacaccgctgtgggggatcacgaggagttccgatcttggaaagaaccctgccaggtacagtcatgtcaagaggagatgattagtttgggggacggagacatacggaccatgtgtccacttctctcaatgaagccaggagagtattcgtatttttctccacgtacaatgtcaatgtgggccggaccagaccattggcgcttcagaccacgtcgcaagcaagacgccccatcccagtccgaaaacaaaaaaaaatcaactaaaaaagacttcgaaatcgacttcgaggacgacatagactttgatgtgtatttcaggaagaccaaggccgcaaccatcctcactaaatcaactctagaaaatcaaaactggagggccactactttgcccaccgattttaattacaacgtcgacacattggtgcagctgcatctcaaaccaggcacacgcctgctgaagatggcccaggggcatcgcgtcgagactgaacactacgaggaaatagaggactacgactacaacaaccccaacgatacttcaaacttctgccccggtctgcaggcagccgatagcgacgacgaggacctggacgatctatttgttggccctgttggcaattctgatctcagcccgtacccgtgccatccccctaagaccgcacaacaaaacggggacacccctgaagcacagggattagacataacaacctatggggaaagcaacctcgtcgccgagccccagaaagtgaataagatcgaaatccactatgctaagacagccaaaaagatggacatgaaaaaactcaagcagtctatgtggagcctcctgacagccctgtctggtaaggaagctgatgctgaagccaaccacagagaggccggaaaagaggctgctctggcggaggtggctgacgagaaaatgctgagtgggttgacaaaagacttgcagcggtccctaccccctgttatggcacagaacctgtcgattcctctggccttcgcatgcttgttgcacctcgccaatgagaaaaacctgaaattagagggcactgaagacttgtctgatgtgctagtacgccagggggactag

SEQ ID NO: 30151 - DNA, 2253 bp, synthetic construct
  source 1..2253: mol_type = other DNA; note = Synthetic coding sequence
atgagtagctccccagttaacgtcaaaaaattgaaggtttccgagctgaaggaggagctcaagaaacgtcgcctgtccgacaaaggacttaaggcggagctcatggagcgattgcaagcagctctggatgacgaagaagccggtggcagacctgctatggagcccggtaatggcgatgaccagggctttcaggagggagaggacgaactcggagacgaggaagagggagctggagatgaaaacggccacggcgagcaacagccccagccaccagcaactcaacagcagcagcctcagcagcagagaggtgctgccaaggaggccgctggtaagagctctgggccaacatctttatttgctgtgaccgttgccccaccaggagccagacagggacaacagcaggccggaggaaaaaagaaggctgaaggaggtgggggaggaggaagacctggtgctccagctgcgggtgacggaaagacagagcagaagggcggagataagaagaggggcgtgaagagaccccgagaggaccatggaaggggctattttgagtatatcgaggagaataagtatagtcgggctaagtcgcctcagccacccgttgaagaagaagacgagcactttgatgatacggtcgtctgtctcgacacctataactgcgatctgcattttaaaatctcacgggatagactgagcgccagttccttgactatggaaagtttcgcatttctctgggccggagggagagccagctacggcgtgtcaaaaggtaaggtgtgctttgaaatgaaggtgaccgaaaagatccctgtgcgtcatctgtacactaaggatatcgacatacacgaagtgcgtattggctggtctttgacaacttcggggatgttgttaggagaagaagaattctcttacgggtattcgctgaaaggcattaagacttgcaattgcgagactgaagattacggcgagaagttcgatgaaaatgacgttatcacatgctttgcaaactttgagagtgacgaggtcgagctgtcctatgcgaaaaatggtcaggatctgggtgtggcctttaaaatctccaaggaagtcctggcaggcagaccattgttcccccatgtgttatgccataactgtgccgttgagttcaactttggccagaaagaaaagccctatttccccatacctgaggagtataccttcattcagaacgtgccactggaggacagagtcaggggccctaaggggcctgaagaaaagaaggattgcgaggtcgtgatgatgatcggcttgcccggagcagggaagactacctgggtgactaagcatgccgctgagaatccaggcaagtacaatattttggggacaaacaccatcatggataagatgatggtagcaggctttaagaaacagatggcagacaccgggaaactaaatacactgttgcaacgcgctcctcagtgcctaggaaagttcattgagattgccgcacgaaaaaaacggaatttcatcctcgaccagaccaacgtttctgccgctgctcagcgacggaaaatgtgtctatttgctggcttccagcgaaaagccgtcgtggtctgccccaaggatgaggattacaagcagaggacacaaaagaaggccgaagtggagggcaaagatctgccggagcatgccgtgctgaaaatgaagggcaatttcaccctgccagaagtggccgaatgctttgacgaaatcacctatgttgagctacaaaaggaagaagctcagaaacttctggagcagtacaaggaggagagtaaaaaggccctaccccctgagaagaaacagaatactggaagcaaaaaatctaataaaaacaagtccggcaaaaaccagtttaacagggggggtgggcacaggggccgagggggatttaatatgcggggaggcaatttcagaggaggtgcccctggcaatcggggtggttacaacagacggggaaatatgccgcagagggggggtggagggggaggctcgggcggtatcggctacccctatcctcgggctccagtgtttcctggtcggggatcttactcgaacaggggcaattacaaccggggaggtatgcctaatagaggcaattacaaccaaaacttccgcggtcgtgggaacaatcggggatataagaaccaatcccagggctacaaccagtggcaacagggacaattctgggggcagaaaccttggtcccaacactaccaccaggggtattattag

SEQ ID NO: 30152 - DNA, 804 bp, synthetic construct
  source 1..804: mol_type = other DNA; note = Synthetic coding sequence
atgtgggatcagcggctggtaaaactggccttgcttcagcacctgcgggcattttacggaatcaaagtgaagggggtccggggtcagtgtgatcgaagacgccacgaaactgctgctacagagatcggcggtaaaatcttcggagtaccatttaatgccctgccccacagcgcagtgcctgaatatgggcatattcctagctttctggtcgacgcttgcacatcgctggaggagcacatacacaccgaggggcttttcagaaagtccgggtcagtgatccgtttgaaagcactcaaaaacaaagtggaccacggcgaagggtgcctcagctctgccccaccatgcgacatagccggactgctgaagcaatttttcagagagcttccagaacccatactgccagccgatctccacgaagctctgcttaaggcccaacagctgggtacagaggaaaagaataaggccatactactacttagctgcctgttggctgatcataccgtccacgtgctgcgctacttctttaacttcctacgaaatgtctccttgcgaagtagtgaaaataaaatggatagcagcaacttggctgtgatttttgctcctaacttattgcagacaagcgaggggcacgagaagatgtcatccaatgccgagaagaagggcgtctatcaaacactttcttggaagcgttaccagccatgttgggtactaatggtctcagtgctgctgcatcattggaaagcgctcaagaaggtgaacatgaaactgctggtcaatatacgcgaacgggaagataacgtctag

SEQ ID NO: 30153 - DNA, 600 bp, synthetic construct
  source 1..600: mol_type = other DNA; note = Synthetic coding sequence
atgccccacaaaattggcttcgtagttgtgtctagttcagggcacgaggatggctttagcgcacgcgagttgatgattcacgctccaactgtgtcaggttggagatcccctagttacgtgtctctctgtgacaatgagaagactggctgcaaggctagggagttaaaaagtgtctacgttgacgccgtaggccagttcctgaagttgatattccatcaaaaccacgtaaacaaatacaatatctacaatcaggtggccctggtggcaatcaacatcattggtgatccagccgacttcagcgacgaatccaacactgctagcagggaaaaactgatcgaccattaccttggtcacaacagtgaagacccagccctcgagggaacttatgccagaaaatctgactatataagcccgcttgacgatttggctttcgacatgtaccaggaccccgaagtggcacagattatcagaaagctcgacgagaggaaacgagaggcagttcagaaggaacgatatgactatgccaaaaagttgaaacaggccatcgccgatctccagaaggtgggcgagaggctgggaaggtacgaggtggagaagtag

SEQ ID NO: 30154 - DNA, 471 bp, synthetic construct
  source 1..471: mol_type = other DNA; note = Synthetic coding sequence
atgacagaagactcccagagaaacttcagaagcgtttactacgagaaagtaggatttcgcggagtcgaggaaaagaaaagtcttgagattctgcttaaggatgaccgactagatacagagaaactatgtactttctcacagagatttccgctgccctcaatgtatagagctttggtctggaaggtcttgctgggaattctgcccccacaccacgagtctcacgccaaagtcatgatgtacaggaaggaacaatacctcgacgtgctacacgcactgaaggtggttcgcttcgtgtcagatgccactcctcaagcggaagtctatttacggatgtaccaattggagtcaggcaaactgccacgctccccctcttttccactcgagcctgatgatgaggtcttcctggctatagcaaaggctatggaggaaatggttgaggattcagtggattgctattggatcacaaggtag

SEQ ID NO: 30155 - DNA, 2730 bp, synthetic construct
  source 1..2730: mol_type = other DNA; note = Synthetic coding sequence
atgataaggcatgcaggggctcccgctcggggagacccaactggcccagttccagtcgttgggaagggcgaagaggaagaggaagaagacggtatgcggctgtgcttacccgcaaatcctaagaactgtctccctcaccggcgaggtatcagcatcctagagaaattgatcaaaacttgtcccgtctggctgcagctgtcgttaggacaggctgaagttgccaggatacttcaccgagtcgttgctgggatgttcttggtgaggagagactcatccagtaaacagctggtcttgtgcgtgcattttccaagtctcaacgagtcctctgcagaagtcctggaatatacaattaaagaagaaaaaagcattctctacttggaaggaagcgctcttgtgttcgaggacatcttcagacttatcgcattctactgtgtctctagagacctgctccccttcacactgagacttccgcaggccattttggaggcaagcagctttacggatctggaaacaatagcaaacctcggcctagggttttgggactcctcactgaatccccctcaggaacgcggaaaacccgcagagccccctagggaccgggctcccggattcccattggtgtctagtcttcggcctaccgctcatgacgccaattgcgcatgcgagatcgaactctcagttggcaatgatagactttggtttgttaatcctattttcatagaggactgtagtagcgcactccctacagatcagccaccgcttggcaattgtccagcacggcctctacctcctacctccgatgctactagccccacatcccgatgggctcccagacggccaccccctcctccaccagtgctgcccctgcagccctgctctcctgcccagcctcccccactgccagctaagaaaaacctacccaccgcccctccacggagacgcgttagtgagagagtgagtctggaggatcagagcccgggaatggcagctgagggggatcagctctcccttccaccacagggcaccagtgatggacccgaagacacacctagagaatcaacagagcagggacaggacacagaagttaaggccagtgatccccattccatgcccgaactcccgcgaactgcaaagcagccccctgtcccgccacccaggaagaagcggataagccggcagctggctagcacgttgccagccccattggagaatgccgaactttgtactcaggctatggccctggaaactcctacaccagggcctccccgagagggtcagtctccagctagtcaggcgggtactcagcaccctcccgcacaggccaccgcccactcccagagcagccccgagttcaagggctccctagcaagtctcagtgactccctgggggtatctgtgatggcaacagatcaggatagttactccacctcgtctacagaggaagaattggaacagttcagtagtccttctgtcaaaaaaaagccgagcatgatcctcggaaaagcccgtcatcgcctgtcctttgcgtccttcagcagcatgttccatgcctttctaagcaacaaccggaaactctataaaaaagtcgttgagctggctcaggacaaaggctcttattttggaagcctcgttcaggattacaaggtgtattcactggaaatgatggcacgccagacgtcctctaccgagatgctacaggagattaggacgatgatgacacagctgaagtcatatctcttgcaatcaaccgagctgaaagctctggttgaccctgcactccactctgaagaggagctggaggccattgttgagtccgctctctacaagtgcgtcctcaagcccctgaaggaggctattaattcctgcctgcatcagatccatagcaaggatggtagcctacagcagctgaaagagaatcagttggtaatcctggcaacaaccacgaccgacctgggtgttacgactagtgttccagaagtgccaatgatggagaaaatcctccaaaaattcacttctatgcataaagcatattctccagaaaaaaagatttccattctgctgaaaacttgcaaacttatttacgattcaatggccctgggcaaccctggcaaaccatatggggcagatgacttcttaccagttctgatgtacgtgttggcccgatccaatttgactgaaatgctgctgaatgtggaatacatgatggaactgatggacccggctttacagctcggtgaggggtcttactatctgaccacgacatacggtgcactcgaacacattaaaagttatgataaaatcacagtgactcgtcagctatccgtcgaagtgcaggattccatacacaggtgggagagaagaagaaccctaaacaaggccagggcttcgcgatcctccgtgcaggactttatttgtgtcagctatttagaaccagagcagcaggccaggacgctggcttcccgcgctgatacccaggcgcaggcactctgtgcacagtgcgcggagaagttcgctgtcgaacgccctcaggcccaccgactctttgtgttggttgacgggcgatgtttccagcttgcagacgatgctctgccacattgcatcaagggctatttactcagaagcgagcctaaacgcgacttccacttcgtttatagaccactcgatggaggcggaggcggtgggggtggctcccctccatgcctagtggttcgagaacctaacttcttgtag

SEQ ID NO: 30156 - DNA, 1728 bp, synthetic construct
  source 1..1728: mol_type = other DNA; note = Synthetic coding sequence
atgagcagtgatgaggagaagtattcgctacccgtggtccaaaacgattcaagtcgcggatccagcgtgagctcaaatctgcaggaagaatacgaggaactgcttcactatgcgatcgtaacacctaatatagaaccatgcgcttctcagagttcacatccaaaaggtgagcttgtgcccgatgtgcgtatttccactattcacgatattttacacagccaaggaaataacagtgaagtccgtgagactgccatcgaagtaggcaagggatgcgatttccacatttcttctcactccaaaaccgatgaatcatctcctgtgttatcccccaggaaaccgtcccacccagtgatggattttttctctagtcatctgttagccgactctagcagccccgctaccaactcaagccacacagatgcccacgagatcttagtttctgattttctcgtcagcgacgaaaaccttcaaaagatggagaatgtcctggatttatggtctagcggcctcaagaccaacatcatctcagaactaagtaagtggcggcttaactttatcgattggcaccggatggagatgcgcaaggagaaagagaaacacgcagcccatctgaaacagctgtgcaaccagattaacgaactgaaagagctacagaaaacatttgagatcagtataggtcggaaagatgaggttatctctagtttgtcccacgccattggaaagcagaaagaaaaaatagagctaatgaggaccttcttccactggaggatcggccatgtcagagcaagacaggacgtgtacgagggcaagctagcagaccagtattaccagcggacacttctgaaaaaggtgtggaaagtctggaggtccgtcgtgcagaaacagtggaaggatgtggtagagcgcgcatgccaggcacgggcagaagaagtgtgcatccaaatctccaacgactatgaagcaaaagttgccatgctgtcaggggctctagaaaacgcgaaagcggaaattcagcgcatgcagcacgaaaaggagcattttgaggactccatgaagaaggcattcatgagaggggtatgcgctctcaacctcgaagccatgaccatatttcagaacaggaatgacgctggtattgatagtactaataacaagaaagaggagtacggaccaggtgtacaggggaaagaacacagtgctcacttggacccaagcgcacccccaatgcctctcccagtaacttcgcctctgctgcctagccctcccgctgcagtgggaggggcttccgccaccgctgtgccctctgccgcaagtatgacctccaccagggccgcatccgcctcctccgtccacgtgccggtttctgctcttggtgccggtagcgccgctaccgcggcatccgaagaaatgtacgtgccaagagtggtaaccagcgctcagcagaaggctggtaggaccatcaccgcacgcattacagggaggtgcgatttcgcttctaagaaccggataagctcctcccttgctatcatgggcgtgtcaccccctatgtcaagtgtggtcgtcgaaaagcaccaccctgttacagttcagaccatccctcaagcgacagccgcaaagtaccccaggaccattcatccagagtcgagcacatcggcttcaagatccctggggaccagatcagctcacacccagagtctgacttctgttcactccatcaaggtagtcgattag

SEQ ID NO: 30157 - DNA, 2091 bp, synthetic construct
  source 1..2091: mol_type = other DNA; note = Synthetic coding sequence
atggcgaactatcggaatacttccgaaatacctctggttctggtcggaacccaggacgcaatctcatctgcaaacccaagggtcatcgacgatgcaagggccagaaaactgagtaacgacttaaagcgctgcacttattacgagacctgtgccacgtatgggctgaatgtggagcgggtattccaggatgtagcgcagaagatcgtggccacgcggaagaaacaacaactctctatagggccttgcaagtctctgccaaattcaccatcgcactctagtgtgtgttctgcacaagtgagtgcagtgcacatcagtcaaacctccaacggtggcggatcattgtcagactactcaagctcagtgccatccactccgagcacatcacagaaagaactgagaatcgacgtgccccctacagccaacactcctacccctgttcgcaagcagtctaagaggcgctctaacctttttacctctaggaagggctcggacccggataaggagaaaaaaggattggagtcccgagccgactccattgggtctggacgtgccattcctattaaacagggcatgttgctgaagagatcaggcaaatcccttaataaagagtggaagaagaagtatgtgacactgtgtgacaacggcgtgttgacataccacccttcactgcacgactatatgcagaatgtgcatggaaaggagattgacctcttgaggacaacggtgaaggtgcccggaaagaggccccctcgggctaccagcgcatgcgcccctatttcctccccaaaaaccaacggcctgtccaaagacatgtcttctctgcacatttctccaaattctgggaatgtcactagtgcctctggttcccagatggcttcaggaatttccctcgtcagcttcaactctagacccgatggcatgcaccagagatcctactccgtatcaagtgctgaccagtggagtgaggctacggtgatagctaactctgctatcagttcagacacaggtctcggggatagcgtctgttccagcccaagcatttcaagcacgacgagccccaagttagatccccctcccagtccccacgccaacaggaagaagcacaggcgcaaaaagtctacgagcaacttcaaagctgatggtctaagcggaaccgccgaagaacaggaagagaacttcgagtttatcatcgtgagcctgacagggcagacttggcacttcgaggcaaccacctacgaagagagggacgcctgggtccaggccattgaatcacagattctcgcgtcactccagtcatgcgaatctagtaaaaacaagagtcgcttgaccagccagagcgaggcaatggccctgcagtcaatccggaacatgagagggaattcccattgcgtggattgcgaaacccaaaacccaaactgggcatcactgaatctcggcgctctcatgtgcattgaatgttctggaatccataggaacctcggaactcatctcagccgtgttcgctccctggacttggatgattggcccgtagaactgattaaggtgatgagttcaataggcaacgagctggcaaactcggtttgggaagagtcctcccagggacgcaccaagccgtccgtcgattccacccgcgaggaaaaggaacgctggatccgcgctaaatacgagcagaaactctttctggctccactaccatgtacagagctgtcattaggccagcatttacttagggcgacggccgacgaagatctacgcacagccatcctactgcttgcccacggtagccgggacgaggttaatgagacctgtggggagggcgatggcagaactgccctgcatctcgcgtgtaggaaaggcaacgtggtattagcacagctgctcatatggtacggagtggacgtgaccgcacgcgatgcccacggtaacaccgcactcgcgtacgccaggcaggcttctagccaggaatgtattgacgttctactccaatacgggtgtcccgatgagagatttgttcttatggcaacgccgaatctgtctcgtcggaataataaccgcaataacagttcaggacgggtcccaactatcatttag

SEQ ID NO: 30158 - DNA, 270 bp, synthetic construct
  source 1..270: mol_type = other DNA; note = Synthetic coding sequence
atgagcgaacagggtgatttaaaccaagcaatcgctgaagagggaggaaccgaacaggagaccgctacacctgaaaatggtatagtaaagtcggaatcattggacgaggaagagaaactcgagctccaacgcaggctggaggctcaaaatcaggaaagacgaaagagcaaaagcggggctggcaaggggaaattgactaggagtctggctgtgtgcgaggaaagttcagccaggcccggtggcgagagtctgcaagatcaaaccctctag

SEQ ID NO: 30159 - DNA, 1785 bp, synthetic construct
  source 1..1785: mol_type = other DNA; note = Synthetic coding sequence
atgacagacacacgacgacgcgtgaaagtctatacactaaatgaggatcggcagtgggacgacaggggtaccggacacgtatccagcggctacgttgagagactcaaaggaatgtcgctgctagtccgtgcggagagcgacgggtcactgttgcttgaatctaagattaaccccaatacggcctatcagaagcaacaagaagatgagaaattcctgaccgatctgtttgcacagttgaccgacgaggcaaccgatgaggagaaacgacaggagctggtaaactttctgaaagaattttgcgccttctcacagacccttcagcctcaaaaccgcgacgccttctttaagacactgtctaacatgggcattctaccagctctggaagttatactcggcatggacgacactcaggtgcgcagtgccgcaactgacatcttctcttatctcgttgagtacaacccctcgatggtgagagagttcgtcatgcaggaggctcagcaaaacgacgacgtcagcaaaaaattgacagaacaaaagataacctccaaggacatccttctgattaacctcatcatcgaacacatgatttgcgacactgatcctgagctgggcggagcagtccagttgatggggttattaaggactctggtcgacccagagaacatgttggctacagccaataagaccgaaaaaaccgagttcctggggttcttctataagcattgtatgcatgtcttgaccgcccctttattagcgaacactaccgaggataaaccttctaaagatgacttccagacagcccagttactggctctggtgctggagctgcttacattttgtgtagaacaccacacctaccacattaagaactacattatcaataaggatatcctgaggcgtgtcctggtgttaatggcgtctaagcatgcttttctagccttatgtgcattacgcttcaagagaaaaatcatcggtctgaaagacgagttttacaacaggtacattatgaaatcatttctgtttgaaccggtagtgaaggcttttcttaataacgggtcccgttacaaccttatgaattctgctattattgagatgttcgaatttatacgcgttgaagatattaagtcactgacagcccatgtaattgaaaactattggaaggctctggaggatgtggattacgttcagacattcaagggcctcaagctccggttcgagcaacagagggagcgccaagacaaccctaaactagacagtatgaggtcaattctgagaaatcaccggtaccgaagggatgccagaactttggaggatgaggaggagatgtggtttaacaccgacgaggacgatatggaggatggggaggccgtcgtcagcccttctgataagacgaaaaatgacgatgacattatggatcccatatctaaattcatggaacggaagaagcttaaggaatccgaagagaaggaggtactactgaaaaccaacctgtccggtaggcaatcacccagcttcaagctgtctttaagctccggtacaaagacgaatctcacatcccagagcagcactaccaatctgcctggttcacctgggagtcctgggagcccaggaagtcctggaagcccaggtagtgtcccaaaaaatactagtcagacagctgccataactacaaaggggggactggtgggcttggtcgactatccagatgatgacgaagacgatgatgaggacgaggacaaggaagacacattgcctctcagtaagaaggctaagttcgacagttag

SEQ ID NO: 30160 - DNA, 522 bp, synthetic construct
  source 1..522: mol_type = other DNA; note = Synthetic coding sequence
atgttcactgagggggaggaaatgtacctccaggggagtaccgtttggcatccggattgcaaacagtccactaaaacagaggagaagttgaggcctactagaacctcctctgaatctatctacagtaggccgggttccagcattcccggttcccccggtcatacaatctacgccaaagttgacaatgagatcctcgactataaagacctcgcagctattcccaaagttaaggctatctacgacattgagcgccctgacctcattacctacgagcccttctatacttcaggatatgatgacaagcaggagcgccaatctctgggcgagtcccccagaacgctgtcccccactccgtctgctgagggctaccaagacgtgagagatcgtatgattcaccgaagtacctcccagggctcaatcaactccccagtctacagccgtcatagctacacacctaccacctcgcgatctccccagcacttccaccggcctgaccagggcatcaacatttaccgcaagtag

SEQ ID NO: 30161 - DNA, 1620 bp, synthetic construct
  source 1..1620: mol_type = other DNA; note = Synthetic coding sequence
atggccacgtccgctcccctgcgctccctcgaagaagaggtgacatgttctatctgtctcgactacctgagggacccagtaaccatcgactgtggccacgttttctgcaggtcttgcaccaccgacgtgcgtcctatttctggctcgagacctgtctgcccgctttgtaagaagccatttaaaaaggagaacattagacccgtgtggcaactcgcaagtttagtggaaaacattgagcgtctgaaagtcgataaggggagacagccaggcgaagttaccagagaacaacaggacgccaaactgtgcgagaggcatagagaaaagctccactattactgcgaagacgatgggaagctgctttgcgtaatgtgtcgcgagtcgcgcgaacatagaccccacacagctgttttgatggaaaaagcagcgcagcctcacagagagaaaatcctcaaccaccttagcacattgaggcgggacagagataagattcagggcttccaggcgaaaggggaggccgacattctggccgcactgaagaagctgcaagatcaaaggcaatatatcgtcgctgaattcgaacaagggcatcagttcttacgcgagcgggaggagcatcttctcgagcaactggcaaaattagagcaggagctaacggagggacgagaaaagtttaaatcacggggagtgggcgaactcgcgaggctcgctctcgtgatctctgagctagagggtaaagcccagcagcccgctgccgagttgatgcaggatacccgcgatttcttaaaccgctaccctcggaagaagttctgggttggaaagccaatcgcccgagtggtcaaaaagaaaacgggtgagttctctgataagctgttgagtttacaaaggggactgcgcgaattccaagggaaactgctgagggacctggagtataagaccgtatcagtgaccctggaccctcagagcgcatctggctatctgcagctgtccgaggactggaaatgcgtcacctatacttccctctataagtctgcataccttcatccacaacagtttgattgcgagccaggggttctgggcagcaaggggtttacttggggcaaggtctattgggaggtggaagtggagcgtgagggttggtctgaggatgaggaagaaggcgatgaggaggaagagggtgaggaggaggaagaggaggaggaggcaggctacggagacggatacgatgactgggagaccgacgaggatgaggagtctctgggggatgaggaggaggaggaggaggaagaagaggaggaagtcctggaaagctgcatggttggagtggcacgcgacagtgtaaaacggaaaggggatcttagtctgcggccagaggacggcgtgtgggcgttgcggctctcttctagcggcatatgggcaaacacctcccctgaagcagagctgttccctgccctacgccctcgaagagtgggtattgccctggattacgagggcggaacggtgacctttacaaacgcagaatcacaggaactgatttatacgtttaccgccacttttaccaggagactggtcccgttcttatggctgaagtggccaggaaccagactcctactgcgaccttag

SEQ ID NO: 30162 - DNA, 2112 bp, synthetic construct
  source 1..2112: mol_type = other DNA; note = Synthetic coding sequence
atgtttaggtatgaaagcctggaagactgtcctttagacgaagatgaagatgcctttcaaggtctaggcgaggaggatgaggaaatcgaccagttcaatgacgatacgttcgggagcggagcagtagatgacgattggcaggaggctcatgagcgactagcagagctcgaagaaaaactacccgtcgcggttaacgaacaaaccgggaatggagagcgcgacgagatggatctattaggggatcatgaagagaacctggcagagcggctcagcaaaatggtcatagaaaatgagctcgaggatccagctataatgcgcgcagtgcagaccagaccggtcctgcagcctcagcccggtagtctcaactcctctatatgggatgggtcggaagttctgaggaggattcggggaccgctgctggcccaggagatgcctacagtgtctgtgctcgagtacgccttgcctcagagaccgccacagggtcccgaagacgatagagatctcagcgaaagggcccttccccgtcgatcgactagtcccatcattggctcaccgccagtgcgtgccgtgcccattgggactcccccaaagcaaatggcagtgccgtctttcacccaacagatcctgtgcccaaaaccagttcacgtaagaccaccgatgccaccccgatatcctgccccttatggtgaacgcatgagtcctaatcagctctgttcagtgccactgcagccgggaaggatgtccccatcccagttcgccagagtgccaggcttcgtaggttctcctctagctgcaatgaaccccaaactgctgcaggggcgagtgggtcagatgctccccccagccccaggctttcgcgctttcttctcagcccctcccagcgcaaccccacccccacagcagcatccacctggcccaggcccacacctacagaacctgcgttcccaagcacccatgttcagaccagacaccacacaccttcaccctcagcatcgcaggctgctccatcagcgtcagcagcagaatcggtcacagcacagaaatctgaacggggcaggtgacagaggcagccataggtcaagtcatcaggaccatctgcgcaaagacccctatgctaacctcatgttgcagcgtgagaaagattgggttagcaagatccaaatgatgcagttgcagtcaacggatccttatttagatgacttctactatcagaactattttgagaagttagagaagctgtcagccgcagaggagattcagggcgatggaccaaaaaaagagaggaccaagctcattacccctcaggtggccaaacttgagcatgcttataaaccggtgcagttcgagggcagtctggggaagcttactgtttcctcagttaataatcccagaaaaatgatcgacgcagtcgtgacctcccgttcagaggacgacgaaacaaaagaaaagcaggtcagagataaaagacgtaagacactcgtgataatagagaagacttactccttgctcctggatgtagaggactatgagaggcggtacctgcttagcttggaggaagagcgtccggctctaatggacgatcgcaagcacaagatctgtagtatgtacgacaatctgcgcggtaagctgccgggtcaggagaggcccagcgacgatcactttgtgcagattatgtgtattcgcaagggtaaacgaatggtggcaagaatcctgcctttcctgagtacagaacaggctgctgacatcctgatgacaacagctagaaacctccctttcctgatcaagaaggatgctcaagacgaagtactcccttgcctgctgtcaccattctccctgctcttataccatctgccttctgtgtcaataacatcactgctccgccagttgatgaatctgccatcctcagatcctgctacagaatctactcagaataaccagtggactgaagttatgttcatggcgacaagagaattgttacgcattccccaggccgcattagctaagcccatctccattcccacgaatcttgtctcactgttttctcggtatgtggaccggcagaagctaaacctgctcgagacgaaactgcagctagtacaaggcatccgttag

SEQ ID NO: 30163 - DNA, 957 bp, synthetic construct
  source 1..957: mol_type = other DNA; note = Synthetic coding sequence
atgagcgcacacaatcgcggtactgagctggacttgagctggatttccaagatccaggtgaatcacccagcagtcctccggagggcagaacagattcaagccagaagaactgttaaaaaggaatggcaggccgcttggttgcttaaggccgtgacttttatagatctcacaaccctttctggtgatgacacatctagcaatattcagcggctgtgctataaggccaagtaccctatcagggaggacctgctgaaggccctgaacatgcacgataaaggcattactaccgctgccgtgtgcgtgtaccctgcaagagtttgtgatgcagttaaagccttgaaagcggcaggatgtaacatccccgtggcctcagtcgccgcagggtttcccgcaggtcagacgcatctgaagaccaggctggaggaaataagacttgcagttgaggacggggctaccgagatcgacgtagtgatcaatcgtagcctggtgctcaccggtcagtgggaagcactctatgatgagatccgtcagtttcgcaaggcctgcggcgaggcccaccttaaaaccattctcgccactggagaactgggaacactgaccaacgtctacaaggcttcaatgattgctatgatggcgggttctgactttatcaaaacctcaactggaaaggagacggttaacgcaaccttccctgtggcgattgtgatgctacgcgcaatcagggacttcttctggaagaccggaaataagattggctttaaacctgctggcggtattcggtccgctaaagatagccttgcctggctgagcctcgtgaaagaagagctgggtgacgaatggttaaagcccgagttatttaggatcggcgcttccactttgctttcagacatagagaggcagatttatcaccatgtgaccgggagatatgcagcgtatcatgatctgcctatgagttag

SEQ ID NO: 30164 - DNA, 1188 bp, synthetic construct
  source 1..1188: mol_type = other DNA; note = Synthetic coding sequence
atggctagcgcggcttccgtaacaagcctggcggatgaagtcaattgcccaatttgtcagggaaccctgcgggagcccgtcacgatcgactgcggacacaacttttgccgcgcttgtttgacgcgctactgtgaaatccccggacccgacttagaagagagtcccacttgccccctctgcaaagagccattcaggcctggcagcttcaggcccaactggcagctcgccaacgtagtggagaatatcgagagacttcagctggtctcaacactagggttgggggaggaggatgtgtgccaagagcatggggagaagatatacttcttttgcgaagatgacgaaatgcaattatgcgtggtctgcagagaggccggtgaacatgccacccacaccatgcgcttcctggaggatgccgctgctccctacagagagcagattcacaagtgtcttaaatgtctcaggaaagagcgggaagagatacaagagatccagagccgcgagaataagcgcatgcaggttctgcttactcaagtcagtacgaaaaggcaacaggtaatttcggaatttgcccacctgcggaagttccttgaagagcagcagtcaattctcttagctcagctagaatcacaggacggggacatactgaggcagcgagacgagtttgatctccttgtagcgggagagatctgtagattttcggctctgatcgaagagttggaggagaagaacgagagacccgctagagagcttttgacggatatccgctccacgctgattcgatgcgagaccagaaaatgcagaaagcccgttgccgtgtctccggagctggggcagaggatccgggacttcccccagcaggctctgccactccagcgcgagatgaaaatgtttctggaaaaactctgttttgagctggactacgaacccgcacacatcagcttagacccacagacctcacacccgaagctgcttctatctgaagatcatcagcgtgcccagttctcatacaaatggcaaaattcgccggacaaccctcagcgttttgatcgcgcaacgtgcgtgctggctcacactggcattactgggggtcgccacacatgggtgtggatggcacgggtgccaggtgactcaggctgctgccagttctgttctccgccttcagtcctcgggacagaggtggccgcttag

SEQ ID NO: 30165 - DNA, 3288 bp, synthetic construct
  source 1..3288: mol_type = other DNA; note = Synthetic coding sequence
atggctgagggagcagctggcagagaagacccagcccctcctgacgccgctgggggagaagatgatcctcgcgtgggcccagacgctgccggagattgtgtgactgcagcttccggaggccgtatgcgggatagacgtagcggtgtagcgttgcccggagccgcaggtacaccagccgattctgaggccggactcctagaggccgctagagccacccctcggagatccagcattataaaggacccctccaaccagaaatgcggcggaagaaaaaaaacagtcagcttttccagcatgcctagtgagaaaaagatctctagtgccaacgattgtatttcgtttatgcaagcaggatgcgagctgaaaaaggtgagaccaaactctcggatttataacagattcttcacgctcgatactgatctccaggccctgcgttgggaaccaagcaagaaagacttagagaaggccaagctagatatctcagctataaaagagattcgactgggaaagaatactgagacctttaggaataatggcctcgccgaccagatatgtgaagactgtgcctttagtattcttcatggtgaaaattatgagagccttgacctcgtggctaatagcgcagacgtggcaaacatatgggtgagtggactaaggtaccttgtgagcagatctaagcagccactggattttatggaaggtaatcaaaacacacccagatttatgtggttaaaaacggtatttgaggctgctgatgtggatggcaatggaattatgttggaagacacctccgttgagctcattaaacagctgaacccgaccttaaaggaagccaaaatccggctcaagttcaaagaaatccagaagtctaaagaaaagctgacgacgcgagtaacagaagaagaattttgtgaggctttttgcgaactgtgcacaaggcccgaggtctatttcctgctagtacagatcagcaaaaataaggaatatctggacgctaacgacttgatgctgttccttgaggctgaacagggggtaacacatataacagaggacatttgcctggacatcattaggagatacgagctttctgaagaaggccgtcagaagggttttctggccatcgacgggtttacccagtatctgttgtcatcagaatgcgacatctttgaccctgaacagaagaaggtcgctcaggacatgactcagcccctaagccattattatattaacgccagccacaacacctatctgattgaggatcagtttaggggaccagccgacataaatgggtacatccgcgctcttaagatgggctgcaggagcgtggagcttgacgtctcagacggcagtgacaacgagcctatcctgtgtaatcgcaacaatatgactacccacgttagcttccgatccgtcatcgaggtcatcaataaattcgccttcgtggcgtcagaataccccctgattctgtgtctcggtaaccactgtagtctgccacaacagaaggtgatggcacagcagatgaagaaggtgtttggaaataaactgtacaccgaagcccctcttccgagcgaaagctatctgcccagccccgagaagctgaaaagaatgatcatcgttaagggtaaaaaactgcccagcgaccctgatgtcctggaaggcgaggttactgacgaggacgaggaggccgaaatgagcagacgaatgtctgtggactacaacggggagcaaaaacaaatacgcctgtgcagagagctgagcgatctcgtgtcaatttgtaaaagcgtgcagtaccgggattttgaactctctatgaagagccaaaactactgggagatgtgctccttttctgaaacagaagccagcaggatcgcgaatgaataccccgaggattttgtcaactataataagaaattcctgtctagaatctatccatcagcgatgcggattgactcttccaacctgaacccgcaggacttttggaattgtggatgccagattgtcgccatgaactttcagactccaggacctatgatggatttgcacacgggctggttcctccagaacggaggatgcgggtacgtcctgcggccatctattatgcgcgatgaggtgtcatactttagcgcgaacacgaaagggatcctgccaggtgtcagccctctcgcactacatatcaagattatttccgggcagaatttccccaaacccaaaggagcctgcgctaagggggacgtaattgatccctacgtgtgcatcgagattcacggcatccccgcagactgctcagagcaaagaactaaaactgtacagcaaaatagcgataatccgattttcgacgagactttcgagttccaagtcaacctccccgaattggctatgataagattcgtggttctcgatgacgactacataggagacgaattcattggacagtacactattccatttgaatgcctgcagcccggataccggcatgtgcccctgaggagctttgtgggagatatcatggagcatgtgaccctttttgtacatatcgctatcactaataggtctggaggcggtaaggctcaaaaacgcagtctgtccgtcaggatgggcaagaaagttcgcgagtataccatgctccgcaacatcggtttgaaaactattgacgacatcttcaaaatcgcagtgcatccactcagggaggccatcgatatgcgggaaaacatgcagaacgccattgttagtatcaaagagctgtgcggcctccccccaatagcttcactaaaacaatgcctgctgactctgtcttcccggctgattacgagcgataatactccctccgtatccttagttatgaaggactcttttccctaccttgaacctcttggagctattcccgatgtgcagaaaaagatgctcaccgcgtacgacttgatgatccaggaatccagattcctaatagagatggctgatacagtgcaagagaaaatagtgcaatgtcaaaaagccggaatggagtttcacgaggaactccataatctaggggcaaaggagggcctcaagggaagaaaactgaataaggcaacagagtcgttcgcctggaacatcaccgtgttgaaagggcaaggtgacctgttgaaaaatgcaaaaaacgaggccatcgagaatatgaaacaaatccagttggcatgtctgtcttgtggattgagcaaggccccatccagttccgcagaggccaaaagtaaaaggtcacttgaggccatcgaggaaaaggagagctctgaagaaaacggcaagctgtag

SEQ ID NO: 30166 - DNA, 543 bp, synthetic construct
  source 1..543: mol_type = other DNA; note = Synthetic coding sequence
atggaacagcctaaaggggtcgactggactgtaattattttgacatgccagtacaaagatagcgtacaggtctttcaaagagagttggaagtccgccaaaaacgagagcagatccctgcaggcaccctattgctcgctgtcgaggatcccgagaaacgggtgggcagcggcggagcaactttaaatgcactactggtggctgctgaacatctgtcagcaagggctggcttcaccggcagagattttccatttgacgactgcggtcgtgcattcacgtgcctgccagtcgagaaccccgaggctcccgtggaggcactggtatgcaatctggattgtctcttggacatcatgacctacaggttgggccctggatccccgccaggcgtctgggtatgttccacggatatgttgctttcagtgcctgccaatcctggggagcctgagaccacatgggactgtttgccctcttcacagccccagcaagaagctagtagcgctctcctggcgcacccagcaagcggaccagccccattgccgtattag

SEQ ID NO: 30167 - DNA, 429 bp, synthetic construct
  source 1..429: mol_type = other DNA; note = Synthetic coding sequence
atgaatgaagtggttcacacatctcctaccataggaagcaatgttgaggagatcgtaattaacaatactcgttttttgatgtgggacattggcggacaggaatcgttaaggtccagctggaacacatattacaccaatacggaattcgtgatcgtagtagtggactcgaccgatcgggaaaggatatctgtgacccgggaagagctgtataaaatgctggcccacgaggacctgagaaaagccggtttgttaattttcgcaaataagcaggatgtaaaggagtgtatgaccgtcgcggaaatcagccagttcctgaagcttactagcatcaaggaccaccagtggcatattcaggcctgttgcgcccttactggcgagggcctctgtcagggtttagagtggatgatgtccagactgaagatccgctag

SEQ ID NO: 30168 - DNA, 342 bp, synthetic construct
  source 1..342: mol_type = other DNA; note = Synthetic coding sequence
atggaaggggttttgtacaagtggacaaattacctatccggctggcagccaagatggttcctgctttgcggtggcatcctatcttactatgactctccggaagacgcttggaaagggtgcaaaggctctattcagatggctgtttgcgagatacaggtacactccgtcgataatactaggatggatctgatcatacctggggaacagtacttttacctcaaggcaagatcggtcgccgaacggcaacggtggctggttgcactgggttcagccaaagcctgccttactgattcccgcacacagaaggaaaaaggcaatctgctcaagactctgaagacttag

SEQ ID NO: 30169 - DNA, 1119 bp, synthetic construct
  source 1..1119: mol_type = other DNA; note = Synthetic coding sequence
atggcatctaaccataagtcttctgcagcacgccctgtgtcgagaggaggcgtggggctcaccgggcgtcctccatcagggatcaggcctctttccggaaatattcgggttgccactgcaatgccaccaggcactgcacggccaggatcgagaggctgtcctataggcactggcggtgttctgtcctcccaaatcaaagtggcccacaggcccgtgacacagcagggcctgaccgggatgaaaactggaactaaaggtcctcaaagacagatccttgacaagtcgtattacctgggcctgctgcgctctaagatcagtgagctcacaacggaagtgaacaaactgcagaagggtatcgagatgtacaatcaggaaaactccgtctatctctcatatgagaagagggcagaaacattagctgtagagattaaagagctacaaggtcagctcgccgactacaacatgctggtggataagttgaacaccaacaccgagatggaggaggttatgaatgactacaatatgctgaaggcccaaaatgatcgggagactcagagtctggatgtcatctttacagaacgacaagcaaaagagaagcaaattcgaagcgtggaggaggagatcgagcaagaaaaacaagcgaccgatgatattatcaaaaacatgtcattcgaaaatcaggtgaagtacctggaaatgaaaaccaccaacgaaaaactacttcaggagcttgacaccctgcagcagcagctggacagtcagaatatgaagaaagaaagccttgaagccgaaattgcccacagccaggttaagcaagaggcagttctcctccacgagaagctgtacgagctggaatctcatagggatcaaatgatcgcagaggataagtccattggcagccccatggaggagagagaaaaactgctgaagcagatcaaagatgataatcaggaaatagcaagtatggagagacagcttactgacaccaaggagaagattaaccagttcattgaggagatccggcaactggacatggatttagaggaacaccaagatcccactaactacgggtggaagatactggagaagaacacaggatcatttaaaaagcaggtatag

SEQ ID NO: 30170 - DNA, 345 bp, synthetic construct
  source 1..345: mol_type = other DNA; note = Synthetic coding sequence
atgtggtccctgaccgccagtgagggtgagtcaacaaccgcccacttctttctgggtgctggcgacgagggactgggaactagggggatcggcatgcggccagaagagtcagattcagaactcctggaagatgaagaggacgaagtgccccctgaaccgcaaatcatagttgggatctgcgccatgacgaagaagagtaagagtaagccgatgacacagatcctcgagaggctgtgccgttttgattatctgactgttgtgattctcggcgaagatgtgattctgaacgaaccagtggaaaactggccctcttgccattgcctcatatcatttcacagcaagtag

SEQ ID NO: 30171 - DNA, 327 bp, synthetic construct
  source 1..327: mol_type = other DNA; note = Synthetic coding sequence
atggcgatggccccttctcctagtttagtgcaagtatatacaagtcctgccgcagtggctgtctgggaatggcaggacgggctcggaacttggcatccctacagtgccactgtgtgttcttttatagaacagcagtttgtacagcagaaaggtcaacgtttcggactcggtagtctggctcactcgattccactcggacaggctgatcctagtcttgctccctatattattgacctacccagctggacccaatttagacaggacactgggacaatgcgggctgtccggaggcacctgtttccgcagcattcagcgcctgggaggtag

SEQ ID NO: 30172 - DNA, 549 bp, synthetic construct
  source 1..549: mol_type = other DNA; note = Synthetic coding sequence
atgcgggagtgcatctcaatccatgtaggacaagctggggtacagatcggcaatgcgtgctgggagctgtattgtctggaacatggtatccagccggatgggcagatgcctagcgacaagactatcgggggaggcgacgattccttcaacactttcttttcagagacaggcgctggcaagcatgtgccgcgagcagttttcgtcgacctagagccgactgtgattgattggtgccccacagggtttaaggtaggcattaactatcagcccccaacagtggttccaggaggcgatctcgcaaaagtgcaaagggcagtgtgtatgctttccaatactactgccatcgcagaagcctgggcccgtctcgaccataagttcgatctcatgtatgcaaagcgtgcttttgttcactggtacgtaggtgagggcatggaagaaggagaattctcagaggcacgcgaggatatggcagcgctggaaaaagactatgaggaggtgggtgtggacagtgtcgaaggggaaggcgaggaggagggggaggagtattag

SEQ ID NO: 30173 - DNA, 483 bp, synthetic construct
  source 1..483: mol_type = other DNA; note = Synthetic coding sequence
atggaagcggagaggcctcaggaagaagaagacggtgagcagggcccaccacaggacgaggagggctggcctccgcctaactcaaccacacgcccttggcgttcggctcctccctcgccccctcctcctggtacgcgtcacacagcactcggccctcggtctgccagcctgctgagtctgcagaccgagctgctcctagatctggttgcagaagcacagagccgcaggcttgaggagcagagggcaacgttttatacgccacagaacccaagctctctggctcccgctcctctccggccactggaggatagggaacaactctacagcactatcctgtcgcaccagtgtcagcggatggaagctcagcgctccgagcctcccttgcccccaggcggtcaggagctgcttgaactgctgctgagagtccagggagggggtagaatggaagaacagagatccagacctcccacccatacctgctag

SEQ ID NO: 30174 - DNA, 3483 bp, synthetic construct
  source 1..3483: mol_type = other DNA; note = Synthetic coding sequence
atggcttgccggaggaggtatttcgtcgagggtgaagctccttcctcagagaccggaacctccctagacagtccgtctgcctaccctcaaggccctctagtgcccggttcttccctgtctcctgatcattatgagcatacctctgtgggagcttatgggctctacagtgggccacccggtcaacaacagcgcactaggagacccaagttgcagcactctacatctatacttcgcaaacaagctgaggaagaggccatcaaacgctctaggagtctcagcgagtcatacgaactgagttctgacttacaagacaagcaggtggagatgctagaaaggaagtatgggggtcgactcgtaacaaggcatgcagctcgaacaatacagacagcatttcgacagtaccagatgaacaagaacttcgaacggctgcgctcctctatgtctgagaacagaatgtcccggcgaattgtgcttagcaacatgaggatgcagttttctttcgagggccctgaaaaagtgcatagctcttactttgaaggtaaacaggtcagtgtaacaaacgatggctcacagctcggcgctttagtgtcgcccgagtgtggggacctctcagagcctaccactctgaagtcacccgcaccctcttcagattttgcagacgcaatcacagagctggaggatgcattcagtcgccaggtgaagtctctggcggagagcattgacgatgctttgaactgccgatccctgcacactgaggaggcgccagcgctggacgcagccagggcccgagatactgaaccgcagaccgccttacacgggatggaccacagaaaacttgatgaaatgacagcgtcatattctgatgtcacgctctacatcgatgaggaggagctttcccctccactgcctctatcccaagctggcgaccgcccatccagcaccgagagtgatctccgactgcgcgcaggaggggcagctcccgactactgggcgttagcgcataaggaagataaggctgatacggacacgagctgcaggtcgactccatctctggagcgccaggaacagcgcttacgggttgaacacctgcctctgctgacaatagagccacccagcgactcaagcgtggacctcagtgatcgatctgagcgcggttctcttaaacgccaaagtgcctacgagagatctctcggcggacagcagggatcccctaagcacggcccacattcaggggcaccaaaaagtctgccacgcgaagagcctgagctgcgccctagaccaccgcgaccgctcgattcgcatctggccattaatggcagtgctaaccgacagagtaagagcgagagtgattattcagacggcgataacgactctatcaactctacctctaactcgaacgataccattaattgttcttccgagtcatcatcgcgagatagccttagagagcagacattatcaaaacagacataccataaggaagcacgtaattcttgggatagtcctgcgttctctaacgatgtgatccgaaagcgccactatcgaatcgggctcaatctatttaacaaaaagcctgagaaaggtgtgcagtacctgatcgagagaggttttgtacctgatactcctgtgggcgtggcccactttctcctgcagagaaaaggcctgtcacgccagatgatcggagagtttttgggcaatcgccagaaacaatttaatcgtgatgtgctcgattgtgtcgtggatgaaatggacttttccacaatggagctggacgaagcgctgagaaagtttcaggcacatatccgcgtgcaaggcgaagcacagaaggtagaaaggcttatagaggcgttttcacagcggtattgcatctgcaatcccggagttgttaggcagttccgtaaccccgacacaatcttcattctggcatttgctattattctgctgaatacagatatgtacagccctaatgtcaaacccgagaggaaaatgaagctggaggattttattaaaaaccttaggggggtcgacgacggagaagatatacctcgtgagatgttgatgggcatctacgaaaggatcaggaaaagagaactgaaaacaaacgaagaccatgtctcccaagttcagaaggtcgagaagctcattgtaggcaagaagccaatcggcagtctgcacccaggcctcggctgtgtgctaagcctcccacacaggagattagtgtgctattgtcgattgttcgaagtgcccgaccctaacaaaccacagaagctgggcctccaccaacgggaaatatttctgttcaacgatctactggtggtaacgaagatctttcagaaaaagaagaactccgtgacatattcattcagacagtccttcagcctgtatgggatgcaagtgctcctgttcgaaaaccagtattatccaaatggcatcaggctcacatcttccgtccccggagcagatatcaaggtccttattaatttcaacgcaccaaaccctcaagacagaaagaagtttactgacgatctgagagaaagcatagccgaagtgcaagaaatggagaaacatcgcatcgaatctgagcttgagaagcaaaagggcgtggtccggccaagcatgtctcagtgctcaagtttgaaaaaggagtccggaaatgggaccctcagcagagcctgtctcgatgattcctatgcctctggtgaggggcttaaaagaagcgccttgtcatcctctttacgggatctgtctgaggccggtaaaagaggcagaagatcttctgccggatcactggagtccaatgtagagggatcaattatcagtagccctcacatgcgaaggagggccacaagtaccagagagtgcccttcgagacctcaccaaaccatgcccaacagctcctctttgctggggagtcttttcggcagtaagcgaggcaaaccaccgcctcaggcacacttgcccagcgccccagccctcgccacccccccacctacagggggaccagctagccttgcagctctgtgtggttggcctccccctggagccccaaggggcgcagccgcaggacgccacgccagagcatctcaccccgtcctgccccatgccgagccaagccccgtgcctccctcaccccctccaccgcctacaccagcccatcccgctaggacaccagtgccgcctaggccaccatggggaccacctagcctgagagggccatgtccgagacctcctgctgcagcgctcggaccacgtggggctcattcagcaccaccctgggcagctccgtgccctgccgcaccccatcagcagcaggggcaaactcaacggcaccagcacaattgtgtggactccctgggcagaggccctcgtctgcccgaaactccggcacaccatacggggcacgctcgcggaagccctgccgcacaccagacgcgcggaaccagtgtggcaatttcacctctgtgtcccagccgccctaattag

SEQ ID NO: 30175 - DNA, 378 bp, synthetic construct
  source 1..378: mol_type = other DNA; note = Synthetic coding sequence
atgaagaaggagcatgtgcttcactgccagttctccgcatggtaccccttttttagaggcgtaacaattaaatcagtcattttgcccttaccacagaatgtaaaggattaccttctggacgacggtacgctcgtcgtttctgggagggatgatccacccactcactctcagcctgactctgacgatgaagccgaagagatacagtggtctgatgacgaaaataccgctaccttaaccgatgcctattggattgctatgaactcgtctttgaagtgtaagaccctgtcagatatcttcctgctgtttaaatctagcgatttcatcacacgtgatttcacacaaccgttcattcactgcacagacgacagccccgactag

SEQ ID NO: 30176 - DNA, 414 bp, synthetic construct
  source 1..414: mol_type = other DNA; note = Synthetic coding sequence
atgagtctttttgggacaacctcaggcttcggtacatccggcacaagtatgtttggatctgccaccaccgacaatcataacccgatgaaggatattgaagtgacatcctcacctgatgacagcattggatgcctttcgttctccccaccgacgctgccaggcaattttctgattgccggaagttgggcaaatgatgtgagatgctgggaagtccaggattctgggcagacgattcctaaagctcagcagatgcacacaggccctgttcttgatgtgtgctggtctgacgacggctcaaaagtgttcaccgcctcatgcgataagaccgcaaagatgtgggatttaagcagtaaccaggctattcaaattgcacagcatgatgcaccagtcaaaaccatccactggattaagtag

SEQ ID NO: 30177 - DNA, 3222 bp, synthetic construct
  source 1..3222: mol_type = other DNA; note = Synthetic coding sequence
atggaggaacgcaagcatgagactatgaaccctgcacacgtactgttcgataggttcgtccaggccacaacatgtaagggcacattgaaagctttccaggagttgtgcgaccatctcgaacttaaacctaaagattatagaagcttctaccataaactgaaatccaaactaaactattggaaagcgaaggccctttgggctaagttggataagagagggagccacaaggactacaaaaaagggaaggcctgcacgaacactaaatgcctgattattggggcagggccttgcggcctgagaacagccatcgacttatctcttctgggggcaaaagtggtagtaattgagaagagggacgccttcagcagaaacaacgtactccacttatggccatttaccatacacgacctgcggggtctcggggcaaagaaattttacggcaagttttgtgcaggcgcaatcgatcatataagcattcgtcaactccaactgatcctgctgaaagtggccctcatactgggaatcgagatccacgttaacgtcgaattccaggggctaatacagcccccagaggatcaggagaacgagcggatcggctggagagcactagttcaccctaaaactcaccctgtgagtgaatatgaattcgaggtgattattgggggagatggtcgacggaacaccctggaggggttccgcagaaaggaattccggggaaaactagctatcgcaataaccgctaacttcattaaccggaacactactgctgaagcaaaggtggaggagatctccggggtggcctttatatttaatcagaagttcttccaggagctgagagaggccactggaatcgacttagagaatatagtgtactataaggatgatacccactacttcgtcatgactgcaaagaaacagagcctgcttgataaaggcgtgatcttacatgattatgctgacacagagctgctgctctctagagaaaatgtggaccaggaggcactcctttcctacgctagagaggccgctgactttagcactcaacagcagcttccttcccttgacttcgcaattaaccattacggacaacctgatgtggcgatgttcgactttacctgcatgtatgccagcgagaatgccgctcttgtgcgcgagcaaaatggccaccagcttttggtggcccttgttggcgatagtctcttagaacctttttggcccatgggaaccggcatcgccaggggcttcctggcagccatggactcagcctggatggtacgcagctggtctcttgggacaagcccactggaagtgctcgcagagagggagagtatatacaggctgttaccccagacgactcctgaaaacgtgtcgaaaaacttttctcagtatagcatcgacccagttacgaggtacccaaatatcaacgttaattttctgcgcccttctcaggtgcgtcacctgtacgatacaggcgaaacaaaggacatccatctggaaatggaatctctcgtcaactccaggacaactccaaaattaactcgaaatgagagcgtggctcggagctctaagttactgggctggtgccagagacagaccgatggatacgcaggcgtgaatgtgactgacctgaccatgagttggaagtctggtcttgctctgtgcgccataatccatcgctaccgcccagacctaatcgattttgacagcctggacgaacagaatgttgagaagaataatcagctggcatttgacatcgccgaaaaggaattaggaattagcccgatcatgaccggaaaagagatggcaagcgttggagagcccgataaactgtccatggtgatgtacctgactcagttttatgagatgtttaaagactcccttccttccagcgacacccttgacctgaatgctgaggagaaagctgtactgatcgctagcacacgttcacctattagctttctttcaaaacttgggcagaccatttcccgcaagcgatccccgaaggacaaaaaggaaaaggatctcgatggggcaggaaagaggcggaagacaagccaaagcgaggaagaagaagctccaagaggacaccgcggagagagaccgaccctcgttagcacactgacagatagacgcatggacgtcgctgttggcaaccaaaataaggtgaagtacatggctacacaactactagccaaatttgaggagaacgcccctgcacagtctattgggatcagacgccagcagcgggaaaaggagtgttcgagaacatgtcctaaaaaggtgataaccctgagccctcctcccacgccaccgccttgtcgggcacatgggggacagcagacttaccgcgacctcgacgctgacaatcgcggaaagcagtctccccaccatgaaagacctgaacccgaaccaccacgcagattctttgtggatcagtgggagctctccctctcgctgagatcatccgctcgcccagccagcccgagctctgattcactgcgacagaagtacattaagatgtatacaggcggagtctctagtctcgccgagcagattgcaaatcagttgcagcgtaaggaacagcccaaggcactgctggacaagaaagaactcggctccatgaagaaagagtttccccaaaatctgggcggttcggacacttgctacttttgccagaagagagtttatgtcatggaacgactatcagctgaaggcaagttttttcatcgttcatgctttaagtgcgagtactgtgcgacaaccctgcggctcagcgcctatgcctacgatatagaggatgggaaattttactgcaaacctcactactgttaccggctgtcagggtatgcccagcgtaaacggcctgccgtcgcaccattatctggcaaggaagccaaaggtccactccaggatggggctaccaccgatgctaacggacgggcaaatgcggttgcgagcagcacagagcggacacctggaagccttaccagtctcttcggatgggtggccaggcactccttggggctgtgcgataaagcgaaaggaatgagtcaacatctgcagtccaatatctcgtcctttggccaacaggtagcgcaaaacccactcgacagtttttttatgtgccagctcctcgcatttggagtcccattcttatacgggctatccgaagtcctggtgcagatccgcggagagtttcactggcaagcagtcgcacagtag

SEQ ID NO: 30178 - DNA, 543 bp, synthetic construct
  source 1..543: mol_type = other DNA; note = Synthetic coding sequence
atgtttctaagctgcggatcactgcaccaaagaggtcccgagaccgacggcactgtgttccgcattcatacaaaggctgagggattcatggatgtagatatccccctggaactagtattccacctccccgtcaattatccatcctgcctgcccggaatctcaatcaattctgaacagctgacccgcgctcagtgtgttaccgtgaaggaaaatcttctagagcaggctgaaagtttactttcagagcccatggttcacgaactggtgctgtggattcagcagaacctcaggcatatcttgagccaacctgagaccggctcaggaagcgagaagtgtacctttagcacaagcaccaccatggatgacggtctgtggatcaccctgctgcatcttgaccatatgagagcaaagacgaagtatgtgaaaattgttgagaagtgggcttccgacctgcggctgacaggcagactgatgttcatggggaaaattatcctgatcctgctgcagggcgaccgcaataacctgaaagttcccaagagttag

SEQ ID NO: 30179 - DNA, 1521 bp, synthetic construct
  source 1..1521: mol_type = other DNA; note = Synthetic coding sequence
atgaaaaggagatccgtcaccatgaccgacggcctcaccgctgataaagtgacacggtctgacggatgtcccactagtacctcactccccaggccgagagattctatccgatcctgcgccctgagcatggaccagatcccagacctacactcacctatgagtcccatcagcgagtcgccctcatctccagcctactcaaccgtgacccgcgtgcatgcagccccagctgccccttctgcgaccgctctaccagctagccctgtggcacgaagaagcagcgagccacagctctgtcctggttcagcccctaagactcacggtgaatccgataagggacctcataccagcccgtcccatacattgggaaaggcgtccccctctccttcgctgtcttcctactcagacccagactcaggccactactgtcagctgcagcccccagtgaggggcagccgggagtgggctgcaaccgaaacaagttcacagcaagcccgatcctacggtgagcgactaaaagagctcagcgaaaacggcgctccggaaggcgactgggggaagacgtttaccgttcccatcgtcgaggtgacatcctccttcaacccggctacctttcagtccctactcatcccaagagacaatagacccctggaggtgggcctcctccgcaaagtgaaggagctgctggccgaggtcgacgcccgtaccctggcacggcatgtcaccaaggtggattgcctggtggccagaatactgggagttacgaaagagatgcagaccttaatgggcgtccggtgggggatggagctgctgacgctgccccatgggaggcagctgcgtctggatctgttagagcgctttcacacaatgagtatcatgttggctgtcgacatccttgggtgcaccggcagcgcagaagaaagggcagcccttttacataaaactattcagctggctgccgaacttcgtggaacaatggggaacatgttttctttcgccgctgtgatgggtgctctggatatggcccagataagtagactggagcagacctgggtaacattaaggcaacgccacaccgaaggcgcaatactctatgagaagaagctgaaaccattcctaaagtcgctgaatgaggggaaggagggcccacccctctccaacaccacattccctcatgtgctgccgttgataactctcctcgaatgtgacagcgccccacctgaggggcctgagccttgggggtcgacggaacatggtgtggaggtggtgttggcccacttagaggccgctcgcacagttgctcaccacggagggctctaccatactaatgccgaggtcaagctccagggctttcaggctcgacctgagctgcttgaagtcttctcaacggaattccaaatgcgactcctgtggggcagtcaaggagctagtagcagtcaggctagaagatatgaaaagttcgacaaagtcctgaccgctctttcacacaaactagagcctgctgttcggtccagcgaattatag

SEQ ID NO: 30180 - DNA, 369 bp, synthetic construct
  source 1..369: mol_type = other DNA; note = Synthetic coding sequence
atggcgacatctgcaccactgaggtctctggaggaggaggtcacatgctcaatttgcttggactatcttcgggacccggtgacaatcgactgtggtcatgttttctgcagatcttgtacaacagatgtgagacccatctcaggctccaggcctgtatgtccactgtgcaaaaagccatttaagaaggagaacatccggccagtgtggcagctggcttctctggtggaaaatatagaaagattaaaggtcgacaagggcaggcagccaggggaggttaccagggagcagcaggatgccaaactgtgtgagagacatagagaaaaactgcattattattgtgaggacgatgggaaactgctatgtgtctag

SEQ ID NO: 30181 - DNA, 369 bp, synthetic construct
  source 1..369: mol_type = other DNA; note = Synthetic coding sequence
atgcccgagataaatacaaaccatctggacaaacaacaggtacaactcttagccgagatgtgcattctcatcgacgagaacgacaataagatcggagccgagaccaagaagaattgccacctcaacgagaacatagaaaagggcctcctgcatagagccttctcagtattcctgttcaataccgaaaataaactcttgctgcagcagaggtctgacgccaagataacattccccggatgcttcactaatacctgttgctcacacccactctcgaatcctgccgaactcgaagagtccgacgcactcggcgtccgacgggctgcccagagacggctcaaggccgagcttggaattcctctcgaggaatag

SEQ ID NO: 30182 - DNA, 408 bp, synthetic construct
  source 1..408: mol_type = other DNA; note = Synthetic coding sequence
atggccgctctgagaccgctggtgaagccaaaaatcgtgaaaaagaggactaaaaaattcatccggcatcaaagcgaccgctatgtcaaaataaagcgcaactggcggaagcccagaggcatcgacaaccgggtcaggaggcggttcaaaggtcagatcctcatgccgaatatcggctatggaagcaataagaagacaaaacacatgttgccttctgggtttagaaaattcctggtccacaacgtgaaagagctggaagtgctgctcatgtgtaacaaaagttactgcgcagagatcgcccacaacgtgtcctctaagaatagaaaggccatcgtcgaaagggcggcacagctggccattcgggtcactaatcccaacgctagactgcgaagcgaggagaatgaatag

SEQ ID NO: 30183 - DNA, 3282 bp, synthetic construct
  source 1..3282: mol_type = other DNA; note = Synthetic coding sequence
atggggactggcgattttatttgcatcagcatgactggcggagccccttgggggtttaggctacaaggagggaaagagcaaaaacaacctctgcaggttgccaagatccgtaatcaaagtaaggcttccggaagtgggctttgcgagggcgatgaggtagtgagcatcaatgggaacccttgcgccgatcttacttatcctgaggttattaagcttatggaatctatcaccgattctctgcagatgcttataaaaaggccctcgtccggtatcagcgaagctctcatatctgaaaatgaaaataagaatcttgaacacctgacgcacggcggttacgtcgagtctaccactctgcagatccgccctgccaccaagacccaatgcaccgagtttttcctggcccctgtcaaaactgaggtaccactggccgagaaccagcgatcaggcccagattgtgcagggtccttgaaggaggagacaggacccagctatcagagggcccctcagatgccagactctcagcgcggacgggtggcagaggaactcatcttgcgcgaaaaggtcgaagccgtgcagcccggtccagttgtcgagctgcagctgtccctcagccaggaacgccataagggggcatccggcccacttgtcgcgctgcctggcgctgagaagtccaaaagtcccgacccggacccaaacctaagccatgacaggattgttcacattaacagtattccgacaaatgagaaggccgatccttttcttcgcagcagcaaaatcattcagatctcctctgggagggagctaagagttatccaggagagtgaggcgggagatgctgggttgcctcgagtggaagtgatactggactgttcagatcgccagaaaacggaaggctgcaggcttcaggccggaaaggagtgtgtggactctccggtggagggcggacaatccgaagctccaccctctctggtatcctttgcagttagctctgagggtaccgagcagggagaggaccccagaagtgagaaggaccatagccgcccacataagcacagagccagacatgccagactgagaagatcagagtccctgtctgagaaacaggtaaaggaggccaagagtaaatgcaaatctatcgccttgctcttaacagatgccccaaatcccaactctaagggtgtgctgatgttcaaaaaacgcaggagacgcgctagaaaatatacactggtgtcctacggcaccggggaactggagcgcgaagcggacgaagaggaagagggagacaaggaagatacatgtgaagtcgccttccttggggcatccgagtcggaagtggatgaagagctcctgtctgacgttgacgacaacacccaagtggtcaatttcgactgggatagcggactagtggatatagaaaaaaagctaaacaggggcgataaaatggaaatgctgccagacaccacaggcaagggggctctgatgttcgctaagagacgggaaagaatggaccagatcacggcgcaaaaagaagaggataaggtagggggaaccccctctagagagcaagatgcggctcagacggacggactgcggacaactacaagttaccaacgaaaagaagaggagtctgtcaggacacagagttctgtgagcaaatcatatatcgaagtcagtcacggactgggacatgtgccccagcagaacgggttctccggcacaagcgagacagcgaacattcaaaggatggttcccatgaaccgcacagctaagcccttccccggatctgttaaccaaccagcgaccccattcagcccaacccgaaacatgacatcaccaatcgcagacttccctgcccctcccccttatagcgccgtgacccctccccctgatgctttctcacggggagttagttcaccaatcgcagggccagcgcaacctcccccatggccccagccagccccttggagtcagcctgctttctatgattccagtgagaggatcgcatcccgcgacgagcggatatccgttcctgccaagaggacaggtatccttcaggaggctaaacgcagatcaacaaccaagcccatgttcacatttaaggaacccaaagtgtctcccaaccccgaattactcagtctcttgcagaatagcgaagggaagcgcggtacaggcgctgggggagattccggccctgaggaggactatctgtccctaggggctgaagcctgtaacttcatgcagagtagctcagccaagcagaagacgcccccacctgtggcccctaagccagcggttaagtcaagttctagccagccagtgaccccagtgtccccagtgtggtcccccggagtggctcccacccagccacctgccttccccacctcaaatccatctaaaggtacagtggtgagttccattaaaattgctcagccatcctacccgccagccagacctgcatcaacacttaatgtagccggtccctttaagggccctcaggcagccgtggcatcccagaactacaccccaaagcctactgtgtccactcctactgttaacgcagtacagccgggtgccgtcggacctagcaatgagcttcctgggatgagcgggaggggggcacagttgtttgccaagcgacagagtcgcatggagaagtatgttgttgacagtgacactgtgcaggcacatgctgccagggcccaatccccgacaccatcactgccagcttcgtggaagtacagctctaatgtgcgggcaccaccccctgtggcatataatcccatccactctccctcataccccctggccgcactcaaaagccagccatcagccgctcagccctctaaaatggggaaaaaaaagggtaagaagcccctcaacgccttggacgtgatgaaacatcagccctaccagctgaatgcgagcttgttcacattccaaccacccgatgccaaagacggcttgccacagaaatcgtccgtgaaagttaatagcgcactcgcaatgaaacaagctcttccacctagacctgtaaacgcagcctccccaaccaatgtccaggcaagttctgtttatagcgtgcccgcttacaccagccctccatcattttttgctgaggcgtcatcccctgtgtccgctagtccggtccccgtaggcatcccaacatctccgaaacaggagagcgctagtagtagttactttgtggcacccagaccaaagttctccgccaaaaaatctggcgtcaccatccaagtttggaagcctagcgttgttgaggagtag

SEQ ID NO: 30184 - DNA, 600 bp, synthetic construct
  source 1..600: mol_type = other DNA; note = Synthetic coding sequence
atggcaattgtccagactcttccggtgccgctggagcctgcacccgaagcggcaacagcaccccaggcaccggtgatgggcagtgtgtcctcccttatcagtggccgtccctgccctggtggacctgcccctcctaggcatcacggaccccctggaccaacattctttcgccagcaggacgggctactgcgcggagggtacgaagcccaggagccactgtgtccggctgtgcctccaagaaaggcagtccctgtgacaagctttacctacataaatgaagatttccggactgagtccccacctagcccttcgagcgacgtggaggacgctcgcgaacagcgagctcacaacgctcacctgcgcggaccgccacccaagttgatcccagtaagcggcaaactcgaaaagaatatggaaaagatcttgatcaggcctaccgccttcaaaccagtactgccaaaaccacggggagcaccctctctccctagttttatgggaccgagggccacaggcctcagtggaagccagggaagtcttacacagttatttggagggcctgcttctagttcgagcagttccagcagttcatccgccgcttag

SEQ ID NO: 30185 - DNA, 612 bp, synthetic construct
  source 1..612: mol_type = other DNA; note = Synthetic coding sequence
atgccctccacgccagcgtctactatatctgccagggaggagcttgtacagcggattcctgaagctagccttaacttccagaaagtgcccccaggatccctgaacagtagagattttgatcaaaacatgaacgatagctgtgaagatgccttagcaaataaaactagaccgcgaaaccgcgaagaggttatcttcgacaacctcatgctgaatccagtgtctcagctcagccaggcaatccgtgaaaataccgaacacctagccgaaaagatgaagatcctgtttcagaacacaggcagggcatgggaagatctggaggcgagaatcaacgctgagaatgaagttcccatcttaaagacttcaaataaagagatctcttcaatactcaaagaactccgtcgagttcagaaacagctagaggtcatcaacgccatcgttgacccatcaggatctctggatctgctgttacccactcttagctcatttgtgcctccaccccctgctttcgcgtgggagctggtcctggtctgtagggccagtcgtagagttcactgcacctttgtgttaaggtggtcatgtggttgcttaagtgaaaatggttatttcatttag

SEQ ID NO: 30186 - DNA, 321 bp, synthetic construct
  source 1..321: mol_type = other DNA; note = Synthetic coding sequence
tagcccacaacaagccgcccagcactcgacgtcaagggcggaacctcaccggctaaggaggacgccaaccaggaaatgtcaagtgtggcgtatagcaatctggccgtaaaggaccggaaagccgtggccatcctccattacccgggtgtggcaagcaatgggacaaagagccctgcgattatagactccgatcctgtcgatgaagaggtcctcatgtctttggtcgtagaactgggactcgatagggcgaatgagctgcccgagctgtggctgggtcagaatgagttcgactttacggctgattttccctccagttgctag

SEQ ID NO: 30187 - DNA, 456 bp, synthetic construct
  source 1..456: mol_type = other DNA; note = Synthetic coding sequence
atggcagcctttagagacatcgaagaggttagtcaaggactgttatcgctgctaggagcaaatcgtgccgaggcacagcagagacgattattgggtagacatgaacaggtggttgaaaggttgctagagacacaagacggtgcagagaagcaactgcgcgaaatccttacaatggagaaagaggttgctcagtcgctgctgaatgccaaggagcaggagagacaagagaaggaggtagacgaggacacgaccgttaccattcccagcgcggtgtatgtggcacagctgtaccaccaggtcagcaaaattgaatgggactatgagtgcgaacccggaatggtgaaaggaatccaccacggaccatcagtcgctcagcctatccaccttgactccactcagctatcccgcaagtttatatctgattatctctggagcctcgtggacacggagtggtag

SEQ ID NO: 30188 - DNA, 444 bp, synthetic construct
  source 1..444: mol_type = other DNA; note = Synthetic coding sequence
atgctacgctgcggccaaatgatatttgcacaggccctcgtctgtcgacacctgggaagagactggaggtggacccagagaaagaggcagcctgactcctacttcagtgtgttgaacgcattcatcgacagaaaagatagttattactcaatccatcaaatagcccaaatgggcgtcggggaggggaagtccatcgggcagtggtatggacccaatacggtggcccaggttctcaagaagctggctgtgttcgatacctggagttcattagccgttcacatagcaatggacaacaccgtagttatggaagaaatcagaaggctgtgtcgcacatctgtgccctgtgcaggagcgacagcctttccagctgattctgaccgccactgcaatggatttcccgctggagcggaggtgactaataggccttccccatggcgcccttag

SEQ ID NO: 30189 - DNA, 1482 bp, synthetic construct
  source 1..1482: mol_type = other DNA; note = Synthetic coding sequence
atggaaaaatacgaaaacctggggctggtgggagaaggaagctacgggatggtgatgaagtgcaggaacaaggataccggacgtatagtggcaataaagaaattcctggaatccgatgacgataagatggtgaagaaaatcgccatgagggagattaagttacttaagcagctgcgtcacgagaatttggttaatttattagaagtgtgcaaaaaaaagaagaggtggtatctggtctttgagttcgtggaccacaccatcctggacgacctggagctgttccctaacggactggattaccaggttgtgcagaagtatttgttccagattataaatggcatcggtttttgccattcacacaacattattcatagggacattaagccagagaatatccttgtgagccaaagtggggtcgtcaaactctgcgacttcggctttgctcgtaccctggcagctcccggtgaggtctacacagactatgtcgccacacggtggtacagagccccagagctcctggtcggggatgtaaagtacggcaaggccgtggatgtgtgggccatcggatgcttggttaccgagatgttcatgggagagcctctattcccaggcgattcagatatcgatcagctgtaccatattatgatgtgcctggggaacctcattcccaggcaccaggaactgttcaacaagaatcctgtattcgctggtgtgcgactgcccgaaataaaagaaagggagcctctggagcggcgataccctaaactgagcgaggttgttatagacctggctaagaaatgccttcacatcgatcccgataaacggccattttgcgcagaactgctgcaccacgatttcttccagatggatgggttcgccgagcggttcagccaagagctgcaacttaaggtccagaaggacgctagaaatgtgtccctgagcaagaaatcccagaatcgtaaaaaggaaaaggaaaaggacgattcactggttgaggagcgcaagaccctggtcgtgcaggataccaacgccgatcccaagatcaaggactacaagctgtttaagattaaaggatccaagatcgacggggagaaggcagagaaggggaatagggcatccaacgcctcctgtttacatgacagccgtacgtctcataataagattgtgccctccacaagcctcaaagactgcagcaacgtgtcggttgaccacactcgcaatccatctgtcgctattccaccattgactcataacctgagcgcagtggcaccgtctatcaattccgggatgggtaccgagacaattcctatccagggatatcgtgttgatgagaagaccaaaaagtgctccattccgtttgtaaagccgaaccgtcactccccctccgggatctacaacattaacgtgacgactctggtgagcggccctcctttgtcagatgactcgggggctgacctaccgcagatggagcatcagcattag

SEQ ID NO: 30190 - DNA, 6188 bp, synthetic construct
  source 1..6188: mol_type = other DNA; note = Synthetic coding sequence
atggatggttgtctcgacaccgaaacccccacagtctcaattcaagagaacgtggatgtggccagcctaaaacctatcagcgacagcgggattaactttacagacgctatatggtcccctacttgcgaacgcaggacttgcgagtgccacgaatcaatcgaaaagaataaggataagacagatctccctcagtctgtggtttaccagaacgaggaaggaagatgggttacagatcttgcctactacacctcttttaactctaaacaaaacttaaatgtgtctctaagcgatgagatgaatgaggacttccggtcaggttccgaggctttcgatctgattgcccaggatgaggaagagttcaataaagaacatcagtttatccagccatcctttgggtattttattcgctcccccgaaaaacgggaacctatcgcgctgatcagaaagtctgatgtatcacgtgggaatctggagaaagagatggctcatcttaaccatgacctttattccggggacctaaatgaacaatctcaagcccagctctccgagggatctatcacactccaagtagaggcggtggagtctaccagccaggtcgacgagaatgacgtgacactcaccgcagacaagggtaagacggaggacacatttttcatgtccaacaaaccacagcggtacaaagataagttgcccgacagtggggattccatgctgcggataagcactatcgccagtgcaatagctgaggcctctgtaaacacggatcccagtcagctggcggctatgattaaggcactttccaacaaaaccagggacaaaacgtttcaagaagatgaaaaacaaaaggattactctcacgtgcgccactttttgccaaacgatctggaaaagagcaatgggagcaatgccttggacatggagaagtacctgaagaagactgaagtttctcgttatgagtccgccctggagaacttctcacgtgcgtccatgtcagacacttgggacctgagtttgccaaaagaacagaccacccaggatatacaccccgtcgacctctccgctacatctgttagcgtccgcgcaccagaagagaataccgccgctatcgtgtacgtagagaacggagaatctgagaatcaggaatccttcaggactatcaattcctccaattctgtaaccaatcgtgagaacaatagtgccgtggtggatgtgaagacatgctctattgacaataagttgcaagatgtgggcaacgacgaaaaggctacctctatatctaccccaagtgactcctactcttctgtgcgaaaccccaggattacgagcctgtgcctgctcaaagactgtgaagagatcagagacaacagagaaaatcaacgacagaatgagtgcgtctccgagatcagtaatagcgagaaacacgttacctttgaaaatcaccgaatcgtctctcccaaaaacagcgacctgaagaatacctctcccgagcacggagggcgaggaagtgaggatgaacaggaatcattcagacccagcactagccccttgtctcactcctccccttccgaaattagcggcacctccagctcagggtgcgccctagaatcttttggcagcgctgctcaacaacagcagcctccttgtgagcaagagctgtccccactagtgtgtagtcccgcaggcgtgtccagactgacttatgtgagtgaaccagaatccagttacccaaccaccgccacagatgacgctttggaggaccgaaagtctgatataacctccgagctgtccacaaccatcattcagggcagcccagctgctcttgaagagagggcaatggaaaaactgcgcgagaaagtcccattccagaaccgcggtaaggggactttaagctccattatacaaaataattccgatacccgcaaggcaacagagaccaccagcctgtcctccaagccagagtatgtaaagcccgacttccggtggtccaaggacccctcatcaaaaagcggaaatctgctggaaacatctgaggtgggatggacctccaatccagaggagttggacccaatacgtttagccctgctggggaaatccggtctctcgtgccaggtgggatctgctactagtcatccagtctcctgccaagaacccatagacgaagatcaacgaataagtcccaaagacaagtccactgctggtagggagttcagtggccaggtcagccaccagacgacttctgaaaatcagtgcacccctatccctagttctactgtgcatagctccgttgctgatatgcagaacatgccagccgctgtccatgccctgctgacccagccgtccttgtccgcagcccctttcgcgcagaggtacctgggcactctgccttcgactggctctaccactctcccacagtgtcatgccggaaacgccacagtgtgtggattctccggtggcttaccataccccgcagtggctggagagccagtgcagaactcggtggcagtcggcatctgtctgggaagcaacattggatccggttggatgggcacatcttccctttgcaacccctacagcaatacactcaatcagaatctcctcagcactactaaaccttttccggtgccctccgtgggcacaaactgtggcatcgagccatgggatagtggagttactagcggactcggctcagtgcgtgtacccgaggagctaaagttaccacacgcatgttgtgtggggatcgctagtcagacactattaagcgttctgaatcctacggatcgttggcttcaggtcagcatcggagtactctctatatcagtgaatggggaaaaagtggacctgagcacctacagatgtttggtgttcaagaacaaagcaatcatccggccacatgctactgaggagatcaaagtgctcttcattccctcaagtcctggcgtgtttcgctgtacgttcagtgtggcaagttggccctgcagtaccgacgcagaaacaattgttcaggctgaagccttggcgtccacggtaaccttaactgccatcgccgagtcgcccgtgatcgaggtggagacagaaaaaaaggacgttctggactttggggacctgacctacggaggctggaaagcactaccacttaagctaataaaccggactcatgcaactgtgcccatacgtctcatcattaatgccaatgccgtggcctggagatgcttcactttctctaaggagtcggttagagcccctgtggaggtggcaccctgtgccgatgtggtgacaaggctagccggtcctagcgtcgtgaaccacatgatgcccgcatcgtatgatggtcaagatccggaatttctgatgatatgggtgctttttcactcacccaagaaacagatctcatcctcagatatcctcgacagcgctgaagaattcagcgcaaaagtggacatcgaagtcgatagtccaaatcctacccccgtgctgcggagtgtcagcttaagagcacgtgctgggatcgccaggatccatgcccctcgagatctccagactatgcactttttggcaaaagtggcctccagccggaagcagcaccttccactcaagaacgccggtaatattgaagtgtaccttgatatcaaagtccccgagcagggtagtcactttagcgttgaccccaagaatctgctgctaaaacctggcgaagagcacgaagtgatagtttcgttcacccccaaagacccagaggcttgtgaagaaagaattctgaagatctttgtacagcctttcgggccacagtatgaagttgttcttaagggagaggtgatttccagtgggtctaaacctctctcccccggtccatgcctcgatataccatctatactttctaacaagcagttcctcgcctggggcggagtacctctggggagaacacagttacagaagctggccctacgtaacaattcggcttccaccacccaacatctgaggttattaatcagaggacaggaccaggattgtttccagcttcaaaacacatttgggagcgagcaaagactgactagtaattgtgaaatccgaatccacccgaaggaggatatcttcatttctgtcctgttcgccccaactcggctcagttgcatgttagctcgactggagataaagcagctgggcaaccggagtcagcctggcattaaatttaccatacccctgagcggctatggcggaaccagtaatctcatcttagaaggcgtgaagaagttatcagacagctacatggtgacagtcaatggccttgtgccaggtaaggagagcaaaattgttttttcagttaggaataccggctctagggctgcttttgttaaagctgttggcttcaaggacagccagaagaaagtattgctggaccctaaagtcctccgaattttccccgataaattcgtgctcaaggagcgaacacaggaaaacgttactctgatctacaacccatctgaccgtggaatcaacaataaaactgctacggagttatccactgtgtacctcttcgggggagatgagatttcgcgccagcagtacagacgggctctgctgcacaagccggagatgattaagcagatcctgcctgagcacagcgtgcttcagaacatcaatttcgtggaggcattccaggatgagctgctggtgaccgaagtgtacgatttgcctcagcggccaaatgacgtgcagcttttctatgggagtatgtgtaaaattatattgtccgtcatcggggaatttcgggactgtatttcctcaagagaatttctacagccttccagcaaggcctccctggaaagcacgtctgacctgggcgcttccggtaagcacggaggaaatgtgtccctcgatgtgctgcccgttaagggaccccaggggagtccgctcctgtctagggcagcccgacctcccctggatcagctggccagcgaggagccttggacagtattgcctgaacacctgatcttggtggccccttcaccatgtgatatggcgaagacaggacgatttcaaatcgttaataacagtgttaggttactacgattcgaactgtgttggccagcccactgtttgaccgttactccgcagcacggatgtgtagctcccgaatcgaagctccagatcctggtgagccccaattcctccctgagcactaaacaaagcatgtttccatggagcggcctaatatacatacattgtgacgacggtcaaaaaaaaattgtgaaagtgcagatccgagaggacctgactcaggtagagctgctgactcggctgaccagcaaacctttcggaatcctgtctccggtctccgaaccatcggtgagccacctggtcaagcccatgacaaagcccccatccacaaaagtcgagatcagaaataagtcaatcacctttcctacgaccgaacccggtgagactagcgagtcttgtctggagttagaaaatcatgggaccacagatgtaaaatggcacctcagctccctggcccctccctacgtcaagggggtcgatgagagcggagacgtgttccgtgccacgtatgctgccttcagatgcagtccgatcagcgggctgctcgaaagtcacggtatccagaaagtgtctataacattcctgccaaggggcaggggcgactatgcgcagttctgggacgtggagtgccatcccctgaaggaacctcacatgaaacacaccctgcgattccagctgtctgggcagtccatcgaggccgaaaatgaacccgaaaacgcgtgtctgtccacagatagtcttatcaaaatcgaccaccttgtaaaacctcggcgtcaggccgtgagtgaggcctccgcccgaattcccgaacagttggatgtcacagccagaggcgtgtacgcaccggaagacgtgtaccggttcaggccaacctctgtgggggagagcagaacgctgaaggtgaatctccggaacaattcctttattacgcatagcctcaagtttctctctcctcgggaacccttctatgtgaaacactccaaatactcacttcgcgcacagcattacattaatatgccagttcagtttaagccaaagtctgctggtaaattcgaagcactactggtgatacagacagatgaaggcaagtctattgcaattcgcttgatcggcgaggccctcggcaagaatta

SEQ ID NO: 30191 - DNA, 1545 bp, synthetic construct
  source 1..1545: mol_type = other DNA; note = Synthetic coding sequence
atgagtatcagtagtgacgaagtgaattttcttgtttacaggtacctccaagaatccgggttctctcatagtgccttcacattcggtatcgagagccatataagtcagagcaacatcaacggcgctctcgtgcctcctgcagctctgatctcgattattcagaaaggccttcagtatgtagaggcagaggtctcgattaacgaagatgggacgttgtttgacgggcgaccgatcgagagcctgagtctaatagatgcggtgatgcctgacgtcgtgcagacgcgccagcaggcctatcgcgacaagctggcacagcagcaggcggctgccgcagcagctgcagcggcagccgctagtcagcagggcagtgcaaaaaacggcgaaaacacagctaatggggaagagaatggcgctcatacaatagccaataaccatacagatatgatggaagtggatggggacgtagagattccacctaataaagccgtggtcctccgcggacacgaatctgaggttttcatctgtgcctggaaccccgtcagtgatctgctggccagtggctcgggtgactccaccgcccgaatctggaacctgagcgagaattctacctcaggatctacccagctggtgcttcggcactgtattcgggaaggcggacaagacgtgccaagcaataaagacgtgacctctctggattggaactctgaaggtacgctcctggcgacagggagctacgacgggtttgccaggatctggacgaaggatggaaatctggcctcaacactgggccaacacaaaggccctatctttgcacttaagtggaataaaaagggcaacttcatcctctcagcaggtgttgacaaaaccaccattatctgggatgcccataccggagaagctaaacagcagtttccattccattcagccccagcactggacgtggattggcagtctaacaatacattcgcttcttgttccacagatatgtgcattcatgtgtgcaaactaggccaggacaggccgattaagacttttcaggggcatacgaatgaagtgaatgccattaaatgggatcctaccgggaatctgctggccagctgctcggacgatatgacattgaagatctggagcatgaagcaggacaactgcgttcatgatttgcaagcccataacaaggaaatctacactatcaagtggtccccgactgggcctgggacaaataatccgaatgcaaacctgatgctggcctctgccagtttcgacagcaccgtacgcctgtgggatgtggacagggggatttgcattcacacactgactaagcatcaagagccggtctatagcgtcgcattttcccctgacggccgatatttggcttcaggatcctttgacaagtgtgttcacatttggaacacacagacaggagccctggtacactcctaccggggtaccgggggaatctttgaggtttgctggaatgccgcaggcgacaaggtaggggctagcgctagcgacggatctgtatgtgtgctggatctacgcaaatag

SEQ ID NO: 30192 - DNA, 2034 bp, synthetic construct
  source 1..2034: mol_type = other DNA; note = Synthetic coding sequence
atggaggagactatgaaactggcgaccatggaagatacagttgagtattgcttgtttttgattcccgatgaaagccgagattcagataagcataaagaaatcttgcagaagtacattgaacggatcatcacgaggttcgcccctatgctggtgccatatatctggcagaaccagccctttaacctcaagtacaaacctggaaagggaggagtgccagctcatatgtttggcgttacaaaattcggagacaatatcgaggatgaatggttcattgtatacgtgatcaagcagattacgaaggagtttcctgagctggtcgccaggatagaagacaatgacggcgaattcctcctgatcgaggcagccgacttcctacccaagtggcttgatcccgaaaactcaactaatagagttttcttctgccacggcgagctctgtattattcctgcccctcgcaaaagcggtgccgaaagctggctccccaccactccaccgacaatcccccaagcactgaacataataacagcacactcggagaagattttagctagcgagtcgattcgagccgcagtaaatcgtcgcatccgcggatacccggagaagatacaggcttctctacacagagcacactgttttctgcccgctggaatcgtggctgtgttgaaacaacggccacgcttggtcgctgctgccgtccaggctttctatctccgagacccaattgatctgagggcctgtagagtgtttaagacatttctgccagagacccgaattatgaccagtgttacgtttacgaaatgcctttatgcgcaactcgtacaacagcgcttcgtgcccgaccgacgctccggttaccggctccctcccccatctgacccccagtatagagcacacgaactggggatgaaacttgcacacggcttcgagatcctgtgctctaagtgcagtcctcacttttccgattgcaagaaatccctcgttaccgcgtcccccctctgggcctcttttctggagtccttaaaaaagaacgactacttcaagggcctgatcgaaggcagtgcacagtatcgcgaacgcctcgaaatggcagagaattatttccagctttccgtggattggcctgagcgcttagaggtgcaatggcgagacccgggtctgctgcaagctcctccgcctggatttacccctttcatatgcctgagtctgctgtcaacctgggacaactcgagccttgccatgagtcctggagaggaaatcctgaccctgctacagacaattccattcgacatcgaagacttgaagaaagaagctgccaatttgccacctgaagatgacgatcagtggctggatctgagccctgatcagctggatcagctgttacaggaagcggtgggtaagaaagaatctgaatcagtaagtaaggaagaaaaggaacaaaattacgacctgaccgaggtgtctgagagcatgaaggcgtttatttccaaagtgtcgacccacaagggggctgagctcccacgcgagcctagtgaggctcccataacttttgacgctgacagctttttgaattactttgacaagattctgggtccacggccaaacgagagcgattctgacgatctggatgatgaagatttcgagtgtctggactcagacgacgaccttgacttcgaaacgcatgagcccggtgaggaagcttccctaaaaggaaccctggacaatttgaagtcatatatggcgcagatggaccaggagctagcccacacatgcatctcaaagtccttcacgactcgtaaccaggtcgaacctgtgtctcagactactgataataacagcgatgaggaggatagcggaaccggggagtccgttatggccccagtggacgtcgatctgaatctcgtaagtaacatactggagagttatagttctcaggccggactggctggccctgcgagcaacctgctgcagtcgatgggagtacagctgccagataacaccgatcataggccaacaagcaagcccaccaagaactag

SEQ ID NO: 30193 - DNA, 1821 bp, synthetic construct
  source 1..1821: mol_type = other DNA; note = Synthetic coding sequence
atggaagaatctccgttgtctcgggctccaagccggggtggagtgaacttcctcaatgtggctcgaacttatatcccaaatacaaaagttgagtgtcactatacccttccaccaggtactatgccatcagcttctgattggattggcatatttaaggttgaagcagcctgtgtgagagattaccatacatttgtgtggagctcagttccagagtcaactactgatggcagtccaatccacacaagtgtgcaattccaagagcctcggcctatggatgagttagtgacactggaagaagccgatggaggctccgatatactgttggtggtccccaaggccaccgtcctgcagaaccagctggacgagagccaacaggaaaggaacgatctaatgcaactgaagctccagctggagggacaggttactgaactgcggtctcgcgttcaagagctggaaagggccctggcgacggctcgtcaggaacacaccgaactgatggagcaatataaaggcatcagccggtctcacggagaaattaccgaggagcgcgatattctatcgcgccaacaaggtgaccacgttgcccgaattcttgaactagaagacgatatccagaccatctcagaaaaggtccttacaaaggaagttgagctggatcgtcttcgcgatacggtgaaggctctgaccagagagcaggagaagttgctcggccagctgaaggaggttcaggcggataaggagcagagtgaagcggagctcgagcctctgaaggagcagctgaggggggcacaggaactcgccgcatctagccagcagaaggccacattactgggagaggagctggccagcgctgcagccgctcgggatcgtaccattgctgagttgcacaggtctagactggaagtggctgaggtaaacggcaggctggccgaattggggcttcaccttaaggaggaaaaatgccagtggtcaaaggaacgagccggtctattgcaatctgttgaagctgagaaggacaagatcctcaaattgagcgcagagattctcaggctggaaaaggcagtccaggaagagaggactcaaaaccaagtatttaagacggaactggccagggagaaagatagttctctggtccagctgtctgagagtaagagagagctgacagaactgagatccgccctgcgggtcttgcaaaaggaaaaggaacaattgcaagaggaaaagcaggagctattagagtacatgagaaagctcgaagcccgactagaaaaagttgcggacgagaagtggaacgaagacgctaccactgaagacgaggaggctgcagtgggcttgagctgcccagccgctctgacagactcagaggacgagtcacctgaagacatgaggctacccccatatgggctctgcgagcgcggtgatccaggctcttcacctgctggaccgagagaggcttccccgttagtggtgatctcccagcctgctcccattagtccgcacctgtcaggcccagctgaggactcgagctcggactccgaagctgaagacgaaaaaagcgtactaatggccgctgtgcagtcggggggagaggaagccaacctgcttttgccagagcttgggtcggccttctacgacatggcgtctgggttcaccgtaggtactcttagcgagacttcaactggtggcccagcaacgccgacctggaaggagtgccccatttgcaaagaacgctttccagccgaaagtgataaggacgctttggaggaccacatggatgggcactttttctttagtacgcaggacccttttacattcgagtag

SEQ ID NO: 30194 - DNA, 2997 bp, synthetic construct
  source 1..2997: mol_type = other DNA; note = Synthetic coding sequence
atgaacaggcgcaggaaattcttgttggccagcgtcctggccctgcagaattcttcctttatttatccttcctgccagaaatgtttttctagaattatacttgtcagtaagcgtagcaactgtccaaaatgcggaagtaccggcgagtctggtaacgctaattaccgttataaactctccctgaaggtggccgaatctaacaagctgttcgttatcactgtatttggaagttgtctggatacttttttcggcctgaccgctaccggtcttcataggtatatccaggatccgaataagattccggaaaccttggacaacgatactacacagaatctcttaacgaaggccgtggaaacatgcttcgtaggccagtcatttatttttggtgtgacaaatttcgagaaccaacccggacaaggcagcgacgcctcaaactttctgcagcagtgctccgatcacaaaaggaaggccaaggctttagtcgcttgtcagatcgttttgcccgatccaggcatcgccggttttaccgtgattgattattttcatcagctgttgcaaacctttaatttccgaaaactgcagtgtgattcccaggccccaaataatcacttactggctctcgaccacagcaattctgacctgtctagcatttacacctcagactctaccagcgatttttttaaaagctgctccaaagacacattttctaaattctggcagccatcactagaatttacctgtatcgtctctcagcttaccgacaacgatgactttagcgcgtctgagcagtctaaggcattcgggactctccaacaaaaccgtaagtccatctcaatcgcagaggcaacaggtagttcgagctgccacgatcctatccaggactcatggtcactcgtcagctatatggacaagaagagcaccgcagaaaagctcggcaaagagttaggcttacaagccaaggagctgagcgctgttcattctagtcaccatgaaattggcgttaatgactccaacctgtttagtctggagatgagggagcccttagaaagcagcaacacaaagtcgttccacagtgctgttgagatcaagaatcggagccagcatgaactgccatgttttcaacaccatgggatcgatactcctacatcattgcaaaagagatctgcctgctgcccaccttccttgttgcggctggaagaaaccgcctctagctcccaagacggggaccctcagatttgggatgacctgccattcagtgagagtttgaacaagttcctggctgtcctggagagcgagatcgctgttacccaagcagacgtttctagccgaaaacatcatgtggataacgatatcgacaagtttcatgcagaccattccagactgagtgtgaccccccagagaaccaccggcgcactgcatactccgcctattgcactgaggagctcccaggtgattgtgaaggctaattgctccaaggatgacttcctcttcaactgcaaagggaacctgtcaccctcagtggagaaggaatcccagcccgacaataaggtcgaggcggtctcagtgaaccataacggcagagatatgagtgagtattttctcccaaacccgtatctgagtgccctttcatcctcaagtaaagacctggaaactattgttacccttaagaagactattagaattagcccacaccgagaatcggaccattcaagtctgaataacaagtatctcaacggctgtggcgagataagcgtgtcggagatgaacgagaagctgactacactgtgctacagaaaatataacgacgtatccgacttatgcaagcttgaaaacaagcaatactgccgctggagcaaaaaccaggacgactcatttaccatctgccgaaaactgacatacccgttagaaacgctgtgcaatagtccaaaccggtcaaccaataccctcaaggagatgccatggggccacataaataataacgtcactcagtcttactctatagggtatgaggggagctacgacgcaagcgccgacctatttgacgacatcgcgaaggagatggatatagctaccgagattactaagaaaagtcaggacatcttgctgaaatggggtacatccctcgcagaatcccatccgagcgaatctgattttagtctaagaagcctgagcgaagactttatccagccaagtcagaagctgagtttgcaaagtctcagtgactcccgacactcgcgcacatgttccccgaccccgcacttccaatctgactcggagtataactttgagaattcccaggactttgttccatgctctcaatctacccccatatctggcttccaccagaccagaattcatggcatcaaccgcgcattcaaaaaacccgtcttctactcagatcttgacgggaattacgagaagatcagaatctttccagagaacgacaagcagcaggcctctccatcttgcccgaaaaatattaagacccccagtcagaaaattcggtctcccatcgtctcaggcgtttcccagcctgatgtgttcaaccattacccattcgcggaatgtcatgagacggactcggatgaatgggtgcctccaacgacccagaagatatttcccagcgatatgctggggttccaagggatcgggctgggcaaatgtctggcagcatatcacttcccagaccaacaggaactaccaaggaagaaactgaagcatattcggcagggaacgaacaaagggcttatcaagaaaaaactgaagaacatgctcgcagccgttgttacaaaaaagaaaactcataagtacaactgcaaatcttccggctggatcagtaagtgtccagatattcaagtgctcgccgcaccacagttgcaccccattctgggcccagattcctgtagcgaagtcaagtgttgtctaccattcagtgagaagggccctccctccgtatgcgaaacgaggagtgcatggtccccagaactctttagctag

SEQ ID NO: 30195 - DNA, 471 bp, synthetic construct
  source 1..471: mol_type = other DNA; note = Synthetic coding sequence
atggccgattcacctggaggatacaaagagtgcgggaccaatgagggaccccaggaggacgagaatggcagtagcgcctctggatcaagcaaagtcagacagctttggtccgaagatagctgcgaatcaggcaagctgccagcaactaggaccgtgtactgtatgaacgaggctgagattgtggatgtggccttaggcatccttatcgagtctagaaagcaagagaaagcctgtgaacagcctgccctggccggagcagacaatccagagcattcgccgccttgctctgtctccccccacactagctccggctcctcttctgaagaagaggacagtggcaagcaggccctcgcccctgggctctcaccgagccagaggccaggaggctcatccagtgcgtgctcaaggtccccagaggaggaggaggaagaggacgtgctgaagtatgtaagagagatatttttttcctag

SEQ ID NO: 30196 - DNA, 1377 bp, synthetic construct
  source 1..1377: mol_type = other DNA; note = Synthetic coding sequence
atggccgagctgcaaatgctccttgaggaagagatcccaggcggacggcgagctctgtttgatagctacacaaatctggaacgggtcgcagactattgtgaaaataactatatccagtctgcagataagcagagggccctagaagagactaaggcctataccactcagagccttgccagtgttgcctacctcattaacaccctggctaataacgtgctgcagatgcttgatattcaggcatctcagctgaggaggatggaaagtagcattaaccatatatctcagacggtggatatccacaaagaaaaggttgcacggcgagagatcggaattttgacaaccaacaagaacacgtcccgtactcataagatcatcgccccagcaaatctggaacgaccggtgaggtacattcgcaaaccgatcgattacacaatcctcgacgacatcggacatggggtgaaggtctcaactcagaacatgaagatgggcggtttgccaaggaccactcccccaacccaaaagcctccgagcccaccaatgtcaggaaaaggcaccctgggctcttcaggcagtagcggaggatcgcacccctctagccgaagcagctctcgggaaaattctggatccggctcagtgggggtcccaatcgctgtcccgaccccctctcctccctctgtgtttccagcacctgccggaagtgcagggactcccccattgcccgctacttctgcctccgccccagccccactcgtgccagctacggttcctagctccacagcgccagacgcggctgcgggaggggctcagaccctcgcagacggatttacttctcccacccccccagtggtctccagcacccctccaactggtcatccggtgcagttctattctatgaatcggcctgcctcaaggcatacacccccaacgattgggggaagtctcccttatcggaggccacctagcatcacctcccaaacttccttacagaaccagatgaatggagggcctttctattcccagaatcccgtatctgataccccccctcccccacctcctgtcgaggaacctgtgttcgatgaatcccccccaccaccaccccctcctgaggattacgaggaagaggaggcggctgtggtcgagtactctgacccatacgctgaagaggaccctccctgggcccctcggtcctacctagaaaaagtcgttgccatctacgactacactaaggacaaagaagacgagctttcatttcaggagggggctattatatatgtcatcaaaaaaaatgacgacgggtggtatgagggcgtgatgaatggggtaacagggctgttccccggtaattatgtggagtctatcatgcactattcggagtag

SEQ ID NO: 30197 - DNA, 5222 bp, synthetic construct
  source 1..5222: mol_type = other DNA; note = Synthetic coding sequence
tgaaaaatctaccctgaggagatcactccactccttccggcaatcagtggcgagaagattgctgaagatcagacctgcttttttctgcaaatcttgctgaagtatatggtgatccaggcagcttctctggaatggaagaataaggagaaccaggacactggattcaagtttctgttcaccctgttccgcaaatactatttgccacatctgtttccttcttttacgaaattgaccaatatttacaagccagtcctggatatcccacacctcaggcccaaaccggtttacatcaccaccaccagggacaacgagaacatttattccaccaagatcccgtacatggcggcaagggtggttttcatcaaatggatagttacttttttcctggagaagaagtacttaaccgctacacagaataccaagaatggcgtcgacgtgctgcccaaaatcattcagacggtgggagggggagctgtccaggagcgtgcgcctgagctcgacgggggtggccctacagaacaggataaaagccattctaatagttccaccttgagcgaccgtcgcctcagcaatagttcgctgtgctccatcgaggaagaacaccgaatggtgtacgagatggtccagcgaatactcctctccacccgtggatacgtaaactttgtgaatgaggtctttcaccaggctttcctcttgccaagttgcgagatcgcagttacccggaaagtggtgcaggtgtaccggaagtggatcctgcaggacaaacccgttttcatggaagaacctgataggaaagacgtcgcccaagaggacgctgaaaagcttggctttagtgagacagattccaaagaggcgagctcggaatcgagcggccacaagcgcagttcctcttggggccgtacgtattcctttacatcagcgatgagtagaggatgcgtgaccgaggaggagaacaccaatgttaaggccggagttcaggcattattacaagtcttcctgacaaactccgccaatatcttcttgctggaaccatgcgccgaagtgccggtgttactgaaagagcaagtggatgcctgcaaggcagtgctgattatctttagacgtatgatcatggaactgaccatgaataaaaagacatgggagcagatgctccagatcttactccggatcacagaggcggttatgcaaaagcccaaagataagcagattaaagacctgttcgcacaatcacttgcaggtcttttattcaggactctgatggttgcttggattcgcgctaacttatgtgtgtatatctcccgcgagttgtgggatgacttcctgggggtgctctcatcccttactgaatgggaggagctgattaacgagtgggctaacatcatggacagcctgactgctgtgttggccagaaccgtctacggagtggagatgaccaaccttcctctggacaaactttcagaacagaaggagaaaaagcagaggggaaaaggttgcgtgctcgatcctcaaaagggtactaccgtaggtaggagctttagcctatcatggcggagtcaccctgacgtgacagaaccgatgagattccggagtgctaccacctcaggcgctccaggggtggaaaaagcgagaaacatcgtgcggcagaaagccaccgaagtggaggagtgtcagcagtctgagaacgccccagcagccggttctgggcacctgacagttggtcaacagcaacaggttctgagaagtagtagcacctccgatatcccagagcccctgtgcagcgatagttcgcagggccagaaggcggagaatacgcagaacagctcatcgtccgagcctcagcctatccaagagaataagggccatgttaagcgcgagcatgaaggaataactattttagttagacgcagttcttccccggcagagctggatttaaaggatgacctgcagcaaacccaggggaagtgtcgagagaggcagaaaagcgaaagtactaactcggataccacgctaggctgtaccaatgaagccgagctgagcatgggtccttggcagacctgtgaagaagacccggaattaaatacccccaccgatgtggttgctgatgccgacgcacggcactggctgcagctgtctccgacagacgcgagcaacctgaccgactcctccgagtgtctgaccgatgattgcagcatcatagccggagggtcactgaccggctggcaccctgacagcgccgctgtcttgtggagacgggtcctcggaattctgggtgacgtaaacaacattcagtcccctaagatccacgctcgggtgttctgctatctctatgaactctggtacaagttagcaaaaattcgagacaacctggccatttccctcgacaaccaatcatccccctcaccccctgtgctgataccgccactgcgcatgtttgcctcatggctctttaaagcagcaaccctgccaaatgaatacaaggagggtaagctgcaggcttataggctgatttgtgccatgatgactcgtcgccaggatgtgctgcctaactcagatttcctcgttcatttttacttggttatgcatctggggttaaccagtgaggaccaagacatcttaaatactatcattcgacactgtccacccagattcttcagcctgggatttccgggttttagtatgctcgtcggggactttataacggctgccgctcgggtgctgtctacggatatcctgactgcgccacgaagtgaggccgtcactgtgttaggatctctagtgtgctttccaaatacataccaggagattcctctgctgcagtccgtgcctgaagtgaatgaagcaataactggtaccgaggacgtcaagcattatctgattaatattcttttgaagaatgccactgaggagcccaacgaatacgcgaggtgcatcgcagtctgctcacttggagtctggatatgcgaggagctggcgcagtgtacctcccatccacaggtcaaggaagccatcaacgtcatcggagttactctcaagttccccaacaagattgtagcccaggttgcctgtgatgtgctgcagttactggtgtcttattgggagaaactccagatgttcgagacctctctccccagaaagatggctgaaatcttggtggctaccgtggccttcctgctgccctcagccgagtattcatccgttgaaaccgacaagaagttcattgtttcgctactgctctgtcttctggactggtgcatggcattacccgtttctgtactgctgcacccagtatcaactgccgttctggaggaacagcattccgcacgcgctccccttctagactatatttaccgcgtgctccattgttgcgtttgcggcagtagcacatacacccagcaaagtcattacatcttaaccctggcagatctgtccagcactgattatgacccttttcttcccctcgctaatgtgaagagctctgagcccgtgcagtatcacagctccgccgaactgggcaacctgttgacagtcgaagaagaaaaaaaacgacgatctctagagctgattcccctgaccgcaagaatggtgatggcacatctggtgaatcacctcgggcattatccactgtccggcggtcctgccattctgcacagtttagtctctgagaatcacgataacgcccacgtcgagggttctgaactgtctttcgaggtattccggtcaccaaacctacagctgttcgtcttcaacgattcgaccctgattagttatttacaaaccccaacagaaggtccagttggcggaagtcccgtggggtcgctctccgatgtcagagtgattgtgcgcgatataagtgggaaatattcctgggatgggaaggtgttgtacgggcctctggaagggtgcttggcgccaaacggaagaaacccaagctttctcatctcgagctggcaccgagacactttcgggccacagaaagatagttcacaagtcgaggaaggagacgacgtgctcgacaaattgctcgaaaatattgggcacaccagtcccgagtgcctgcttccctcccagctcaacctgaacgaaccctcacttacaccgtgcggcatgaactacgatcaagagaaagagattatcgaagtcatcttacggcaaaacgcccaggaggatgaatatattcaatcacacaattttgatagtgccatgaaagtgacaagccaggggcaaccctccccagtggaaccaagaggtcctttttatttctgcaggctgctgctggacgacctcggcatgaactcgtgggaccggagaaagaacttccatctgctcaaaaagaactccaagctgttgcgagagctgaaaaatctggacagccgtcagtgtagagagactcacaagattgcagtcttctatatcgccgagggtcaggaggataagtgttctatattgtcaaacgagcgcggaagccaggcatatgaggatttcgtcgcaggactcggctgggaggtagacttgtctactcattgtggcttcatgggtgggctgcaacggaatgggtcaactggacagacagccccatactacgccactagtactgtggaggttatttttcacgtgtccacccgaatgccttctgactccgacgacagcctgacaaaaaagctgaggcacctgggaaacgacgaagtgcacatcgtatggagcgagcacagtagagactatcgacgcggtattatcccaaccgccttcggggatgtttccattataatctaccctatgaaaaaccatatgttcttcattgccattaccaagaaacccgaggtaccgtttttcgggcctctatttgacggcgcaatcgtcagcggtaagctgttgccctcacttgtgtgcgccacctgcatcaatgcctctcgggcagtcaagtgtctgatcccactgtaccagtctttttatgaggagcgggcactgtatttggaagccatcattcagaatcatcgagaggtcatgacctttgaagacttcgccgctcaggtcttctccccttccccatcttactcactgtccggaaccggggctctagctagcagcttgtccgccgatctggaagaaccgctgtctgaggaggaaacggaacacccactactaccgctgcccagagctactaaaccacgcataagtaggaaatttagatgttgcacgtcagccctttcccgatcctcccatta

SEQ ID NO: 30198 - DNA, 1836 bp, synthetic construct
  source 1..1836: mol_type = other DNA; note = Synthetic coding sequence
atgcctcacctggatatgaaaacgcacgtttgtccatcagtggagggtccaaaaaagaaaggcggaatcacatgcttctgttgtggaggaccatttagagccgcagaccgcagtaagactaggtcccccaagctgtctcatagcccccagcccccatcactgggcgaccctgtggagcatctgagcgagacgagtgccgattcgctggaggccatgtctgagggcgacgcccctaccccctttagcagaggctccagaacccgcgcatctctgccagtggtccgctccactaaccagactaaggagcggagtctgggtgtgttgtacttgcaatacggggatgagactaagcagttgcgtatgcctaacgagatcacatctgcagatacgattcgagcactgttcgtctctgcttttccacagcagttaacaatgaagatgcttgagagcccctcggtggctatttacattaaggatgagagtaggaatgtgtattacgagctgaacgacgttaggaacatccaggacaggtccctgttgaaagtttataataaggaccctgcccatgcattcaaccacacccctaagacaatgaacggcgacatgcggatgcaacgggagttggtttacgccagaggcgatgggccaggagccccacgaccgggaagcaccgctcacccaccacacgcaataccaaattcaccaccctccaccccagtgccccatagtatgcccccatcccctagcaggatcccctacgggggtacccgctccatggtagtaccaggcaatgcaacaataccaagggacagaattagctccttgccagtatcccgccctatttccccctcaccgagcgctatcctagagaggagagatgtgaaacctgatgaagatatgtctggcaagaatatcgccatgtataggaatgagggcttctacgcggatccatacttatatcacgaggggaggatgagcattgctagcagccacggaggccatcccctggacgtgccagaccacattatagcctaccacaggaccgccatcaggtcggccagcgcatactgtaaccccagcatgcaggccgaaatgcacatggaacagtcactctacaggcaaaaatcccgtaaatacccggattcccacctgcccacactaggaagcaaaacacctcctgcgagtccccatagagtgtcagacctgagaatgatcgacatgcacgcccactacaacgctcacgggccaccgcacactatgcagccagaccgcgctagcccgtctagacaggccttcaagaaggagcccggtaccctcgtctatattgagaaacccagatcggccgcaggcttgtcctctctggtggatctgggcccacctctcatggaaaagcaggttttcgcttattctactgcgaccatacccaaggatcgagaaaccagtgaaaaaatgatgaagaccactgccaaccgcaatcacactgattcagcgggtaccccccacgtttcgggaggtaaaatgctgtctgctttagagagtaccgtacctccctcccaaccaccgcctgtaggaaccagcgctattcacatgagcctgctggagatgcggaggtcagttgcggagttgcgcctgcagctccagcaaatgcggcagttacagttacagaatcaggaactgctgagagccatgatgaaaaaggctgaactcgagattagtggtaaggtcatggagactatgaagcgactggaagatcctgtacagcggcagcgagtactcgtggagcaggagcggcagaaatatctgcatgaggaggagaagatagtcaagaaactgtag

SEQ ID NO: 30199 - DNA, 189 bp, synthetic construct
  source 1..189: mol_type = other DNA; note = Synthetic coding sequence
taagaaaacccgctcgtttattgcgacgggcacggatgctcagttgcagtgcatcaggcctgttacggaatagtgcaggttcctacgggcccatggttttgtaggaaatgcgagagccaggagagggcggcaagggtagttggaccaatgtggtttgttccttgtattttccagagatataacctgtag

SEQ ID NO: 30200 - DNA, 1869 bp, synthetic construct
  source 1..1869: mol_type = other DNA; note = Synthetic coding sequence
atggccatggccccaagtccttctctcgttcaagtttacactagccccgcagcagtcgcagtctgggaatggcaggatggcttagggacctggcatccttattcagctactgtctgcagctttattgaacagcagttcgtgcagcagaagggtcagagattcggccttggcagcctggcccactcaatccctctgggacaggccgatccctctctcgcaccgtatatcatcgacctcccatcctggacccagtttcggcaggatacaggcaccatgcgcgctgtgaggaggcatttgttcccccagcattccgcccctgggcgaggagtggtgtgggagtggctatccgatgatggttcctggactgcatacgaggcgagcgtttgcgactacctggaacagcaggttgcaagaggtaaccagctggtggacctggcacccttgggctacaattacacagtcaactatacaacccacacccagacaaataaaacatccagcttttgtagaagcgtgcggcgacaagcaggcccaccatacccggtcaccactattattgcgcctcccggacataccggcgtcgcgtgttcctgtcaccagtgtctgagcgggagccggacaggtccagtatccggcagatatagacactcgatgaccaacctgccagcttaccctgttcctcaacacccaccccacagaacagcttcagtgtttggaacacaccaagcgtttgcgccttacaataagccatctctgtctggcgcaagatctgcccctagactgaacaccaccaatgcctggggagccgcacccccaagcctgggatcacagcctctttaccgatcctccctgtcacacctcggcccacagcatctccctcctggatcctccacgtcaggcgctgtttcagcgagcctgccatcaggccctagctcttcaccagggagcgtacccgctaccgtccctatgcaaatgcctaaaccctcgcgtgtgcagcaagcacttgccggaatgacatccgtgctcatgagcgccattggtcttccagtgtgcctgagccgtgccccacagccaactagtcctcctgcttcacgattggccagcaagtcccacggtagcgtcaagcgtcttagaaagatgtctgttaaaggtgcaacaccgaagcctgaaccagaaccagaacaggtcatcaaaaattacaccgaggagctgaaagtgccccctgatgaagattgcatcatttgcatggaaaagctgtccaccgcctccggttattccgatgttactgacagcaaagcaattgggtcactggctgtagggcacctcactaagtgttcacacgccttccatcttctatgtctactggctatgtattgcaacggaaataaggatgggtccctgcagtgtccaagctgcaaaacaatatatggggagaagaccggaacacagcctcaggggaaaatggaggtactaagatttcagatgtcccttcccggacatgaagattgtggtacgatcttgattgtctactccatcccccatggcattcaggggccagaacatccaaaccctggaaaaccgtttactgctcgaggttttccgaggcagtgttacctgccagacaacgctcagggcagaaaggtgttggaacttctgaaagtcgcctggaagcgacggcttatttttaccgtcggcaccagttcaacgacaggggagaccgataccgttgtgtggaacgagattcatcataaaaccgagatggatcggaacattacaggtcacggttaccctgatcccaactatctacaaaacgtgctggctgaacttgccgctcagggcgtgaccgaggattgcttggaacagcagtag

SEQ ID NO: 30201 - DNA, 546 bp, synthetic construct
  source 1..546: mol_type = other DNA; note = Synthetic coding sequence
atgggcggaaggtccgcccaggccggattaggcacaagaatcactccaatgatggagctgaagccaaacgctggatccgaccgagcctgggtgtggaacacgcacgccgatttcgctgatgagtgtcctaagcctgagctgctagccattaggtttcttaatgcagagaacgcccagaagtttaagacaaagtttgaggagtgtcggaaagaaatcgaggagagagaaaagaagggggacgtcgttccatgggttgggggtctcttatgccggctgactctgcacctcactatccttcccggtggttgttttttctgcctgcccgacaagcactctagggtgttgtggcctccccatgtctcaagagttatgcagttgcccggagacacaggcgcatcatggggagcccttagtacctgccaatgctgttggccgcagagcaattgggcgggaatcggtgttagagctctgcccggagcgcatcagaaagtcctctacgatgggcctcggtttgtgtctcaacgggcttggagtccactgccatag

SEQ ID NO: 30202 - DNA, 378 bp, synthetic construct
  source 1..378: mol_type = other DNA; note = Synthetic coding sequence
atgagctctagcggctacccaccaaaccaaggtgccttctccacggagcagtctagatatccccctcactccgtgcagtacacgttccccaacacaaggcatcagcaagagtttgccgtgccagactaccgcagtagccacctcgaagttagccaggctagtcagctgcttcagcagcagcagcagcagcaactgcgtcggagaccctcattacttagcgaatttcatccaggctctgatcggcctcaggagcgcaggactagttatgaacctttccacccaggaccttccccagttgaccacgatagtttggagagtaagcggccaaggctcgagcaggtgtccgatagtcatttccagcgggtgagtgcagcctag

SEQ ID NO: 30203 - DNA, 318 bp, synthetic construct
  source 1..318: mol_type = other DNA; note = Synthetic coding sequence
atgctgcgatgcggtcagatgatcttcgctcaggccctggtttgcagacatctggggagggactggcgttggacacaaaggaagaggcagcctgatagctatttcagtgtcctgaacgcattcattgataggaaggatagttactattctattcaccagatcgctcagatgggtgttggagaaggcaaaagtattggccagtggtacgggccaaacactgtggctcaggtgctgaagaagctcgctgtgtttgatacatggtcctctttagctgtgcatattgcgatggataacaccgtggtcatggaagaaatatag

SEQ ID NO: 30204 - DNA, 1305 bp, synthetic construct
  source 1..1305: mol_type = other DNA; note = Synthetic coding sequence
atggacatcgacaaggacctagaggccccactgtacctgactcccgagggatggtctctcttcttacagcggtactatcaggtggtacacgagggggctgaacttaggcatttggacacacaggtacagagatgtgaagacatcctgcagcaactccaggctgtggtgccccaaatcgacatggagggtgaccgcaacatatggatcgtgaaacccggagcaaaatcccgaggaaggggcatcatgtgtatggatcatcttgaggaaatgctaaagctggtgaacgggaatcccgtggtcatgaaggatggtaaatgggtggttcagaaatatattgagcggcctctgcttatcttcggcaccaagttcgatttaagacagtggttcctggtcacagactggaacccattaaccgtctggttctacagggacagctatattcggttctctacccaacccttttcccttaagaacttggacaatagtgtccatctctgtaacaattcgatccagaagcacctcgaaaacagttgtcaccgccatccccttcttcccccagataatatgtggagcagtcagcgctttcaggcacacctgcaggaaatgggcgctcctaatgcctggtccacaatcatcgtgcccggaatgaaggacgccgtcatccatgcgctgcagacatctcaagacaccgttcagtgtcggaaagcttccttcgagctctatggggctgactttgtattcggagaagactttcagccgtggctcattgagataaacgcatcgcctacaatggctccaagcacagcagtgacagctaggctttgtgccggagtgcaggccgacacccttagggtggtgatcgaccgaatgctggacagaaactgtgacactggagcattcgaattgatttataagcaaccggcagtggaagtgcctcagtatgtgggcattcggctgctggtagagggctttaccataaagaaacccatggctatgtgccataggagaatgggtgtgaggcctgctgtgccactgttgactcagcggggtagcggtgaggctagacaccacttcccctctctacacacaaaggcacaactgcctagcccacatgtgttgcggcatcaaggacaggttctgaggcgacagcactcaaaattggtcggcactaaggctctgtccacaacaggcaaggcgctgcgcactctccccactgctaaagtgttcattagcttacctcccaatctggacttcaaggtagcaccgtcaatccttaagcccagaaaggttggtcttgatttatag

SEQ ID NO: 30205 - DNA, 576 bp, synthetic construct
  source 1..576: mol_type = other DNA; note = Synthetic coding sequence
atggcaatcgggaaaaggcttgctacactacctacaaaggaacagaaaacccaacggctgataagcgaattaagcctgttaaatcacaagcttcctgcacgagtttggttacccaccgcaggtttcgaccatcatgtcgtgagagtccctcacacccaagccgtcgtgctgaactccaaagacaaagccccttatctcatttacgttgaagtgttggaatgtgaaaatttcgatactacttccgtcccagctcgcatcccagagaaccggatcagatccacgcgttctgtggagaatttgccagagtgcggcatcacacatgaacagagagccggatcttttagtaccgtcccaaactatgataacgacgatgaagcctggtccgtggacgacatcggggagttgcaggtggagcttccagaggtccacaccaattcttgtgataacatatcccagttttctgtggattccatcacaagccaggaaagtaaagaacccgtctttatcgccgcaggcgatattcgcaggagactgtccgagcagttggctcatacacccaccgcattcaagcgctag

SEQ ID NO: 30206 - DNA, 903 bp, synthetic construct
  source 1..903: mol_type = other DNA; note = Synthetic coding sequence
atggccaagtgggggcaggggaacccccactggatcgtcgaagagcgagaggacgggactaacgtgaacaattggagatggcggactgaacgagacgccacctcactgagcaagggtaagttccaggagctgttggtcggaatagtggtggagaacgatgccggtaggggggaaatcaacgagctcaagcaggtggaaggtgaagcaagctgttcttcccgcaagggaaagctgatctttttctatgagtggaacatcaagctgggctggaagggaatagtaaaagagagtggtgtgaagcacaaggggctgattgagatcccaaatttaagcgaagagaacgaagtggatgataccgaagttagcctgagtaagaagaaaggcgacggagtgattctgaaagatttaatgaagaccgccggaacagctaaagtgcgggaggctttaggtgactacctcaaggccctcaaaactgagtttaccactggcatgatcctgcctactaaggccatggcaacacaggagcttaccgtgaagaggaagctatccggaaacacactgcaggtgcaggcaagcagccccgtggcactcggagtgaggattcctaccgtagctctacacatgatggaactcttcgacaccacggtggaacagctctacagtattttcactgtcaaggaattgactaataagaagataattatgaaatggaggtgtgggaactggcccgaggagcactatgcaatggttgctctgaacttcgtgcctacacttggtcaaaccgagcttcagttgaaggagttcctctctatatgtaaagaagaaaatatgaaattctgctggcagaagcagcacttcgaagaaatcaaagggagtttgcagctcaccccgttgaacggctag

SEQ ID NO: 30207 - DNA, 1137 bp, synthetic construct
  source 1..1137: mol_type = other DNA; note = Synthetic coding sequence
atgaaggacgtgcccggttttctgcaacagagccagaatagtggccctggtcaaccagctgtctggcacagactggaggaactgtataccaaaaatttcatgaaaacgctcagcgtgaatctaaatactggaaaatctctcagctccgtcttccactttgagaacgagtgcatcgacgccagacgatgcagtaaggcaggcggattctacttcagagtcaatccactgtctttggtcgaaatcatcctgcacgtggtgcggcagatgaccgacccgaatgtcgccctcacgtttctggaaaagacccgggaaaaagtaaaaagctcggacgaagcggtcattctctgcaaaaccgccatcggtgccctgaaactaaacatcggagacctgcaagtaaccaaggagaccattgaggatgtggaggaaatgctgaataatcttcccggtgtgacttctgtgcactctaggttttacgacttgtcatctaaatactatcagactatcggaaatcatgcttcgtattataaagatgccctcaggttcttaggatgtgtggacataaaggatctcccagtgtctgaacaacaagagcgagccttcacattgggcctagctgggctgctgggagaaggcgtgttcaattttggagagttactgatgcaccctgttctggagagcctgcggaacactgatcgacagtggcttatcgatacactgtacgctttcaacagcggcaatgttgagaggtttcagaccctgaaaaccgcatggggccagcagcctgatctagctgctaatgaagcacaacttctgagaaaaatccagctgctgtgcttgatggagatgacctttacacggccagctaaccaccgtcagttaacatttgaggaaatcgctaagtcagctaaaatcacagttaatgaggtggagctgctcgttatgaaagccctgtctgtcggactggttaagggctccatcgacgaggttgacaaaagggtgcatatgacctgggttcaacccagggttctggatcttcagcaaataaaagggatgaaagatcgtctggaattctggtgcacagatgtgaagagtatggaaatgctagtggagcaccaggcacacgatatcctgacatag

SEQ ID NO: 30208 - DNA, 603 bp, synthetic construct
  source 1..603: mol_type = other DNA; note = Synthetic coding sequence
atgctcttggaacagaacctaatcactgttgatatgcagaagcattcactcaccttctggtggcttgtggaatgttggccacaggtgttcaacaaactcatacggaggtacaagtacctggagaaaggcttcgaggatgaggtgaagaagctcttattgttcctgaaggggttctccgaatctgaacgcaataaactggcaatgttgacaggcgttctcctcgcgaacggcaccttaaatgcatctatactcaacagcctgtataacgaaaatctcgtgaaagagggggtgagcgccgcatttgcagtcaaactgtttaagtcatggataaatgaaaaagacattaacgcagtagctgcatccctgcggaaggtgtcaatggataacaggttaatggagctgttccctgccaataagcagtccgtagagcacttcaccaagtatttcactgaagccggactgaaggagctgagcgagtatgtcaggaatcagcagacaatcggagcacgcaaggaattacagaaggaactccaggagcagatgagccggggagacccttttaaggacatcatcctctatgtgaaggaagagatgaagaagtag

SEQ ID NO: 30209 - DNA, 1446 bp, synthetic construct
  source 1..1446: mol_type = other DNA; note = Synthetic coding sequence
atggcttccgccgcatccgtgacatctcttgctgatgaggtgaattgtccaatctgccagggcaccctgcgggagcctgtgactatcgactgcgggcataacttttgtcgggcttgcttaacccgttactgcgagattccaggccctgatttggaagagtctcccacctgcccactgtgcaaagagcccttcaggcctggatctttccggcctaattggcagctcgccaacgtggttgagaatatcgagagattgcagctagtctctacgctggggttgggagaggaggacgtttgtcaggaacacggcgaaaaaatttactttttctgtgaggatgatgaaatgcaattgtgcgtggtttgtagagaagcgggagaacatgctacccacactatgcgcttcctggaagatgctgcggctccataccgcgagcaaattcacaagtgcctgaaatgcctaagaaaagagcgcgaagaaatacaggagatacagagtcgagagaataagcgaatgcaggtgctgctcactcaggtgagtactaagcggcaacaagtgatttcagagttcgctcacctccgaaagttccttgaggagcagcagagtatactcctcgcccagctcgagagccaggatggcgacatccttagacagagggatgagtttgaccttctggttgcaggtgagatatgcaggtttagtgccttgattgaggagttagaggagaaaaacgaaaggccagcccgtgagttgctgaccgatattaggtcaaccttaataagatgtgaaactcgaaagtgcagaaaaccggtggccgtgtcccccgaactgggccagaggattcgagatttcccacagcaggcactacctctgcagcgggagatgaagatgtttctggaaaagctgtgttttgaacttgattatgagccagctcacatttccttggatccacagacttcacaccctaagctcctgctatccgaagaccaccagcgggctcagttcagctacaagtggcaaaatagtcccgacaacccacagcgtttcgacagagccacatgtgtccttgcccacacaggaattacaggcggaaggcacacctgggtcgtgtccattgatctggctcacggaggttcatgcacagtcggtgttgtcagcgaggatgtgcagcgaaaaggggagttgaggttacgcccagaggagggggtttgggcagtgaggcttgcctggggatttgtgtctgcactggggagcttcccgactaggctgactctcaaagaacagccgcgtcaggtcagggttagtttagattacgaggtcggttgggtgacatttacaaatgccgtcacacgcgagccaatctatacctttacagccagcttcacacgaaaggtgattcctttcttcgggctatggggtcgtggttcaagcttttcgcttagttcatag

SEQ ID NO: 30210 - DNA, 261 bp, synthetic construct
  source 1..261: mol_type = other DNA; note = Synthetic coding sequence
atgggcaaaatggtgtccgtcatcaatactgttgatactagccatgaagacatgatccatgatgcacagatggattattatggcactaggctagcaacatgtagttcagatagatctgtgaagattttcgatgtacgtaatggcggtcagattctgatcgccgatctaagaggccatgagggaccagtgtggcaggtcgcatgggcccacccgatgtacgggaacatactggccagttgctcatacgacagaaaagtttag

SEQ ID NO: 30211 - DNA, 660 bp, synthetic construct
  source 1..660: mol_type = other DNA; note = Synthetic coding sequence
atggagccctcagcccaacagcttcagctggccgcttctcttcctgctaatctgagcaatttctgtcaggggtctgaaatgccaacaacttccaggcccgctctggacgtgaaggggggaacgagccctgccaaagaagatgctaaccaggagatgtcctctgtggcctactcaaatttagccgtgaaggatcggaaggccgtcgcaatcctccattatccaggtgtggcctctaatggaacgaaagcaagtggtgctccgacgtcatccagtgggtccccaatcggatcccccacaactacgcccccaactaagcctccaagtttcaatctgcacccggcaccccacctcctcgcatccatgcaccttcaaaaactcaatagccagtaccaaggtatggcagccgctacacctgggcaacctggagaggctgggcctcttcagaactgggactttggcgcacaggcgggaggtgccgagagcctttcacccagtgctggggcacagagtcccgcaatcattgatagtgatccagtagacgaggaggtgttgatgtcactcgtggtagaactgggattggatagggccaacgaactgccagaactgtggctcgggcagaatgaatttgattttacagccgattttccatcatcatgctag

SEQ ID NO: 30212 - DNA, 396 bp, synthetic construct
  source 1..396: mol_type = other DNA; note = Synthetic coding sequence
atgctgtgttggggctactggagcctgggccagcctgggatctccaccaatctgcagggaattgtggcggagcctcaggtgtgcggctttatatcagatcggtctgtgaaggaggtcgcctgcgggggtaaccacagtgtcttcttactggaagacggcgaagtctacacctgcggactcaatacaaagggtcagctgggtcatgagcgcgaggggaataaacctgagcaaatcggggcactggctgatcagcacatcatccacgtagcctgtggagaaagccacagcctcgctctcagcgatcgaggtcaactgttttcttggggcgcagggtctgatggtcaactgggcctcatgacgaccgaggacagcgtggccgtgccccgattgatctag

SEQ ID NO: 30213 - DNA, 3099 bp, synthetic construct
  source 1..3099: mol_type = other DNA; note = Synthetic coding sequence
atggagggagcgctcacagctagagataaggtcggggtgcaggattttgttctgctggacgcctatacatctgagtctgccttcgtcgacaacctgcggaagaggttcagcgaaaacctgatttatacctacataggaaccctgctggtcagcgtgaacccctaccaggagctgggaatttatactgtgtcacaaatggaactgtatcaaggtgtgaacttttttgaactgccccctcacgtgtatgctatcgccgacaatgcgtatcgaatgatgtgcgctgagctgaacaaccacttcattctgatctctggagaatccggcgctggaaagactgaggcgtccaagaaaattctggagtactttgcagtcacttgtccaatgacacagtctcttcagatcgcaagggatagactcttgttctcaaatccagtgctggaggctttcggcaacgccagaacccttagaaatgataattccagtaggtttgggaagtatatggatatccagttcgatttccagggtatcccagtggggggtcacattatttcttacttgatcgagaaaagtcgcgtggtctaccagaatgagggcgaacggaacttccatatcttctatcagctgctggccggaggtgaagaagagcgtctgagttacctggggctggaacgagatccgcagctgtataagtatttgagtcagggccactgtgccaaggaaagtagcatctcagataagaatgactggaaaaccgtcagtaacgcgttttctgtaatcgattttactgaagcggatctggaaaatctgtttggcatcatcgcctctgtattgcatctgggaaatatcggcttcgaagaagatgaccagggatgcgccaccattccagatacgcacgaaatcaagtggattgcgaagttactgggggtccatccatcagtgctcctggaggccctaacccacaggaaaatcgaagccaaaactgaggaggttatctgcccactgacattggagctcagcgtctacgcccgtgatgctatggccaaggccgtttatggaagaaccttcacctggcttgtcaacaagatcaactcctcacttgtgaataaggtcgggcagcggatcctcgacccattactgctgctcacatggaagactgtgatagggctgttggatatctatgggtttgaagtatttgataaaaatggatttgaacagttttgtatcaattactgtaatgaaaagcttcaacagctccttatcgaacggaccctcaaggctgaacaggccgaatacgagatggagggaattgaatgggagccaattaagtactttaataataaaataatatgtgacctggtggaagaacgccataagggcatcattagtatcctagacgaagaatgtataaggcctggcccagccactgacctttcctttctggaaaaactcgaggaaaaggtcggcaagcacgctcactttgaaactcgaaaactcgcaggtcctaaggggagaaagcgaatcggctggatggaatttagattgctgcactacgccggagaggtgacttactgtacaaagggcttcctggagaaaaacaacgacctgctgtacagacacctcaaggaagttctgtgtaagagtaaaaatattatcctcagggagtgttttctactggccgaactggagaatagacggaggccgccaaccgttggaacccagtttaaaaatagcctgtcttccttactcgaaacactgatttccaaagagccctcttacataagatgtatcaaacctaacgacagaaaagaaccttccaagtttgatgattttctgattaggcaccaaatcaagtatttgggcttaatggagcacttgagggtaaggcgtgctggctttgcttacaggcgcaagtacgagcattttctgcagcggtataaatcactatgccccgacacatggcctcactggcatggccctccggctgaaggtgtcgaacggctgataaagtatattggctataaacccgaagaatacaagctgggaaaaacaaaaattttcattcgcttccctagaaccctgtttgccactgaggacgcctttgagtttagcaagcaccaactggttgcacgtatccaggccacctacaagcggtgcctgggcagaagagaatatgtgaagaagcgccaggccgctatcaagctggaggcccactggcgcggagctctggcaagaaaagctattcaacgcagaaagtgggcagtgagaatcattcgaaagtttataaagggttttatttccaggaacaaaccactatgtcctgacaatgaggaatttattgtgtttgtgcggaagaattacatactaaacctcaggtaccatttgccaaaaaccgtcctggacaagtcctggctgcgccctcccggtatcctcgagaacgcgagcgatctgttacgcaaaatgtgtgtgcgtaacctagtccaaaagtactgcaggggaatcaccgctgaaaggaaggccatgatgcagcagaaagtggtcacttcggagatcttcagggggaggaaagacggatacaccgagagcttgaatcaaccatttgtgaactcccggatcgatgagggggacattaatccaaaagtcctgcagcttatatcacatgagaagatccagtacggggtgccagttatcaaatacgatcggaagggatttaaggcccgacaacgacagcttatcttgacccagaaggcggcttacgtggtcgagttagccaaaattaaacagaagattgagtactccgctttgaaaggggttagcacaagcaatttatcagatggcatcttggtgatccatgtgagcccggaagactccaaacagaagggcgacgctgttctgcagtgcggacatgtatttgaggctgtgaccaaactggttatgttggtaaaaaaagagaacatcgttaacgttgtgcaggggtcccttcagttcttcatcagccctggtaaagaagggacaatagtgtttgacaccggtttggaggagcaggtgtataagaataagaacggtcaattaactgtggtgtcagttaggagaaaatcttag

SEQ ID NO: 30214 - DNA, 1176 bp, synthetic construct
  source 1..1176: mol_type = other DNA; note = Synthetic coding sequence
atgtgttcccaactgtggttcttaaccgataggcgtatccgcgaagactacccacaggtgcagattctccgagccctgaggcagcggtgctccgagcaggacgtgcggttcagggccgtgttaatggatcagatcgctgtaactatcgtgggtggccacctggggctgcaactgaaccagaaagctctcacaacattccccgatgtggtgctcgtgcgggtgcctacgccatccgtccagagcgacagtgatataactgtgcttcgacacctggagaaactaggctgcagacttgtgaatcggccacagagcatccttaactgcatcaacaaattctggacattccaagaactggccggtcatggggtgcccatgcccgatacctttagctacggcggtcatgaagacttttcaaagatgattgacgaagctgagccgctaggctatcctgtggtcgtgaaatcaacaaggggccatcgtggaaaggccgttttcctggctcgggataaacatcatctgtctgatatctgtcacctcatccggcatgacgtgccatatctatttcaaaagtatgttaaagaatctcacgggaaagacatacgggtggtagtggtggggggtcaagtgattggaagcatgctgagatgttcaacagacgggcgaatgcagtctaactgctccctagggggagttggagtgaagtgtccactgacggaacagggaaaacaattggcgatccaagtgtcaaatattctcggcatggatttttgtggcattgacctactcatcatggacgatggaagttttgtcgtgtgcgaagctaacgctaatgtcggatttctggccttcgatcaggcctgcaacctcgacgtggggggtatcatcgcggattatactatgtctttgcttccgaaccgtcagaccggcaagatggccgtcctgcccggactttcatctccccgtgaaaaaaacgaacccgatggctgtgccagcgcacaaggagtggccgagagcgtttacaccataaattcaggctcaacatcgtccgagtctgaacccgaactgggggagattcgagattcgtcggccagtaccatgggcgcacccccttctatgcttccagagcccggatataatattaataatagaattgctagcgaactgaaactgaagtag

SEQ ID NO: 30215 - DNA, 1065 bp, synthetic construct
  source 1..1065: mol_type = other DNA; note = Synthetic coding sequence
atggacatggaccacattatgacatgggccactgacgttgctaaagggatgcattatctccacatggaagcccctgtgaaggtaattcacagggacttaaaaagtcgcaacgttgtgatcgccgcagacggcgtcctgaaaatctgcgacttcggagcttcaaggtttcacaatcacacaactcacatgagcttggttggaactttcccttggatggcccctgaggtgatccagtccttgcctgtctctgagacctgtgatacgtacagctacggtgttgtgttatgggagatgcttacccgagaggttccattcaagggcctggagggattgcaggtggcttggcttgtcgtcgagaaaaatgaacgattaacaatcccaagctcctgcccgagaagttttgcagagcttttgcatcaatgctgggaagcagacgccaagaagaggccaagcttcaagcagattatcagcatcctggagagcatgtcaaacgacactagcctgcccgacaagtgtaacagtttcttgcacaataaggccgagtggcgctgcgaaattgaggcaacacttgagcggcttaaaaaattagaacgcgatctgagctttaaagagcaggagcttaaggagagggaaaggcgcctgaagatgtgggagcagaagctaacagaacagtcaaatacgcctcttctcctgccattggctgccaggatgagcgaagagagttattttgagtcaaaaacagaagagtctaactccgccgagatgtcctgccaaataaccgccacatccaatggcgaaggccacggcatgaatccgagcctgcaggccatgatgctgatgggcttcggcgatattttctccatgaacaaagcgggagcagttatgcacagcggcatgcagattaacatgcaggctaagcagaactccagcaaaactaccagcaaacgtagggggaagaaagtgaacatggccctggggtttagcgatttcgatcttagcgagggagacgacgatgatgatgacgatggggaggaggaggacaacgacatggacaactctgagtag

SEQ ID NO: 30216 - DNA, 1707 bp, synthetic construct
  source 1..1707: mol_type = other DNA; note = Synthetic coding sequence
atgttagagagaccccctgcgttggcgatgccaatgccaaccgaaggcactccacctccgctgtctggtacacccatacctgtgccggcatattttcgccacgccgaacctggcttcagcttgaagcgtcccagaggcctgtcccgctccctcccaccacctccaccagcgaaggggtccattcctatttctcgcttgttccctccacggacccccggatggcaccagctccagccccgacgggtcagtttccgaggagaggcttccgagacactgcaaagcccaggttacgacccaagccgccctgaaagcttttttcagcagagctttcagcgcctttctcggcttgggcacggaagttatggagaagtgtttaaagtccgctcaaaagaagatgggcgtctgtatgccgtgaagcgatctatgtctccatttcggggtcccaaggacagggccaggaagctggcagaagtgggcagtcacgagaaggtgggccagcacccatgctgcgtcaggctcgagcaggcctgggaagaaggtggcatcctttatttgcagaccgaactgtgtggacctagtctgcagcagcattgtgaggcttggggtgcctcactgccagaggcccaagtttgggggtatctgagggacaccctgttggccctggcccacctgcacagtcagggcctggtgcacctggacgttaagccagctaacatctttctcgggcctaggggccgatgtaaactgggagacttcgggttgctggttgaactgggtaccgccggtgcaggtgaagtgcaggagggggacccaagatacatggccccagagctcttgcaagggtcctatggtactgccgctgacgttttttcactcggacttaccatcctggaggtggcctgcaatatggagctccctcatgggggagaaggctggcaacaactgcggcagggctatcttccaccggaattcacagctgggctgagttcagagctgcgtagcgtgctggtcatgatgttggagccagaccccaagctgcgcgctacagccgaggccctgctggccctccctgtgctgaggcagcccagagcatggggggtcctgtggtgcatggcagctgaggctcttagccgcggatgggctctgtggcaggcactgttggctttgttgtgttggctgtggcacgggctggcgcaccctgcttcttggttacagcctctcggccctccagcgacacctcccggatccccaccttgttctctattgctggatagttccctgtcatccaattgggatgatgatagtctgggaccttctctcagtcccgaagcagttctggcccgaaccgtcgggagtacatctaccccacgcagccgttgtaccccaagagttctgactcctttgcggctcagccccgcagccgagccgtcggccccaggtctgggtcctgctgctgaggccccttgctgcgttgagcagcgaggatttctttccaggcatatcccgcgatctttcagtgcttttcaagccgcacctcctaagtctgcatgtaacgcccttcatttacacggacatacgcagccctctgctttcgtctggagcctgacatgctcttctcaccatggacgaacgttcgaggccaggacgaaagtggacccccttttcaaaatttgcggaggcttcttgacggtgtttgcagatttatag

SEQ ID NO: 30217 - DNA, 642 bp, synthetic construct
  source 1..642: mol_type = other DNA; note = Synthetic coding sequence
atggctgagaccgaggaaaggtctctggacaacttctttgcaaagcgggacaaaaagaagaagaaggagcggtcgaacagagccgcttcagctgccggagccgctgggtccgctggtggttccagtggcgctgcgggtgccgcagggggaggagcaggcgctgggacacggcctggcgatgggggtaccgcaagtgccggagctgcgggtccaggggctgcaacgaaggctgttactaaggacgaggatgagtggaaggaacttgagcaaaaggaggtcgattactctggcctgagagtgcaggccatgcaaatcagtagcgagaaagaagaggacgacaatgagaaacgccaggaccctggcgataattgggaagaaggcggaggtggaggaggaggaatggaaaagagtagtggcccttggaataaaactgccccagttcaagcccctccagctcctgtaattgtaactgagacccccgagcctgccatgactagtggcgtgtacaggccacccggtgcacgtcttacgaccactcggaagacaccacagggtcccccagaaatctacagcgatacccaattcccctccctgcagagcacggcgaaacacgtggaatcccggaacagatacttaaagtag

SEQ ID NO: 30218 - DNA, 4140 bp, synthetic construct
  source 1..4140: mol_type = other DNA; note = Synthetic coding sequence
atggcctcaagcccaactaaaggtctaacaatgagcgtgcccgtggcacctaagaaaagctgttacactcagctccgcgataacaggaatgccgcaaggaacaacaacgagtctatcctcagtctcggcgacaccaatgcaaaccagataatgctcgaggtgtcctcttctcatgatgagtctaaaacctgtgatttgggagatgagattggcaatacaaacagctccgagcctgaaaaccggacacattttcacaaggagttccaccagctgcaaggcttcggcaaaggttctcaggccggatcagcttctttaaaagattttagattaagctctaccattcagcgcgaactgaatgaggagcatacggttgaaagagggaccgacagcttgcaaaccaccagatccattcaaggtccgagcctgagctcctggcgcaacgtgatgtccgaagcctctttggacgtgttggccaagcgtgacgccgaaattccaaggcacgtgcctaaagataagttggcaaaaacactggacaacgaggaactgagaaggcactccctggagcgggcatcctcctccgtggctgcagtcgggtctctcacaccgcaacatccccaacccctgtcattggactcgcgggaagcccgagggcagattccgggtgggggtgaaggccctcagaaaaccctccccgaccatgccgtcccagccgcattccctgccaccgattcaaccagcgagggaaaaagtgtgcggcatcctaaaccatcaaccagtgaatcaaagcagagcaccccgtcagaaacccaaaccgtgggggctcacgtgttgcaggtttgctctgagcacacatctcactcagcccacccagagcccgcattgaacctcacactcgcttctaaagagatacctagcaaactggaagcccagctcgggcagggcaaaggggaggccaaactggacttaaaatatgtgccaccaaggcgtgtggaacaagagggcaaagccgctcaggagggatacctgggctgtcataaagaagagaatttgtccgcactggaaggtcgagacccctgtggtgaggcccacccggaggcaacagatgccctcggacaccttctcaattcggatttgcatcacctaggagtgggaaggggaaattgtgaagaaaagcgcggagtaaaccccggtgaacaagatagcctccacacaactcctaagcaagggtctgctagcttgggcggagcggataatcagccaacgggaaagataagcccctgcgccggtgaaaagttgggcgaacgaacttctagttccttctcccccggtgactctcatgttgctttcatacctaataacttaactgattcgaagccccttgacgtcatcgaggaggagaggcggttagggtccgggaataaggatagcgtaatggtgcttgtgtttaatccttctgtgggcgagaacaagaccgaggtccctgaaccgctggacccccagagtggacgctctgaagccagagaaagcaaggaggtcactaccagtgtggcagagaatcggaatctcctcgaaaatgctgacaaaattgaatcaacaagtgcacgcgcagatagcgttttaaatatcccggcacccctccacccggagaccaccgtgaatatgacataccaaccgactaccccgagtagctcattccaagacgtgtctgtatttgggatggacgccggttccccccttgtggttccccctccaaccgacagtgctcgtctgcttaatacatcacctaaggtgcccgacaagaacacctgtccgtcaggaatccccaagccagtcttcacacattcaaaggacactccatccagtcaggagggaatggagaattaccaagtagaaaaaacagaggaacgtactgaaacaaagccgatcattatgccaaaacccaaacatgtcaggcctaagattatcacctacattaggagaaacccacaggcactggggcaggttgacgcttctctggtgccagtgggcctcccttatgcccctccaacctgcacaatgccccttccacacgaggagaaagccgctggcggtgatctgaagcccagtgccaatctgtatgagaaattcaaacccgaccttcagaagcctcgcgtgttttctagtgggctcatggtgagtggcatcaagcctcctggtcaccccttctctcaaatgtctgagaaattcctgcaggaagtcactgatcatcccggaaaagaggagttttgctctcccccatacgcccactacgaggttccccctacattctataggtccgctatgctgttgaagcctcaactaggtcttggagccatgagccggcttccaagtgccaagagccggatcctgattgcttcacagcgatccagcgctagcgctatccacccccctggcccaataactaccgccactagcctgtattctagcgatccttctgcagatctgaaaaaagcttccagctccaacgctgccaaatcaaatttaccgaaaagtggattgcgccctcctggctacagtcggctgcccgcagctaagctggccgctttcggcttcgtcagatccagtagcgtaagttccgtttcctctacacagagcggcgatagcgcccagcctgaacaggggagacctgccacacgtagtacattcggcaacgaagaacagcctgtcctcaaagcctccctcccctctaaggatacccccaagggcgctggtagagtcgcaccgccagcatccagttcggttacagcaccgagacgttcgttgctcccagccccaaaatcaacatccacaccagcagggaccaaaaaggacgctcagaaggatcaggatacaaataagcccgctgtgtcctccccaaagagggtcgccgcatcgacaaccaagttacattctccaggctacccaaaacaaagaaccgccgctgccagaaatggcttccccccaaagcccgacccccaggcccgtgaagctgaacgtcagttggttctgcgactaaaagaacgatgtgagcagcagactcggcagcttggggtcgctcaaggcgaactaaagcgtgctatttgcggcttcgatgcccttgccgtcgccacccaacacttcttcaggaagaatgaaagcgccctggtaaaagagaaagaactctctatcgagctggcgaacatacgtgacgaggtggctttccataccgcaaagtgcgaaaagcttcagaaagagaaagaagaacttgagagacggtttgaagacgaagtgaagcgccttggatggcaacagcaagctgagttacaagagctggaggagaggcttcagctgcagttcgaggccgagatggctaggctgcaggaggaacatggggatcaattactatcaatccgatgtcagcaccaggagcaagtcgaggacctcacagcctcacacgatgcagcgctgctagaaatggaaaacaaccacacagtagcaatcacaatactgcaggatgaccacgatcataaagtgcaagaactcatgtccacccatgaattggagaagaaggagctcgaggagaactttgaaaaattaaggctgagtttgcaagatcaggtcgataccctgacctttcaatcccagagtctgcgggatagagcacggcgattcgaagaagccctgaggaaaaacacggaggaacagttagagattgccctggcgccataccaacacctggaagaggacatgaagtcgttaaagcaagtgttagagatgaagaatcagcagatacacgaacaggaaaaaaaaatactggaattggagaaattggccgagaagaacatcatccttgaggagaagattcaggtgcttcagcagcagaatgaggatttgaaggcgagaatcgatcaaaataccgtggtgacgcgtcagcttagcgaggagaacgccaaccttcaggagtacgtcgaaaaggagacacaggagaaaaagcggttgagtcgcactaacgaagaactgttatggaagctccagacaggggaccctacctcgccaatcaagctatcacccacctcccccgtttacagaggaagctcctccgggccttccagccccgctagagtgtccactactcccaggtag

SEQ ID NO: 30219 - DNA, 1041 bp, synthetic construct
  source 1..1041: mol_type = other DNA; note = Synthetic coding sequence
atgcagcacctgaaaagtaagaagcgcgaggaacgctggatgcgggcatcgaagagacaaagcgagaaggaaatggaggagctgcaccacaatatcgatgacttgctccaggaaaagaagagcctggaatgtgaggtggaggagctccaccgcaccgtccagaagcggcagcagcaaaaagatttcattgatgggaatgtggaatccctgatgacagagctcgaaattgagaagagccttaagcaccacgaagatattgtggacgagatagagtgtatcgaaaagaccctcttaaagaggcgaagcgagctccgggaagctgacagactgctggctgaggccgaaagcgagctgtcctgcaccaaagagaagacaaaaaatgctgtcgagaagttcaccgacgccaaaaggtcactgctccagaccgaatcagacgccgaggaacttgaacggagagcacaggagacggcagtaaaccttgtgaaagccgatcagcagttgagatcattacaggcggacgccaaggatctggagcagcacaagattaaacaggaggagattctcaaagagataaataagattgtggccgctaaggatagcgatttccagtgtctgagcaagaagaaggaaaaattaacggaggaattgcagaagttgcaaaaggatatcgagatggcagagagaaacgaagaccaccatctacaagtgcttaaagagtctgaagtgctattgcaagccaagagagctgaattggagaaactgaagagtcaagtgacttcacagcaacaggaaatggcggttcttgatagacagttgggacataagaaagaagaacttcacctgttgcagggaagtatggtacaggccaaggcagatctgcaggaggccttgaggttaggcgagactgaggtcactgaaaagtgtaatcatatacgggaggtgaagagtcttctggaggagctgtcttttcaaaagggcgaacttaacgtgcaaatcagcgagagaaaaacccaactcaccctgattaagcaagagatatag

SEQ ID NO: 30220 - DNA, 369 bp, synthetic construct
  source 1..369: mol_type = other DNA; note = Synthetic coding sequence
atggcgacaagcgcccctctaaggtccctagaagaggaggtcacatgctcaatttgcctggactatctccgggaccctgtgaccattgactgtggccatgtgttttgtcggtcgtgtactacagatgtacggccaatttctgggtctagaccggtttgccccttatgtaaaaagccattcaaaaaagagaatattagacctgtgtggcagctagcatccctggtggagaatattgaacgtctgaaggtagacaaagggagacaacctggggaggtgacccgtgaacagcaagatgcaaagctgtgtgagcggcatagggagaaactgcactattattgcgaagatgacggaaagttgctctgtgtctag

SEQ ID NO: 30221 - DNA, 291 bp, synthetic construct
  source 1..291: mol_type = other DNA; note = Synthetic coding sequence
atgagcatcagttccgacgaggtgaattttctggtctacagatatctacaggaaagtggtttttcccactcagcgttcacctttggaattgagtcacatatatctcaaagtaacatcaacggtgccctggtgcccccagcggcactcatctccatcatccagaagggactgcagtatgtggaagcggaggtgtccattaacgaagatggcaccctgttcgatggcagacctatcgagagcctaagtcttatcgacgctgtgatgcccgacgttgtgcagacacgccagtag

SEQ ID NO: 30222 - DNA, 2913 bp, synthetic construct
  source 1..2913: mol_type = other DNA; note = Synthetic coding sequence
atgctccagcaggtgaatgggcataacccagggagtgatggccaggcacgcgaatatctgcgagaagatctgcaggagtttctcggtggcgaggttttgctgtacaagctggatgacttaacaagggttaacccggtgaccctcgaaactgtcctgagatgccttcaggctaggtatatggctgatactttttacactaacgccggttgcaccttagtagccctgaatccgtttaagcccgttccccaactgtactctcctgaacttatgcgagagtaccatgccgcaccccagccacagaaactgaagccgcacgtttttaccgtcggtgaacagacttacaggaatgtgaaatcactgatcgagcctgtcaaccagtccatcgtcgtttctggcgaatccggcgctggcaaaacctggacatctcggtgcttaatgaaattttacgctgttgttgctacttcccccgctagctgggaaagccacaaaatagctgagcggatagagcagcggatactcaactcaaacccggtgatggaagcgtttggtaacgcgtgcacactgcgcaataacaattcctccagattcggtaaattcatccagctgcaactgaacagggcgcagcagatgaccggagctgctgttcagacgtatctgcttgagaaaacccgggtggcctgccaggccagctccgaacgtaattttcatattttctatcagatctgtaaaggggcttcagaggatgagaggctccagtggcatcttcctgagggggcagccttctcttggctgcctaatcccgagcgttcactggaagaggactgcttcgaagtcacgcgggaggcgatgctccacctgggtatcgacactccgacccagaataatatcttcaaggtcctggcaggcttgctgcatttaggcaacatccagttcgcggcaagcgaggacgaggctcagccctgccagccaatggatgacgctaagtattccgtaagaaccgcggcaagtcttttagggcttccggaagatgttctccttgaaatggtgcagattcgcactattagggcgggaagacagcaacaggtgtttcgcaaaccatgtgcgagggcggaatgtgacaccaggcgcgactgtctagcaaaacttatctatgctcgtctgttcgattggctggtgtccgtgatcaacagctcaatctgcgccgacacggatagttggactactttcattggtctactggatgtatatggattcgaatctttccccgacaatagtctggagcaattgtgcatcaactatgcgaacgagaaactgcagcagcatttcgtggcccattatctaagagctcagcaggaagagtatgctgttgaagggctggagtggtccttcattaattaccaggacaatcaaccttgcctggatctaattgagggcagtcctatttccatctgttccttgataaatgaagagtgtagattgaatcggccatctagcgctgcccaactgcaaacaagaatcgaaactgcactcgctggaagtccatgtctgggtcacaacaagctctcccgagaaccctcgttcatagtcgtgcattatgcaggcccagtgagatatcatacagcaggattagtggagaaaaataaagaccctattccaccggaacttactagattgctgcagcaaagccaggacccccttttaatggggctcttccctacaaatcccaaagagaagacacaggaagagcccccaggtcagagtcgcgcacctgtgctcacggttgtctctaagttcaaagcttcactggagcagctgctgcaggtgctccatagcacaacacctcactacataagatgcataaaaccaaactctcaaggccaagcccaaacattcttacaggaagaggtgttgagccagctagaagcctgtggtctggttgaaactatccatatctccgccgcaggctttccaatcagggtgtctcataggaacttcgttgagagatacaagttgctgaggagactacacccctgtacttcaagtggccctgattccccataccccgcaaaaggtttgcctgaatggtgtccccacagcgaggaagcgacactggagcccctcatccaggacattctgcacaccttgccggtgcttactcaagcggcagctattactggcgacagcgccgaggccatgcctgctcccatgcactgtgggagaaccaaggtgtttatgacggatagcatgttggagctgctcgaatgtggtcgcgcaagggtactggaacagtgtgctcggtgtattcagggaggttggcggagacatagacaccgcgaacaggaacgacagtggcgcgctgtgatgctcatccaggccgcaattcgttcatggttaacacggaagcacattcagagactgcacgcagctgccaccgtgatcaaacgggcttggcagaagtggaggatccgcatggcatgtctggccgcaaaggagctggatggcgtcgaggagaaacactttagtcaagcgccatgctctctgtcaacgtccccactccagactaggctgctcgaggccataatacgactgtggccactaggtctggtgctggctaatacagccatgggggttggttccttccagcgcaagttagtggtctgggcatgcctccaacttcccagaggctctcccagctcttataccgtgcagacggcccaggaccaggctggcgtgacatctattcgcgcacttccccagggttcaatcaagtttcactgtagaaagtctccgctcaggtatgcagatatttgtcctgagccatccccttacagcatcaccggctttaaccagatacttctagaacgacacaggttaatacacgttactagctctgcctttactggcttgggttag

SEQ ID NO: 30223 - DNA, 3303 bp, synthetic construct
  source 1..3303: mol_type = other DNA; note = Synthetic coding sequence
atgtcatattaccagcgccctttctcgccctctgcctacagcctacccgcatctctcaacagttccatcgttatgcagcatgggacaagcctggactctacggacacatatccacagcacgcccaatctctggacgggactacgtcctcctccatccccctgtacaggtcatccgaagaagagaagagggtgactgttatcaaagctccccactatccgggtatcgggcctgtcgacgaaagtggcatcccaacagcaatccgcacgacagtggacaggcccaaggactggtataagaccatgttcaagcagattcatatggtgcataaaccagacgatgacacggatatgtataacactccctacacatataacgctggtttgtataacccaccttattctgcacagagtcaccccgctgctaagacccaaacgtatcggccactgtcaaagtcacacagcgataacagtcctaatgcatttaaggatgcctcttctcctgttcctccaccgcacgtgccccctccggtgccaccactgaggccccgagaccgaagttcgacagaaaaacacgactgggatccgccagatagaaaggtagacacgcgtaagttcagatccgagcctcgctctatttttgaatacgaacccggaaagagttctatcctgcaacacgaaaggcccgcaagtctgtatcaatctagtatcgaccgctctctggaacggcctatgtccagtgcatccatggccagcgattttaggaagaggagaaagtctgaacccgctgtgggacccccaagagggctcggcgatcagagcgcatcacggacgagcccagggagagttgacctgcctgggtcatccacaacattaaccaaatcattcacctcgagttcaccctcctccccgagcagggccaaaggaggggatgactctaaaatctgcccctccctgtgctcttactctggcctgaacggcaaccctagttcagagttggactattgtagtacgtatcggcagcatctggatgtgcctagagattccccaagggcgataagcttcaaaaacggctggcagatggctcggcagaatgccgaaatatggtcctccacggaggagacagtctctcccaagattaagtcccggagctgtgatgatctcctaaacgatgactgtgacagcttcccggatcctaaggtcaaaagcgagtccatgggtagtctcttgtgtgaagaggattccaaggaatcctgtcccatggcttgggggtccccctatgttccagaagtacgctcaaacggtcggagccgtattcggcataggtcagcaagaaacgccccaggattcttgaagatgtataagaaaatgcaccgaatcaatcgtaaagatcttatgaattcagaagtgatatgtagtgtgaagagtcggatcctccagtacgaaagcgagcaacagcacaaagatctgctaagagcttggagtcaatgtagtactgaagaggtcccgagggatatggtacctacacgcatttctgagttcgagaagttaatccagaagagtaagtccatgcctaacctcggcgatgatatgctctctcccgtgactctagaaccacctcagaacggactctgcccgaaaaggcgattttcgattgaatacctgcttgaagaagaaaatcagtcaggaccacctgccagaggacgcaggggctgccaatccaatgcattagttcctatacacattgaggtcacttccgatgaacaacccagagcacatgtggagtttagtgatagcgatcaggatggggtggtgtccgaccatagcgactatattcacctggagggctcaagcttctgttctgagagtgactttgatcacttctctttcactagtagtgagtcattctacggatctagccatcaccaccatcaccaccaccaccaccatcaccggcacctcatatctagttgtaagggaagatgccctgccagctacacaaggtttactaccatgcttaagcatgaaagggccaggcacgaaaacaccgaagaacctaggcgccaggaaatggatccaggcctcagcaaactggcctttctggtgtcgcccgtgccattccggaggaaaaaaaatagtgctccaaaaaaacagacagaaaaggcaaagtgtaaggcgtcggtgttcgaggccttggactcagcgctaaaggatatttgtgaccagatcaaggctgagaagaagaggggctctctgccagataatagtatcttgcaccgacttattagcgagttgctgcccgatgtccccgagcgtaattcaagcctgagggcactcaggcgaagtccactgcaccagccgctccaccccttgccgcctgacggtgctatccactgccctccttaccaaaacgattgtggccgaatgcctcgctcagcttcctttcaggacgtggacaccgcaaattccagttgccaccaccaagatagaggtggcgcactccaagaccgagaaagcccgaggtcttatagcagcactctgacagatatgggcaggtcagccccacgggaaaggagaggtaccccagaaaaagagaagctgccagctaaagccgtctacgatttcaaggcgcaaacaagcaaggagttgtcatttaagaaaggggacacagtatacattctgcgtaaaatcgaccagaactggtatgaaggcgagcatcacggcagagtgggaatattcccaatcagctacgttgaaaagctgacaccgcctgaaaaggcccagcccgctcgacctccgcctcccgcacagccaggcgagatcggggaagctatagctaaatacaatttcaacgccgacacaaatgtggagctgtcacttcggaaaggcgacagggttatactgcttaaaagggttgaccagaactggtacgagggaaaaattcctggaaccaataggcaaggcattttccccgtcagttacgtcgaagtagtgaaaaagaacaccaagggggcagaggactacccggatcccccaatcccacatagctattcttctgatcggatacactcgctgtcttcgaacaaaccacagcgaccagtgttcacacacgaaaacatccagggtggaggagaacctttccaggccctctataattatactccacgcaatgaggatgagttagagttgagagaatctgatgtgattgacgtgatggagaaatgcgacgatggatggttcgtgggaaccagtcggcgaaccaaattctttggcacttttccaggaaattatgtgaagcgactctag

SEQ ID NO: 30224 - DNA, 390 bp, synthetic construct
  source 1..390: mol_type = other DNA; note = Synthetic coding sequence
atggccgagcttattcagaagaaactccaaggggaggtggaaaagtaccagcagctgcaaaaggacctcagcaaatctatgtctggaaggcaaaagctggaggcacagctgactgagaataacatcgtaaaagaggagctggctctgcttgatggaagcaacgtggtgtttaagctcctcggaccagtgctggtcaaacaggaactaggcgaagcccgtgctacagtcgggaagagactggattacatcacagcagagattaagcgttatgagagtcaactgcgcgatttagaaaggcagagcgagcaacagcgcgaaacacttgctcagctacagcaggaatttcagagggcccaggcagccaaagctggagcacctgggaaagcctag

SEQ ID NO: 30225 - DNA, 498 bp, synthetic construct
  source 1..498: mol_type = other DNA; note = Synthetic coding sequence
atgtcacttcacgggaagcggaaggaaatatacaaatacgaagccccttggaccgtctacgccatgaattggtctgtgcggccagacaaacgttttcggctggcactgggatctttcgtcgaggagtacaataataaggtccaactggtggggcttgacgaggaaagcagcgaatttatttgtagaaacaccttcgaccacccctaccctaccaccaaacttatgtggattcctgatactaaaggcgtctatcctgatctgctggctaccagcggggattatctgcgggtgtggagagtcggtgagaccgagacacgactggagtgcctgctaaacaacaataagaatagcgatttctgcgcacccctgacatcctttgattggaatgaggtagacccatatttgctgggcacaagcagtatcgataccacatgctgttttcagtggccagtctgtctgtctctcttatgcacccactgttaccagaagcttttgtag

SEQ ID NO: 30226 - DNA, 1044 bp, synthetic construct
  source 1..1044: mol_type = other DNA; note = Synthetic coding sequence
atgtccttggcacagagtcctggaatctggggagaagaccctgtcaagttgacactggcccttaaaatgacaaggcaggatctgacacgaacccagatggaacttaacaacatgaaggcgaacttcggagacgtggtacctcgaagggattttgaaatgcaagaaaagacgaataaagatctgcaggagcagctggatacacttagagccagctatgaggaggtgcgcaaggaacacgagatcttaatgcagctccacatgagtacacttaaggagcgagatcagttcttctctgagctacaggaaatccaacgcacatcgacaccacggcctgactggaccaaatgcaaagacgtggtcgccggtgggccagagagatggcagatgctagcggagggtaaaaacagtgaccagctggtggacgtcctcctggaagagatcggcagcggcttgctccgggagaaggatttttttcccggactgggatacggagaagcaatcccagcattcctcagatttgatgggctagtggagaataagaaaccttcaaagaaagatgtggtgaatctgttgaaggacgcttggaaggaaagactggctgaagaacaaaaggaaacgttccccgatttttttttcaacttcctcgaacatcgctttggaccatctgatgctatggcgtgggcatatacaatctttgagaatatcaagatatttcacagcaacgaggtcatgtcacagttctatgccgtcctgatgggcaagaggtctgagaacgtgtatgtcacccaaaaggaaaccgttgctcagctgttgaaggagatgaccaatgcagatagccagaatgaagggctgctcacgatggaacaattcaataccgtgctgaaatctaccttccctctgaaaacagaagaacagatccaagaactgatggaagcaggcggatggcacccctcttcttcgaatgccgacttgcttaattatagatcactgtttatggaggacgaggagggccagtccgaaccctttgtacagaaactttggtag

SEQ ID NO: 30227 - DNA, 219 bp, synthetic construct
  source 1..219: mol_type = other DNA; note = Synthetic coding sequence
atgtggagcttgactgcctccgagggggagagtacaactgcccacttcttcctcggtgcaggtgacgaaggattagggactcggggaataggcatgcggccagaagaatctgatagcgagctgctggaagatgaagaggacgaggtgcctccggaaccgcagatcatagttggaatctgcgccatgaccaaaaagagcaagagcaagcccatgacatag

SEQ ID NO: 30228 - DNA, 1149 bp, synthetic construct
  source 1..1149: mol_type = other DNA; note = Synthetic coding sequence
atgttaaggtggacagtgcatctggaaggaggaccaagaagagtgaatcatgctgcagtagcggtgggccaccgcgtttattcgtttgggggatattgttccggggaagattacgagacactcaggcagatcgacgttcacatcttcaatgccgtgtcactcaggtggacaaagctacctcctgtaaaatccgctatacgcggacaggcaccagttgtgccttacatgcgctatgggcactccacagtgctgattgatgacactgtactgctatgggggggaagaaacgatacagagggcgcatgcaacgtactgtacgccttcgacgtgaacacacacaagtggttcactcctcgagtgagcggcacagtgcctggcgcacgggacggtcattctgcctgtgtcctgggcaagatcatgtatatttttggaggctacgagcagcaagcagactgtttcagcaatgacatacacaaactggacacttcgacaatgacctggactctgatctgtacaaagggaagtcctgcgagatggcgagacttccattcagccaccatgctcggctcccacatgtatgtatttggaggtcgtgccgatcgctttgggcctttccactcaaacaatgagatctattgcaaccggattagagtgttcgacactcgcactgaggcttggttagattgccccccaacaccggtgttgcctgaggggcgtcggtcccattctgccttcgggtacaatggggagctgtatatctttgggggttataatgcacgactcaatcgacactttcatgacttgtggaaatttaatccagttagcttcacttggaagaagatcgagcctaaaggtaaagggccatgtcctcgcagaaggcaatgttgctgtattgtcggagacaaaatcgtgttattcggcggaacatctcctagccctgaggaggggctgggagatgaattcgatctgatcgaccatagtgacctgcatatactggatttctccccatcgctcaaaactctttgtaaacttgcggtgatacagtacaatctcgatcaatcttgcttaccccacgatattcgctgggagttgaacgcaatgactaccaatagcaacatctcgaggcctattgtgtctagccatgggtag

SEQ ID NO: 30229 - DNA, 1620 bp, synthetic construct
  source 1..1620: mol_type = other DNA; note = Synthetic coding sequence
atggcaacgagtgcccctttgcggagtctcgaggaagaagtgacctgctctatatgtctggactaccttcgggaccccgtgacgatcgactgtgggcacgtgttctgtcggtcctgcacaacagacgtgaggccgatttccggcagtcgtcccgtgtgtcctctctgcaaaaagcctttcaagaaggagaatattcgtcctgtgtggcagctggcttctcttgtggagaacatagaaaggttaaaagttgacaaggggagacagcccggtgaagttactagggagcaacaggacgccaaactgtgcgagagacatcgggaaaaattgcactactactgtgaggacgacggcaaattgctttgtgtcatgtgtagggaatctcgcgagcatagacctcacactgcggttcttatggaaaaggccgcacagccacaccgggagaaaattctcaatcacctgtcaactttgagacgagacagggacaagatacagggcttccaggccaagggggaagccgatatcttggccgctttaaagaaactccaggaccagcgccagtacatagtagctgaattcgagcagggccaccaatttctccgcgaaagggaggaacatctcctggagcagctggctaaactagaacaggaattgaccgaagggagggaaaagttcaaatcaagaggagtcggtgagttggctcgcctggccctagtgatttccgaactcgaaggaaaggcccagcagccagccgcagagctgatgcaggacacccgcgactttctgaacaggtatccacggaaaaaattttgggtcggtaagccaatagcgcgagtggttaaaaagaaaactggcgagttcagcgataaactcctgagtctgcagagaggtctccgagagtttcagggtaagttgcttcgtgatctcgagtataagacagtgtcagttaccctggacccccaaagcgccagtggctacctccagctctccgaggattggaagtgcgtgacctacacatcattatataaaagcgcatatctacacccgcaacagtttgattgtgagccaggggtgctggggagcaaaggcttcacctggggcaaggtctactgggaggttgaggtggagagggagggatggtccgaggacgaagaagagggtgacgaggaggaggaaggcgaagaagaggaagaggaagaagaagcaggatacggcgatggatatgatgactgggaaaccgatgaagacgaagaatcactgggagatgaggaggaggaagaagaagaagaagaagaggaagtactagagtcctgtatggtgggtgtggcacgggattcagtgaagagaaagggcgatctgtcactgcgccctgaagatggggtctgggcccttagactgtcatcgagcgggatttgggccaacaccagtcctgaggctgaactcttcccagctcttagaccgaggcgggtgggtatagcgctagattacgaaggcggtaccgtgacctttaccaacgcggaaagtcaggagcttatttacaccttcactgctaccttcaccaggcggctggtaccctttctttggctaaaatggccaggcacgcgacttctactcagaccctag

SEQ ID NO: 30230 - DNA, 390 bp, synthetic construct
  source 1..390: mol_type = other DNA; note = Synthetic coding sequence
atggcagaactcatacagaaaaagttacagggtgaagtggaaaaatatcagcagctgcaaaaagacctctcaaaatcgatgagtggtcgtcagaagcttgaagctcagctaacagagaataacatcgtgaaggaagagttggctctgctcgatggatccaacgtggtgtttaagcttctgggtcccgtccttgttaagcaggaactgggagaggcccgtgcaaccgtaggtaagcggttagactatattaccgcggaaataaaacggtacgaaagtcagctgcgggatctggagcgtcagtcagagcaacaaagagagactcttgcccagttacagcaggagttccaacgggctcaagctgccaaggctggtgctccaggcaaagcttag

SEQ ID NO: 30231 - DNA, 1089 bp, synthetic construct
  source 1..1089: mol_type = other DNA; note = Synthetic coding sequence
atgctcaaaaacaagggacatagctctaagaaagataatctggccgttaatgcagtggctctgcaggaccatatcctgcacgacttacagctgcgaaacttatcggtggcagaccactccaagactcaggtgcagaagaaggaaaacaagagcctgaaacgagacaccaaagcaatcatcgacacaggtcttaaaaagactacgcagtgcccaaagctggaagacagcgagaaggagtacgttttggatcctaagcccccaccccttacactggctcagaaactcgggctcattggcccaccacctccccctctcagtagcgacgagtgggaaaaagtcaaacagaggtctctactgcagggggattcagtgcaaccctgtcccatttgtaaagaggagtttgaattgaggccgcaggtgttgctgtcgtgctcacacgttttccacaaggcatgcctgcaggcgtttgagaaatttactaacaaaaagacttgtccactctgccggaaaaatcagtaccaaacgagagttattcacgacggcgctcggctattcaggattaagtgtgtaactagaatccaggcatactggagagggtgtgtggtacgtaagtggtatcgaaacctgaggaaaaccgtccccccaaccgacgcgaagctccggaagaagttcttcgagaagaagtttactgagattagccaccggattctgtgcagctacaacaccaacattgaagaactgttcgccgagatcgatcagtgcctggctatcaataggtctgtccttcagcagctggaagagaaatgcgggcatgaaataaccgaggaggagtgggagaaaattcaggtgcaggccctccggagggagacccatgaatgcagtatctgcctggctcccctttctgccgcagggggacagcgggttggcgcagggcgacggagtagagagatggccctgcttagttgctcccatgtgtttcaccatgcttgcttgctcgcgttggaagagttcagcgtcggggatcgtcctccttttcacgcctgtcccctgtgtcgaagctgctatcaaaagaaaattctcgaatgttag

SEQ ID NO: 30232 - DNA, 1266 bp, synthetic construct
  source 1..1266: mol_type = other DNA; note = Synthetic coding sequence
atgagcgccctccggcgatcaggctatggcccttccgacggcccttcttatggacgatattacggcccaggaggaggggatgtgcccgtccaccctccgcctcctctgtaccctctcaggcccgagccccctcaacccccaatttcctggcgagttcgtggtggtggccctgccgagacaacctggttgggtgaaggtggaggaggcgacggttattacccatcagggggtgcttggcccgagcccggacgcgcagggggtagtcatcagtccctcaacagttacaccaatggagcatatggaccaacatatcctcccggaccaggcgctaatacagcaagctatagcggtgcctattatgcgcctggatatacccagacaagttacagcactgaagtgccctccacttatcgctcctctgggaattcccctacacccgtgtctcgatggatctacccacagcaggactgtcagaccgaggcccctccactgcgcggacaggtccccggatatcccccatcacagaatccaggcatgactcttccacattatccatacggcgacggcaaccggagcgtaccccagtcagggcctacagtccgcccacaggaagacgcatgggcgtcccctggtgcttacggcatggggggtcgttacccctggccatcaagcgcacctagcgccccacctggtaatttgtacatgaccgaaagcacaagcccatggcccagctcaggctcgcctcagtccccaccttcacctccagtccagcagccgaaggatagttcctatccatattcccagtctgaccaaagtatgaacagacacaacttcccctgtagcgttcaccagtacgaatcaagcggcactgtcaacaatgacgacagcgatctgctggattcccaggtgcagtattcagccgagcctcaactatacgggaacgcgacctccgatcacccaaacaaccaggatcagtcaagcagtctacccgaggaatgcgtaccctctgacgaatcaaccccaccatcaatcaaaaaaatcatccatgtcctcgagaaggttcagtacctcgaacaggaggtggaggaatttgtcggtaagaaaacagataaggcatattggctcctggaggagatgctgactaaagagcttctggaactggattctgtggagactgggggtcaggacagcgtcaggcaggcgagaaaagaagccgtctgtaaaattcaggccatcctggagaaactggagaaaaaaggattgtag

SEQ ID NO: 30233 - DNA, 321 bp, synthetic construct
  source 1..321: mol_type = other DNA; note = Synthetic coding sequence
tgaaacctccgggagggcgcagagcagaaggtggtgtttattacagggagagtccatcctggggagaccccaagtagtttcgtgtgccaaggcataatcgatttcctcgtttctcaacatcctatcgcctgcgtgctgcgtgaatatttagtgtttaagatcgcccctatgctcaaccctgacggtgtgtacctgggtaattacaggtgtttgagcctgatgcgaaacggttcacgcggtcgccctttcttccctagcagctccgctcgaatgctccgcaccagtccgataccagcccacccactcactggaacactttag

SEQ ID NO: 30234 - DNA, 684 bp, synthetic construct
  source 1..684: mol_type = other DNA; note = Synthetic coding sequence
taactcatttttgcttgtttggttccaggctttcctgcggtcatgagctcccgaggcccttgtactttagaaactctgatcaacccatcaccctcagtagccgatgtgaaaatttatccagaggaaatcactccacttttacccgctatttctggcgaaaagattgctgaagatcagacttgcttctttctgcaaatattgctcaagtatatggtaatacaagctgccagcttagagtggaaaaacaaagaaaatcaggatacgggattcaaattcctgttcacactgtttcgcaaatactaccttccacacctgtttccatcgtttactaaactgacaaacatttataagcctgtgcttgacattccccaccttcgcccaaaacccgtttatattactactacaagggataatgagaacatttactcaactaaaattccatatatggccgctcgggtcgtttttataaagtggattgtgacttttttcctggagaagaaataccttaccgccacccagaacactaaaaacggtgtggacgtcctgcccaagattatccagaccgtaggcggtggagccgtgcaggaaagagcgcctgaacttgatgggggtggtccaacagagcaggacaagtcccactcgaatagcagcaccttatcagatcgtagactctcaaactcatag

SEQ ID NO: 30235 - DNA, 573 bp, synthetic construct
  source 1..573: mol_type = other DNA; note = Synthetic coding sequence
atggaaccccctatggaaccaagtgggggtgagcaggaaccgggagccgtgcgctttttggatctcccatgggaggatgtacttcttccccatgtcctgaatagagtgccactgcgtcagctgttgcggttgcagcgcgtctcaagagcgtttcgaagtctggtgcagctgcatctggcagggctgagaaggttcgatgcagctcaagtggggccacagattcccagggccgctctggcgagactcctgcgagatgcagaaggtcttcaggaactggcactggcaccgtgtcatgaatggctgtccgacgaagatttagtccccgtcttagccagaaatccgcaactgcggagtgtcgctctcgggggttgcggacagttatcccgacgggctctgggagcactcgccgaaggttgtccaagactacagcggctctcgctggcgcactgcgattgggtagacggcctggcgcttcggggtctggccgacagatgccctgctctggaggagctggatctcaccgcatgtcgccagctgaaggatgaggctatcgtctacttagcacaacggtag

SEQ ID NO: 30236 - DNA, 270 bp, synthetic construct
  source 1..270: mol_type = other DNA; note = Synthetic coding sequence
atgtcggagcagggcgatctaaatcaggcaatcgccgaagagggaggtactgaacaagagaccgcaactccggaaaacggcattgttaaatccgagtctctggatgaggaggaaaagctagagctgcagagaaggttggaagcccagaaccaggagcgtagaaagagtaagtctggggctggcaaggggaagctaactagatcccttgcagtgtgcgaagaaagttccgccaggcccggtggcgagtccttacaggaccaaactctctag

SEQ ID NO: 30237 - DNA, 381 bp, synthetic construct
  source 1..381: mol_type = other DNA; note = Synthetic coding sequence
atgaccacccgtagtgtgctggacgtcgaaaccttcgtggccgatatacttaagggtgaaaatttgtccaaaaaagcaaaagaaaagagggagagcctcatcaagaagatcaaagatgtgaaaagcatctacctccaggaatttcaggataagggcgatgcagaggatggcgaggaatatgatgacccgtttgcaggtccacctgatacaataagcctagcttcagaacggtatgataaagacgacgaggcaccttccgacggtgctcagtttccgccaatcgccgcacaggatttaccctttgtgctgaaggctggatatctcgaaaagcgaagaaaagatcactcattcttgggcttcgagtggcaaaagcgatggtag

SEQ ID NO: 30238 - DNA, 678 bp, synthetic construct
  source 1..678: mol_type = other DNA; note = Synthetic coding sequence
atgctgtcagctgtagccagagggtaccagggatggtttcacccctgcgctagactgtctgtgcggatgtccagcacgggaattgaccgaaagggagtgttggccaatagagtggcggtggtcactggcagcaccagcggcattgggtttgccatcgcacgcagactcgcgcgagacggcgcacacgtcgttatatcatcaagaaaacagcaaaatgtggatagggccatggctaaactccagggtgagggactgagtgtggctggcatcgtgtgccatgtcggcaaggccgaggatcgggaacaactggtggccaaggccttagagcattgcgggggagtagatttcctggtatgtagtgcgggagtcaatcccctcgtgggatcaactctgggtacctccgagcaaatttgggataagattttatcagtcaacgtgaaatcaccggcactgctgctatcacagctgctgccttatatggagaatcgaagaggcgctgtgatcctggtcagttccatagcagcttacaatcccgtggtggctctcggggtatacaatgtcagcaagaccgctctcttgggcctcactcggacacttgcactggagctggcgccaaaagacatcagagtgaactgtgtggtccccggtatcatcaagacggatttcagcaaagtgtag

SEQ ID NO: 30239 - DNA, 1080 bp, synthetic construct
  source 1..1080: mol_type = other DNA; note = Synthetic coding sequence
taagctactgccatgacctccgcgtggctcgctcagggaactggcgagggcgtgaatgacgtccgcaagggggcttgcgcctcccacgtgtccacgatggctagttttcttaagggggctcacgttaccatcaatgcgagagccgaggaagatgtggagcctgaatgtatcatggaaaaagtcgccaaggcctcaggcgcaaactattctttccacaaagaatctggcaggttccaggacgttgggccacaggctccggtcggctctgtctaccaaaagacaaatgccgtctcggagatcaaacgtgtaggcaaggacagtttctgggctaaggccgagaaagaggaagaaaatcggaggctggaagaaaagagacgggctgaggaggcacagaggcagctcgaacaggaacgcagggagcgggagttacgcgaagcggctcgacgggaacagcgatatcaggaacaggggggagaagcctcaccacagcgtacgtgggagcagcaacaggaggtcgtttcacgcaatagaaatgagcaggagtctgccgtgcacccaagagagatctttaagcaaaaagaacgagcgatgtccacaacgtcaatttccagtccccagcctggcaagctccgctcgcctttcttgcagaaacagctgactcagcctgagacccatttcggccgagagccagcggctgctatttccagacctcgggcagatctccccgcagaggagcctgcaccctctacaccgccatgtttggtgcaagcagaggaagaggccgtgtacgaagaaccacccgaacaggaaaccttttacgaacagccaccgcttgtgcagcagcaaggagcgggaagcgaacacatcgaccaccatattcagggacaaggcctctcaggacagggactatgcgctcgcgcactgtatgactaccaggccgctgacgacacagaaatcagcttcgatcctgagaacctgatcacaggcattgaggtgatcgacgagggctggtggcgtgggtatggccctgatggccacttcggcatgttcccagccaactacgtggagcttatcgaatag

SEQ ID NO: 30240 - DNA, 483 bp, synthetic construct
  source 1..483: mol_type = other DNA; note = Synthetic coding sequence
atggaagccgaacgccctcaggaggaagaagacggggaacagggaccccctcaggacgaggaggggtggccaccgcctaactcgacaacaaggccgtggcgcagtgccccacccagccctccccctcccggtacgaggcatactgcactggggccaaggtccgcgtccttactgtccctccagacagaactactattggatcttgtcgccgaagcccagtcccgacggctggaggagcagagagcgacgttttacacccctcagaacccctccagtttggcccctgctcccctaaggcccttggaggatcgggagcagctgtactcgaccatactgtcacaccagtgccagaggatggaggcccagcggtccgaaccgcctctgccgcctggtggtcaagagctcctggagctccttctcagggtgcagggcggaggcagaatggaggagcagaggagcagaccgcctactcacacgtgctag

SEQ ID NO: 30241 - DNA, 2616 bp, synthetic construct
  source 1..2616: mol_type = other DNA; note = Synthetic coding sequence
atgggcgattccgatgacgaatacgataggcgcaggagagacaaattccgtcgagaacggtccgactatgacaggtctagagaacgggacgagcgacgaaggggtgatgattggaatgatagagaatgggataggggcagggaacgccgtagtagaggtgagtatagagactacgacagaaatagacgggagcgcttttcaccaccgaggcacgaactgagtcctccccagaagcggatgaggagagattgggatgaacactcctccgacccttatcattctggatacgagatgccctatgccggaggtggtggaggccctacttacggtcccccacagccttggggtcacccagacgttcatatcatgcagcaccacgttcttcctatccaggcacgattggggagtatcgccgaaatcgacctcggagtcccaccacccgttatgaaaactttcaaggagttcctgttaagtctcgatgactcggtcgatgagacagaggcggtgaagagatacaacgattacaagctggatttccgaaggcaacagatgcaggactttttcctggcccataaagacgaggaatggttccgatcaaaataccatccagatgaggttgggaagaggcgccaggaggccagaggcgctctgcaaaaccgactccgagtctttctatctctcatggaaaccggctggtttgataacctgttgcttgatatcgacaaggccgatgctattgtcaagatgctggacgccgcagtcataaagatggaaggagggacggagaacgaccttaggatcttggaacaggaagaggaagaggagcaggccggaaagccaggggagccctctaagaaggaggagggccgtgctggggcaggattgggtgatggggaacgcaagacaaacgataaggatgagaagaaggaggatgggaagcaggccgagaatgacagctccaatgacgacaagactaaaaaatctgaaggggatggcgataaggaggaaaagaaggaggacagcgaaaaagaagctaagaagagctcgaagaaacgcaaccgcaaacattccggcgacgactccttcgatgaaggctctgtttctgaatcagaatcggagagtgagtcaggtcaggcagaggaagaaaaggaagaggcagaggcgttaaaggaaaaagagaagcccaaggaggaagagtgggaaaagccaaaagatgccgcagggttggaatgtaaaccacggccattacacaagacttgtagcctatttatgcgaaacatcgcaccaaatatctcaagggcagaaataattagtctatgtaagcgctatcccggattcatgagagtggcactgtccgagccgcagcccgaacgaagattctttaggcgaggatgggttacattcgataggtctgtcaatatcaaagaaatttgttggaacctccagaacattaggcttcgagagtgtgaactaagtcccggtgtcaaccgcgacctcacacgacgggtgcggaacatcaatggtataactcaacataaacagatagtgaggaacgacatcaagctggctgcaaagctcattcatactctcgacgatcgcactcagttgtgggcaagcgaaccgggtacacccccattaccaacctctctcccatcacaaaacccaatcctaaagaatatcactgattacctgattgaagaagtctccgctgaggaagaggagcttctgggctctagtggcggagctcctcctgaagaaccacccaaggaaggcaatccagccgagataaatgtggaaagggacgaaaagctgataaaggttttagacaagctgttgctatatctacgcatcgtccactccctggattattacaacacatgcgaataccccaacgaggacgagatgcctaacagatgcggcatcattcatgtgaggggcccaatgcccccaaataggatctctcacggagaagtcctggaatggcagaaaaccttcgaggaaaagttaactcccctgctgagcgtgagagaatcattgagtgaggaggaggcacagaaaatgggcaggaaagaccccgaacaggaggtcgaaaagtttgtaacaagcaacacacaagagctgggtaaggacaaatggctgtgccctttatccggtaagaagttcaagggaccagagtttgtgcgcaagcacatctttaataagcacgccgaaaaaattgaggaggtcaagaaggaagtcgctttctttaacaatttcctaacagacgcaaagagaccagcattacccgaaatcaagccggctcagccaccgggtccagcgcaatcattaacgcctggattgccctacccgcatcagacaccacaagggctgatgccctatggacagcccaggcctccaatccttggctacggagccggtgccgttaggcctgccgttcccaccggagggcctccatacccacatgctccctatggggctggcagaggcaactatgacgcttttagaggacaaggcggatacccgggaaaacctaggaacaggatggttcggggtgaccccagggccatcgtcgaatacagagacctcgacgccccagacgatgtcgactttttctag

SEQ ID NO: 30242 - DNA, 2025 bp, synthetic construct
  source 1..2025: mol_type = other DNA; note = Synthetic coding sequence
atgcagacgtccagctcacgcagcgtgcacctatcggagtggcagaagaattattttgctattacctcagggatctgtaccggcccaaaggcagatgcctaccgcgcacaaatacttcggattcagtacgcctgggccaacagcgagatcagccaggtctgtgcaaccaaactttttaagaaatacgcggaaaaatactcggccataatcgactctgacaatgtggagtcaggattgaacaattacgcggagaatatcttgactttagcaggttcgcaacagactgacagtgataaatggcagagtggtctgagcatcaataacgtcttcaaaatgagtagcgtgcagaaaatgatgcaggcaggcaaaaagttcaaagactcgctactggagccggctctcgcaagcgtcgttatccacaaggaggccaccgtttttgatctgccaaaattttctgtatgcggctcatcacaagaatccgatagtctcccaaatagcgctcatgacagggaccggacacaggattttcccgagtccaaccgactcaaactcctgcaaaatgcccaaccccctatggtgaccaacacagccaggacatgccctacgtttagcgctcctgtgggcgagtccgctaccgcaaaatttcacgtaacccctttgttcgggaacgttaagaaggagaatcactctagcgctaaggagaatatcgggctcaatgtgttcttatccaatcagagctgcttcccagccgcatgtgaaaacccacagcggaagtccttttatggcagcggaaccatcgacgctctttccaacccaatcctgaataaagcgtgttccaaaaccgaggataacggccctaaagaggactcgagtctgcctacctttaagacagcaaaagagcagttatgggtggatcagcagaaaaaataccatcaaccgcagagggccagtggcagttcttacggcggagtgaagaaaagcttgggtgcttctcggtcacggggtattcttggtaagttcgtccctccaatccctaaacaggacggcggagagcaaaacgggggtatgcagtgcaaaccctatggagcagggcctaccgaacctgcgcatcccgtggatgagcgtctgaaaaacttggaacccaagatgattgagctaattatgaatgagatcatggaccacgggcctcctgtgaattgggaggacatagccggtgtggagtttgctaaggccacaataaaggaaatcgtcgtatggcctatgctgcgccctgatatatttaccgggctgagggggccacctaaagggatcttactcttcggtcctcctggtaccggaaaaacgctaataggcaaatgtatcgcctcacagtccggcgctacttttttctcgatcagcgcctctagcttaacctcaaaatgggtcggcgaaggcgaaaagatggtgagagcgctgtttgccgtagctaggtgccagcagcccgctgtcatttttatcgacgagatcgatagccttctgtcacagcgaggagacggagagcacgagtccagccgaaggatcaagacggagtttcttgtgcagttggacggcgctaccacttctagtgaagatcgcatcctggttgtcggggcaaccaatcgaccacaggaaatcgacgaggcagcgaggcggagactcgtgaagaggctgtacatcccactgcccgaggcatctgccaggaaacaaatcgtgatcaaccttatgtccaaagagcagtgttgtctctcagaggaggagatcgagcagattgtccagcagtctgatgcttttagcggtgcagacatgacgcagctgtgcagagaggcatcactggggccaatccggagcttacaaaccgcagatatcgccacaatcacacctgatcaagtgcgccctatcgcatacatcgatttcgagaatgccttccgcaccgtgcgcccatcagtctcccctaaagacttggaactgtatgagaactggaataaaacatttggctgcggtaagtag

SEQ ID NO: 30243 - DNA, 1467 bp, synthetic construct
  source 1..1467: mol_type = other DNA; note = Synthetic coding sequence
atgtccgatgaggtgttcagtactaccctggcgtacacaaagtcaccaaaggtgacaaaacgtaccaccttccaggacgagctgatacgggcaataaccgcacgcagcgctcgccagaggtcgtcagaatacagcgatgactttgattcggacgaaatcgtctctttgggtgacttttcagacacatccgctgacgagaattccgtcaataagaagatgaacgactttcatattagtgacgacgaagagaagaaccctagtaagctgctgttcctgaagacaaacaagtctaacggtaacatcactaaagacgagccggtgtgtgccatcaaaaacgaggaggaaatggcccctgatgggtgtgaggatatcgtcgtaaaaagtttctccgagtctcagaacaaagacgaggagtttgagaaagacaagatcaaaatgaaaccgaagcctagaatcttaagtatcaagtctacctcaagcgagaacaattctttggataccgacgatcatttcaaaccttcaccacgtccaagatccatgctgaagaagaagagccatatggaagaaaaggatggcctggaggataaggagactgcactgtccgaggaactagaattacattctgcaccatctagcttaccgacccctaatggcatccagctcgaagcagaaaagaaggcattctcagaaaatctggacccggaggatagttgtctaacatccctggcttcctccagtttgaagcagatccttggggattctttctctcccggaagcgaggggaatgcctcaggtaaagatccaaacgaagagatcacggaaaatcacaatagtctgaagtcagacgaaaataaggaaaactctttctccgccgaccacgtcacaacagcggttgagaagagtaaggaaagtcaggtcacggctgatgacctggaggaggagaaggctaaagccgaactcatcatggacgacgacagaaccgtcgacccgctgctaagcaagtcacaatctatacttatctcaacatctgccacagcctcgtccaagaaaactattgaggaccgaaatataaaaaacaagaagagtacgaacaacagggcatcgagcgcttccgctaggctcatgacttcggagttcctcaagaaaagttcttctaagaggcgcaccccatcaacaactacaagcagtcactacctcggaaccctcaaggttttggaccagaagccttctcaaaagcagtccatcgagcctgatcgcgcagacaatattcgggctgctgtttaccaggaatggttggagaagaagaacgtttatttacacgagatgcacaggataaagcggatcgaatctgagaacttgaggatccagaatgagcagaagaaggctgctaagcgggaagaggccttagcgtccttcgaggcctggaaggccatgaaagagaaggaagccaagaagattgcagcctag

SEQ ID NO: 30244 - DNA, 564 bp, synthetic construct
  source 1..564: mol_type = other DNA; note = Synthetic coding sequence
atggtgcgcgagccaggacctcgtccaggcacccctggttgtagtgccagtgggcagtggaccgccacgttgaggccctatctgtccgccgtccgggctactctgcaagccgctttatgcctagaaaattttagctctcaagtcgtcgagagacacaacaaaccggaggtagaggtcaggtcctctaaagagctgctgctgcaaccagttacaatctcacgcaatgagaaagagaaggtgctgatagagggttctattaattccgtgagggtgagcattgcggtcaaacaggccgacgaaatcgaaaaaatcctgtgtcacaagtttatgcgcttcatgatgatgcgggctgaaaattttttcatccttcggaggaaaccagtagagggctatgatatcagcttcctgattacaaactttcacactgaacagatgtataagcacaaattagtcgacttcgtcattcacttcatggaggagattgacaaagagatttccgagatgaaactctcggtcaacgccagagctagaatcgtcgcagaggagttcctgaaaaacttctag

SEQ ID NO: 30245 - DNA, 1068 bp, synthetic construct
  source 1..1068: mol_type = other DNA; note = Synthetic coding sequence
tgatccttagcctcatccctgcgcaataaggagggaacgcttggaagtaaggtgggttacctggacgtggaggccagaggcccaggcgagggaaggggcggtggcggagagtccccaccactccagcctcccccaccggcaccagtcctcttgtacgatcagggtggtggacggaggcgcagaggagaagcagaggctgaggctgaggagtgggaagccgagtccgtgctgggaaccctgctgcagaagctaagagaagaggggtatctcgcgtattacctacagggtggattcagtcggttccaggctgaatgcccacatctctgcgaaacttcgcttgctgggagggccggaagctcaatggcacctgtgccaggtcccgtgcccgttgtggggctgggtagtctgtgtctgggcagtgattgcagtgacgcggaatccgaggctgatcgggattccatgtcttgtggattagattccgagggcgcaaccccacctcccgtgggcctgcgcgcatctttccctgttcagatcctgccgaatctctatctgggtagcgccagagacagcgctaatctcgaaagccttgctaagttgggcatccgctatatcctaaacgtgacacctaatctcccgaatttcttcgagaagaatggggattttcattataaacagatccctatatctgaccattggagccagaatttgtcgcgctttttccctgaggcaatagagttcattgacgaggctctgagccagaattgcggtgtgctagtccactgcctggccggagtctcaagaagcgtgacagtgaccgtggcctacctcatgcaaaagctgcacctgtcactgaacgatgcttacgacctggtgaagagaaagaagtcaaacatttcaccaaacttcaatttcatggggcaactgttggattttgaacgttcattgcgactggaggaaaggcatagccaggagcagggaagcggaggtcaggcatccgcagctagcaacccaccaagcttttttactacccccacatctgacggcgcattcgagcttgcccctacctag

SEQ ID NO: 30246 - DNA, 51 bp, synthetic construct
  source 1..51: mol_type = other DNA; note = Synthetic coding sequence
atgtgtactagcgaaacgttccaggccctcgatacattcgaagctcgctag

SEQ ID NO: 30247 - DNA, 1620 bp, synthetic construct
  source 1..1620: mol_type = other DNA; note = Synthetic coding sequence
atggcgacaagcgcacctctgcggagtttggaggaagaggtgacctgctcaatctgtttagactatctacgcgacccagtgaccattgattgcggccacgtgttctgtcgatcgtgcacaaccgatgttagacccatctccgggtcaaggcccgtttgtcccttgtgcaagaaaccttttaagaaggaaaatataaggccagtttggcaactggcaagcctggtggagaatattgaacggctcaaggtggataaagggaggcaaccaggcgaagtgacaagggagcagcaggacgcaaaactgtgtgaacggcatagggaaaagttgcattactattgtgaggatgatggcaagctgctgtgtgtcatgtgcagagagtcccgcgagcaccgccctcacaccgccgtgctcatggagaaagctgctcaacctcacagggaaaaaatcctgaaccatcttagtaccttgagacgcgaccgggataaaatccaaggcttccaggctaagggagaggccgatattcttgccgcacttaagaagctgcaagatcagcggcaatatatcgtggcagaattcgagcaaggccaccagttccttagggaaagagaggaacacctgctggagcagctggcaaaactcgagcaggaacttacagaaggaagggagaaatttaagtcccggggtgttggtgagcttgcaagacttgcgctggtgatttccgaacttgagggaaaggcccagcagccagctgcagaactgatgcaggatacgcgtgattttttgaataggtacccgaggaagaagttctgggttgggaagccgatcgcacgtgtagtcaagaagaagactggagagttcagtgataagttactcagcttgcagcgaggccttcgcgagttccaaggaaagcttcttcgtgacctagaatataagacggtgagcgtgacattagacccccaatcagcctccggatacctgcaactttctgaggactggaagtgcgttacctatactagcctgtacaaaagcgcatacctccatccacagcagtttgattgcgaacctggcgtactggggtctaaaggttttacatggggcaaggtctattgggaagtcgaggtggagagggaaggatggtccgaggatgaggaagaaggtgatgaagaagaggagggcgaggaagaagaagaagaagaagaggctggctatggcgacggctatgacgactgggaaaccgatgaggatgaggaaagcttgggggacgaggaggaagaggaggaagaggaagaagaggaggtcctggagtcctgtatggtaggggtagcacgggattccgtaaaacgcaaaggggacctgtctctcaggccggaagacggtgtctgggcgctgagactgtccagtagtgggatatgggctaacacgagtcctgaagctgaactctttcccgctcttagaccacgaagggtgggaatcgctctggattatgagggcggtacggttaccttcaccaatgctgaatcccaggagctcatctatacctttactgccacatttacacgccgtcttgtgcccttcctctggctcaagtggcctggtacccgcctgttgctccggccatag

SEQ ID NO: 30248 - DNA, 474 bp, synthetic construct
  source 1..474: mol_type = other DNA; note = Synthetic coding sequence
atggcaacaagcgcaccactgcgctcgctcgaggaagaggtgacatgtagcatctgtctcgattatcttcgtgaccccgtcaccattgattgcggccatgtcttctgccgcagttgtacgactgatgtcagacccattagcggaagccgacctgtgtgccccctgtgcaagaaacctttcaagaaagaaaatattcggccagtgtggcagctggcctctctggttgagaacatcgaaaggttaaaggtcgacaaggggagacagccaggcgaagtgactcgggagcaacaggatgctaagctgtgtgagaggcacagagaaaagctgcactactattgtgaggatgacgggaaactgttatgtgtgatgtgcagagagtccagggagcatcgacctcacaccgctgtgctcatggagaaagcagctcaaccacacagagagaaaatcctgaatcacctgtccacgctacgttag

SEQ ID NO: 30249 - DNA, 2553 bp, synthetic construct
  source 1..2553: mol_type = other DNA; note = Synthetic coding sequence
atggagcccgaaaggaaggggttatccctggcgagttcatctgatggagatggaagagaagagaacaagctgaaacaggggataagccaggatctcgcttcatcttcccgtctggatcgctacaaaatagctaggcagttaactgaaaaggctatcaaggaaaagaaaattttctccatctacggccattaccctgtcgtgcgcgcagccctgcgtaggaaaggctgggtggagaaaaagttccacttcctgcctaaagtgatccctgacgttgaggacgaaggcgctcgagtgaacgatgatacatgcgctaaagtaaaagaaaaccaagaaatggctctcgagaagacagacaacatccacgacgtgatgagcagactagtaaaaaacgagatgccatatctactgtggactatcaagcgcgatataattgactaccacagtctgacatacgaccaaatgctgaaccattacgctaaaaccgcctcttttaccacgaaaattggattgtgtgttaacatgaggtccctgccctggtatgtcccagctaatcccgatagcttcttccctagatgttactcactgtgtaccgaatctgagcagcaggaattcctggaggactttcgcagaacaatggcatcctcaattctgaaatgggtagtgagccatcagagctgctcgcgatcctctagatcaaaaccaagggatcagcgtgaagaggccggatcctcggacctctccagcaggcaagacgctgagaatgcggaggcaaaattgaggggcttgcccggacagctggtggacatagcgtgcaaggtgtgtcaggcctatctgggacagctggaacacgaggacattgacacctcagccgacgcagtggaagatctgacagaagccgaatgggaggacttaacccaacaatactactcccttgtccatggagacgcgtttatttctaacagtaggaactatttttctcaatgtcaagctctgctgaaccggatcacctctgtcaatccccaaacagatattgatggcctcaggaacatatggatcatcaagcccgctgccaaatctcgtggcagagacatcgtttgtatggaccgcgttgaagaaatccttgagctggcagcggctgatcaccctctcagccgagataataaatgggtcgtccagaagtacatcgaaaccccactgttaatatgtgacaccaaatttgatataagacagtggtttcttgtcaccgattggaaccccctgaccatttggttctataaggagagttacctgcggttttctacccaacgtttctctctcgacaagctggactcagcaatccatctttgcaataatgccgtacagaaatatctcaaaaatgatgtcggacgctccccactcctgccagcacacaacatgtggaccagcacaaggttccaagagtatctccagagacaggggagaggtgccgtgtggggcagcgtaatctacccttccatgaaaaaggcaatcgcacacgcaatgaaggtagcccaagaccacgtcgagccaaggaaaaattctttcgaactgtatggcgctgacttcgtgctgggcagggattttaggccttggttgattgaaatcaattcatcacctacaatgcacccaagtaccccagtcactgcccaactttgtgctcaggtacaagaggacaccatcaaagtggccgtggaccggtcctgcgatatcgggaactttgagctattgtggagacaacctgttgtggagccacctcctttttcaggtagcgacctctgtgtggcaggcgtctctgtccgccgagcccgtcgacaggtgttgcccgtctgtaatctgaaagcatccgcatccctgttggatgcccagcctctgaaagcgaggggcccaagcgccatgcctgaccctgcgcaggggcctccaagccccgcactgcaacgagacctggggctgaaagaagagaagggcctacccctcgcacttctggcacctcttcggggagccgcagagagcggaggagcggcacagcccaccagaacaaaagctgcgggaaaagtagaattgccagcctgtccttgtaggcacgtcgactcccaggcccctaacaccggggtacccgtggcacaacctgcaaaatcatgggatccaaaccaacttaacgcacatccactggaacccgtgcttaggggcctaaagacagcggaaggcgctctgcgaccacccccaggaggaaaaggagaggggactgtctgcagtcgccttcctcaccatggccatcatgtggctgcctgtcagactaccgggactacctgggacggcggtccgggagtatgcttcttgcgccagctgctggcatcggaactgccaatgggccctggcctacctagggaccctcgcgcacccccatgtctagtgtgtaggggcctgcttccccctgccggaccttgcaagcggtgccgatccttttgcgccgcagtgctccagggcgcatcattcgttcgtctagggggacgatcttgtagcccgagaacaccttag

SEQ ID NO: 30250 - DNA, 2739 bp, synthetic construct
  source 1..2739: mol_type = other DNA; note = Synthetic coding sequence
atgaaaagaggcattaggcgggacccttttcggaaacgcaagctggggggacgggcaaaaaaagttagggagcccactgctgtgaacagcttctaccgcgaggcctcactcccctcagtgtgggcctcactcagacgcagagaaatggtgaggtcaggcgctcgccctgggcaggttttaagtagcggccgtcatactggaccagccaagctgaccaatggcaagaaggcaacctatctacggaaaatccctcgtttcaatgccgatagcggctactccatccatagcgatagcgagagccaggcagaaaccgtgcacggcctggacggatgtgcgagtttattgcgggacatccttagaaatgaggattcagcttctagcgataacaagaagcagatccctaatgaagcttcggcccgtagcgagcgagatacgtctgacctggaacagaattggtccttacaggatcattaccggatgtactccccaataatttaccaagctctttgtgagcatgtgcagactcagatgagcctcatgaacgacctcaccagtaaaaacattccaaatgggatccccgcagtgccatgccatgctcccagccatagtgaatcccaggctactccacattcaagttatggcctgtgtaccagcacgcccgtgtggtcgctacagcgcccaccatgccccccaaaggttcattccgaagtgcagaccgatgggaattcacagttcgcctcccagggaaaaacagtgagtgctacttgtaccgacgtgctgaggaactccttcaacacaagtcccggagtaccctgtagcctacctaagacagacattagcgccatccctaccttgcagcaactgggactggtgaatggtattctcccacagcaaggtattcacaaggagactgatttgctgaagtgcatccagacttatctctccctttttagatctcacggtaaggagacgcacctggatagtcagacacaccgctcccctacacagtctcagccggcttttctagctacgaacgaggagaagtgtgccagggagcagattagagaggccactagcgagagaaaggatctgaacattcacgtgagggacacaaaaaccgtgaaagacgtccaaaaggccaaaaatgtgaacaagaccgccgaaaaagtccgaattataaagtatcttctgggcgagttgaaggctctggtggcagaacaggaggactcagaaatccaacgccttataacagaaatggaagcctgcatctccgtgctgccgactgtttccggcaataccgatattcaggtggagatagcccttgctatgcagcccttaagaagcgagaatgctcaactccgccgacaactcagaatccttaatcagcagctgcgtgaacagcagaagacccaaaagcccagcggggctgtagattgcaatctagagctcttctcattgcagtcgttgaacatgtccttacagaaccagctcgaagaaagtcttaagtctcaagaactgctgcagtctaagaacgaagagctgctgaaggtgattgagaaccagaaagacgaaaataagaagttctcttccattttcaaggataaggaccagacaattctggaaaataagcagcagtatgatattgaaatcactagaatcaaaatagagttggaggaagcgctggtgaacgtaaaatcttcacaattcaagctcgaaaccgcagaaaaagagaaccagattctggggataaccctaaggcaacgcgatgccgaggtaacccgtcttagagagttaacccgcaccctccagacaagcatggctaagctcttatccgacctatctgttgacagcgccagatgtaaaccagggaataatctgactaaaagcctgctgaacatccacgataaacagctccaacacgatcctgccccagcgcatacctccatcatgtcttacctgaacaaactcgagacgaattattcctttacacacagtgagcccctctccacaatcaagaatgaagagactatagagccagataagacatacgaaaatgtgttgtcttctcgcggaccacagaactcgaatacacgcggaatggaggaagccagcgccccaggcatcatttccgccctctctaaacaggacagcgatgaagggtccgaaacgatggcccttattgaagacgagcacaatctggataacactatttacatcccgtttgctcgcagcacccccgagaaaaagtctcctctctccaagcgattatctccacaaccccaaatccgcgcagccacaacccagctcgtctccaactctggtcttgcagtctccggcaaggagaataaactttgcacccccgtgatctgctcaagcagtacaaaagaggctgaagatgcacctgagaaactgagcagagctagtgacatgaaagacacgcagctgctgaagaagatcaaggaagcaataggtaaaatccccgctgctactaaagaacctgaagagcagacagcttgccatgggccttcgggctgcctatctaactcgcttcaagttaagggcaataccgtgtgcgacggctccgtgtttacctcagaccttatgtccgactggtcgatctccagctttagtacctttacctctagggatgagcaggactttagaaatggactggccgctttagacgctaatattgctcggttgcagaagagcttgaggacaggattgcttgagaagtag

SEQ ID NO: 30251 - DNA, 528 bp, synthetic construct
  source 1..528: mol_type = other DNA; note = Synthetic coding sequence
atggaattgaccatctttatattgcggctggccatttacatcctcactttcccactgtacctccttaactttctaggattgtggtcatggatctgcaagaagtggtttccctattttttagttagatttactgtgatctacaatgaacagatggctagcaagaaacgggagctcttctcaaacctgcaggagtttgcaggtccatctggtaaacttagcctcttggaagtgggttgtggaaccggtgccaattttaaattttatcccccaggttgtcgcgttctgagacccggaggggctttttatttcatggagcatgtggccgctgagtgctccacctggaattacttttggcagcaggttctggaccccgcatggcatctcctatttgacggctgtaacctaacgcgcgaaagttggaaagccctcgagcgggcatctttcagcaaacttaagctacagcacattcaagccccactgtcctgggagttggtccggcctcacatttacggatatgccgtcaagtag

SEQ ID NO: 30252 - DNA, 1392 bp, synthetic construct
  source 1..1392: mol_type = other DNA; note = Synthetic coding sequence
atgtctgggggaacgccgtatatcggatctaaaatatctttaatcagtaaagctgaaatcagatatgaagggatcctctacacaatcgacaccgaaaatagcaccgtggctctagccaaagtgcgatccttcggtacggaggatcgacccacggaccgcccaatcccccctcgagatgaggtgtttgagtacatcatcttccgcggatccgacattaaggacctgactgtgtgtgagcctcctaagcctcagtgctcactgccccaagacccagcgatcgtccagtcttcccttgggtccagcacttcctcgttccagtctatgggctcctacggtcccttcggccgaatgcctacttactcccagttctctccctcctcactagtcggccagcagtttggcgctgtcggagtggctggaagtagcctgacctcttttggtaccgagacctcgaatagcggtacactacctcaatcgagtgctgtgggtagtgcattcacacaggacactcgctctctgaagacgcagctgtcccaggggaggtcgagcccgcagctcgatcccttgcggaagtccccaacgatggagcaagcagtgcagactgccagtgcacatctccccgcacccgctgccgtgggtcgaagaagcccagtctctactcggccactgccttcagccagtcagaaggcaggcgaaaaccaggaacacagaagagcagaggtgcataaagtttcccgaccggagaatgagcagcttaggaatgacaacaaacgccaggttgcccctggagcaccatctgcccctcgacgaggcagaggcggtcaccggggagggagaggcaggtttgggattcgtcgagatgggcctatgaagttcgaaaaggattttgattttgaatccgccaacgcgcaatttaacaaggaggaaatagatcgcgagtttcacaacaagcttaagctgaaggaggacaagctggagaagcaggagaaacccgtaaacggcgaagacaagggcgatagtggagtcgatacacagaacagcgagggaaacgccgatgaagaagatcctcttggccctaattgctattacgacaagacaaagtcatttttcgataatatttcttgtgacgacaatagggagcgaaggccaacatgggccgaagagaggcgactgaacgcggaaaccttcggcattcccctgcgtcctaatagagggaggggcggttaccggggaagaggaggccttggtttccgcggtgggagaggaagaggaggaggtcggggaggaacgttcaccgccccacggggtttccgcggtggcttccggggtggcagagggggacgcgaatttgcggatttcgagtaccgcaaaaccaccgccttcgggccttag

SEQ ID NO: 30253 - DNA, 2790 bp, synthetic construct
  source 1..2790: mol_type = other DNA; note = Synthetic coding sequence
atggcggaagtcgaagcagtgcagcttaaggaggaggggaatcgtcacttccagctccaagattacaaggctgcgaccaatagttatagtcaagctttgaagctgactaaagacaaggccctccttgcaacgctgtatcgaaaccgcgctgcctgtggcctgaaaacggaaagttatgtgcaagctgcaagcgatgccagtagagcaatcgatatcaacagctccgatatcaaggccctgtataggaggtgccaagcccttgaacacctgggcaaactggaccaagctttcaaggacgtccagcggtgtgccaccctcgagccacgcaatcagaattttcaagaaatgcttagaaggctcaataccagtatccaggaaaagctaagggtgcagttttcaacagacagccgagtgcagaagatgtttgaaatactattggatgagaactcagaagcggacaagcgcgaaaaggcggctaacaacctcatcgtgttgggcagagaggaagccggagcagagaaaatttttcagaacaatggcgtggcgctcttactgcaacttctggacacaaaaaagcccgaacttgtcttagcggctgtgcggaccctgtctggcatgtgttcaggacatcaggcacgggcaaccgtgatcctgcacgctgtcagaattgaccggatctgttctcttatggcagtggagaacgaggagatgtcattggccgtttgcaacttactccaagccattatagacagcctatctggggaagataaacgcgagcacaggggcaaggaagaagccctcgttcttgacacaaaaaaagatctcaaacagattacatctcatttgctcgacatgctggtaagcaagaaggtgtcgggacagggtcgcgatcaggccttaaatttactgaacaagaatgtacccagaaaggatctggcgattcatgataattctcgtaccatctacgtcgttgataatggcctgcggaagatacttaaagtggttggacaagtccctgatctgccctcctgccttcctctgactgacaacacgaggatgctggccagcattttaatcaataagttgtacgacgacctgaggtgcgatccggaacgggatcacttcagaaagatatgtgaagagtacatcaccggaaagttcgatccacaggacatggacaaaaacctcaacgctattcagacagtgagtggcatccttcaaggcccatttgacctgggcaaccagttactgggactgaaaggagtgatggaaatgatggtagccctgtgcggaagcgagagagagactgaccagctagttgccgttgaggccctgattcacgctagcaccaagttgtccagagccaccttcattattactaatggggtctcgctgttgaaacagatttataagacaacaaagaacgagaaaatcaagatacggacgttggtgggcttatgcaaactgggtagcgcgggtgggactgactacggacttagacagttcgcagaaggcagcaccgaaaaactggcaaagcaatgtaggaagtggctgtgcaacatgtctatcgacacaagaaccagacgctgggctgtcgagggtctagcctatctgactcttgatgccgacgttaaggatgactttgtgcaggatgtgcccgctctgcaagccatgtttgagttagctaaaacaagtgacaaaacaatcctgtattccgtggcaaccactctggttaactgcaccaattcctacgacgtgaaggaggtgattcctgaactggtacaacttgctaaatttagcaagcagcatgtgccggaggagcatccaaaggacaaaaaggacttcatcgatatgcgggtgaaacgactgctgaaggctggcgttatcagcgctcttgcctgcatggttaaagccgacagcgccatcttaaccgaccagacgaaggagttgttggccagagtgtttctggccctgtgtgataatccaaaggatagaggaactatcgtggcacaggggggaggcaaggccctgatcccgctggcactggaggggaccgatgttggcaaagtcaaagcagcccacgctctggcgaagattgctgcagtgtctaaccctgatatcgcattcccgggagaacgtgtgtacgaggtcgtgcgcccactcgtccgtttacttgatactcagcgtgatgggctgcagaactatgaggccctgctcggcctgactaatctctcgggcagatccgacaaactgaggcaaaaaatcttcaaggaacgcgcattaccagatatcgagaactacatgttcgaaaatcacgaccagcttcggcaagccgctacggaatgtatgtgcaacatggtgctgcataaagaggtccaagagcgcttcctggccgacggtaacgaccgtctgaagcttgttgtgctactgtgcggagaggacgacgacaaagtgcagaacgccgctgctggagccctggcaatgctgacagcggctcataagaaactgtgtctgaagatgacccaagtcacaacgcaatggcttgagatccttcagcgtttgtgcctgcatgaccagctaagtgtgcagcatcgaggactcgtcatagcctacaacctactcgcagccgatgctgagctcgcaaagaagcttgtggagtcagaacttctggagattttgaccgttgtgggtaaacaggagcctgacgagaaaaaggctgaagtagttcaaaccgccagagagtgccttatcaagtgcatggactacggatttatcaagcccgtgagctag

SEQ ID NO: 30254 - DNA, 246 bp, synthetic construct
  source 1..246: mol_type = other DNA; note = Synthetic coding sequence
atgagtcactacggttcctattacggcggactcggctattcatgcggaggatttgggggattgggttatggctacggatgtggttgcgggagtttttgcaggagaggctctgggtgcggctatggtggttatggctacggttccggctttggtggctatggttatgggtcaggattcggaggttatgggtatggttgctgtcgaccttcctataatggaggatatggcttctccggcttctattag

SEQ ID NO: 30255 - DNA, 150 bp, synthetic construct
  source 1..150: mol_type = other DNA; note = Synthetic coding sequence
atggaggtcccgaggttggatcatgcactgaactccccgacatccccatgtgaagaagtcattaagaatctctcacttgaggcaatccaactgtgtgaccgcgatgtcgttttcgaggaactgactagcaagcagactcgcaaaggctag

SEQ ID NO: 30256 - DNA, 498 bp, synthetic construct
  source 1..498: mol_type = other DNA; note = Synthetic coding sequence
atgagccggtatctgcgcccacccaacactagcctgttcgtcaggaacgtggcggacgatacacgcagcgaagatctcaggcgggagtttggacgctacggacccatagttgacgtatacgtgcctctggatttttacacccggcgacctcggggtttcgcatatgttcaattcgaagatgttcgtgatgccgaggatgctttgcataatttggatcgcaaatggatatgcggtcggcagattgagattcaattcgctcagggggatcgaaagacgccgaatcagatgaaggccaaggaaggcagaaacgtctattcttcctctcgctacgacgattacgataggtataggagaagcaggagtagatcttatgagcgccgtcgcagtcgctctagatcctttgactacaactacagacgctcgtatagccccaggaagccgaactgttcgtggaacacccagtattcaagcgcatattacacaagtaggaagatctag

SEQ ID NO: 30257 - DNA, 1803 bp, synthetic construct
  source 1..1803: mol_type = other DNA; note = Synthetic coding sequence
atggcatctaatcacaaatcctctgcagcccgtcctgtatctcgtggtggagtcggactgaccgggcgaccaccctccggtatccgacccctctccgggaatatcagagtggctacggctatgcctccaggcacggcacgcccagggagccgcggatgcccgataggcactgggggagtgctatccagccagatcaaggtggctcataggccagtgacccaacaggggctgaccggaatgaaaacaggcaccaagggccctcaaagacagattcttgacaagtcttactatctcgggcttctgcgttccaagatttctgaactcaccactgaggtgaataagttacaaaagggcatcgagatgtataaccaagagaactccgtctacctgtcttacgagaaacgggcagagacactcgcagtagaaatcaaggagttgcaaggccagctggccgattataatatgctggtagacaagcttaatactaataccgaaatggaggaagtgatgaatgactataatatgctcaaggcccaaaatgaccgcgagacccagtccctggacgttatcttcacagaacgccaagccaaggaaaaacagatcagatcagtagaggaagagatcgagcaggaaaaacaggcaacggatgacattattaaaaatatgtcatttgaaaatcaggtgaagtacctcgaaatgaagaccacaaatgagaagctcctgcaagagttagatacgctgcagcagcagctggattcacagaatatgaagaaagagagtctagaggccgagatcgctcactcgcaggtcaaacaggaagctgtacttctgcacgagaaactctacgaactggagtctcacagagaccaaatgattgctgaggataagtccatcggctcacccatggaggaaagggagaagctgttgaagcagataaaggatgacaatcaagagatcgcctccatggaacgacagttgactgacaccaaagagaaaataaatcagttcatcgaggagataagacagttagacatggaccttgaagaacaccagggcgagatgaatcagaaatacaaggagttgaaaaagcgcgaagaacatatggataccttcattgagacttttgaagagaccaagaatcaagaactgaaaagaaaagctcagattgaggccaacattgtcgctttactggagcactgttccagaaatatcaacagaattgagcagatctcaagtataaccaaccaagaactgaagatgatgcaagacgatctgaatttcaagtccacagaagtgcaaaaatcccagtccactgcacagaacctcactagcgatatacaaagacttcagcttgatctgcaaaaaatggagctgctggaaagcaaaatgacagaggaacagcacagcctgaagtcgaaaataaaacaaatgacaacggatctggagatatataatgatctgccggcactgaagagttctggagaggaaaaaatcaaaaaactacaccaggaaagaatgatcctttctacgcacagaaatgctttcaaaaaaataatggagaagcaaaacatcgagtatgaggcgctaaagacccagcttcaagagaatgagacacattcacaattgacaaacctcgaaaggaagtggcagcacctagagcagaataatttcgccatgaaggaattcattgcgacgaaatctcaggagagcgactatcaacccattaaaaagaacgtgacaaaacagatcgcagaatataataagacaatcgtggacgctttacacagcacatcggggaattag

SEQ ID NO: 30258 - DNA, 465 bp, synthetic construct
  source 1..465: mol_type = other DNA; note = Synthetic coding sequence
atggtctccagcgcacagatgggctttaacttgcaagctctgctggaacagctgagtcaggatgagcttagcaaattcaaatacctgatcaccactttctctctggcacacgagctgcaaaagattccccacaaggaggttgataaggctgacggtaagcaactggtggaaatcctgacgacacactgtgattcttattgggtagagatggccagtctgcaagtctttgagaaaatgcatcgaatggacctcagtgaacgcgcaaaagacgaggttcgggaggccgcactgaaatctttcaataagcgcaaaccccttagcttgggaattaccagaaaagaacgaccaccactcgacgtggatgagatgctggagaggttcaagacggaagcccaagctttcactgaaacgaagggcaacgtgatatgtcttggaaaagaggttttcaaaggcaaaaaaccttag

SEQ ID NO: 30259 - DNA, 474 bp, synthetic construct
  source 1..474: mol_type = other DNA; note = Synthetic coding sequence
atggccacctcagctcctctgcggagcctggaagaagaagttacgtgttcaatttgtctggactatctgagagatcccgttaccatcgactgcgggcacgtattttgccgatcatgcactacagatgttcgaccaatcagcggaagcagaccagtgtgccccttatgtaagaagccattcaagaaagagaacatccgtccagtgtggcagttggctagcctggttgaaaacatcgagcgcctgaaagtagacaaggggaggcagccaggagaggtgacacgcgagcagcaggatgctaagctctgcgaaagacatcgagaaaaactgcactactactgcgaggacgacggcaaattactttgtgtcatgtgtagagagtcgagagaacatagaccgcatactgccgtcctaatggagaaagcagcccagccccaccgggaaaagatcttaaatcatctgtcaacattgagatag

SEQ ID NO: 30260 - DNA, 348 bp, synthetic construct
  source 1..348: mol_type = other DNA; note = Synthetic coding sequence
atgcctcacttgccgctcgcatccttccgccctcccttctgggggcttcgacacagtcggggattgcccaggtttcatagtgtttccactcagtctgaaccgcacggctcccctatctctagaaggaatcgtgaggccaaacagaagcgattaagagagaagcaggccactctggaggccgagatcgccggagagtccaaatcccccgctgagagtattaaggcctggcgccctaaggagttggttctctacgaaataccaactaagcctggcgaaaagaaggacgtttccggcccactgccgccagcttattcgcccagatatgtcgaagccgcatggtatccctag

SEQ ID NO: 30261 - DNA, 432 bp, synthetic construct
  source 1..432: mol_type = other DNA; note = Synthetic coding sequence
gtgagggagctggaggcagagttagacgctgaacaaaagaagcacgctgaggctttaaaaggggtgcgcaagcacgaacgccgagtgaaagaactggcgtaccaggttggcgatagagtctctctggggagcggtcccggtgcgggacccgctcaggcgtcacccgaaagccccctgccggctcaggcggaggaggaccgcaagaaccttgctagaatgcaggacctggttgataagcttcagagcaaggtcaagtcatataaaagacagtttgaggaggccgagcagcaggccaataccaatttagcaaaataccggaaagcccaacacgagcttgacgatgcagaagagcgcgcagacatggctgagacccaagccaacaaattgcgggctcgcacacgggatgcactcggaccaaagcataaggagtag

SEQ ID NO: 30262 - DNA, 828 bp, synthetic construct
  source 1..828: mol_type = other DNA; note = Synthetic coding sequence
atgagtaccataggcagctttgaagggttccaggcagtgagtcttaaacaagagggagacgaccagccttcagagacagaccatctcagcatggaagaagaggacccaatgccgaggcagatctccaggcaaagctcagtcaccgaatccacattatacccaaacccttatcaccaaccctatataagtaggaagtatttcgccacccggccaggagcaattgaaactgcaatggaggatctgaaaggacacgttgcagagaccagtggcgagaccatccaaggattttggctcctgaccaaaatcgatcattggaacaacgagaaggaaaggatcttactggtgaccgacaaaacactgttaatttgcaagtatgattttatcatgttgagctgcgtgcagctgcagaggatccctctgagcgcggtgtaccggatctgcctgggaaagtttacgttccccggaatgtctctggacaaaaggcaaggggaggggcttcgcatttattgggggtccccagaagaacagtccttgctgagcaggtggaatccatggtcaaccgaagtgccctacgcaacctttacagaacaccctatgaagtacacaagcgaaaagttcctcgaaatctgtaagctgtccggttttatgtctaaattagtgcccgcaatccagaatgcccataaaaacagcactggttccggaaggggcaagaagctgatggtcctgaccgagccgatactaatagaaacctacaccgggttaatgtcattcatcggtaatagaaacaagcttggatatagcctagctcggggatctattggcttctag

SEQ ID NO: 30263 - DNA, 339 bp, synthetic construct
  source 1..339: mol_type = other DNA; note = Synthetic coding sequence
tgatgcgctagaactgcaggcggatgcctgggatgcttgagcggtcagtgttgttgccgcctgtgtccgctaaccctccccgctactcgttccctttgtcctggcagagtcgtttgggccagacgcagatggtggccttcttggctcgcctggagatgcttatggtgtacaacccgaccccctgcttgtatggagaatactgatgcattcctgttcctgttttccttcacggaccgggcatcgtttgaagacctccctggtcaactagcacgcatcgctggggaggctccaggtgtggtgcggatggtcatcggaagcaagtttgaccagtatatgtag

SEQ ID NO: 30264 - DNA, 3330 bp, synthetic construct
  source 1..3330: mol_type = other DNA; note = Synthetic coding sequence
atgggaacgggagattttatatgcattagcatgacaggtggagctccttggggctttcgcctccaaggtggcaaggagcagaagcagccattgcaagttgcaaaaataaggaatcagagcaaagcgtccgggagcggactctgcgagggagacgaggtggttagcataaatgggaatccatgcgcagatcttacatatccagaagtcataaagttaatggagtcaattaccgactccctgcagatgctgatcaaaagacctagctcaggaatctcagaggcgctcatctccgagaacgagaataagaacctcgagcacttaacccatggaggctacgtcgagtccactaccctccaaatccgacccgcaacgaagacccagtgtactgagtttttcctcgcacccgttaagacggaagtgcctttggccgaaaaccagcggtctgggccagactgcgctggatccctcaaagaagaaaccggaccatcctaccaaagagctcctcaaatgcccgacagccagcggggtagggttgccgaagaactcatcctgagggaaaaagtcgaggccgtccagccaggacctgtagtcgagctccaactttccctgagccaggagcgccacaagggcgcttcaggtccactggtggcactgccaggagcggaaaagtctaaatctccagacccggaccctaacctgtcacacgatcgcatcgtgcacatcaattcaatccccaccaacgaaaaagctgatccatttcttcgtagctccaagataattcagatctcaagcgggcgtgagctgcgcgttattcaggagagcgaagcaggcgacgcagggctgcctcgggtcgaggttattctggattgttctgaccgccagaagacggagggctgccgactgcaggctgggaaagaatgcgtggattcgcctgtggaaggcggtcaatcggaagctcccccttctctggtcagtttcgcagtttcaagcgaagggacagaacagggtgaagacccccgttctgaaaaagatcactcccgaccgcacaagcaccgagccagacatgccaggctacgacgatccgagtccttaagtgaaaagcaggtgaaggaagcaaaatccaagtgtaaatccatcgcactgctgctgaccgatgcaccgaaccccaatagcaagggcgtgctcatgtttaagaaaagaagacgccgagctaggaagtatacgctagtgtcgtacggcacgggggaattggaacgggaagcagatgaggaagaagagggggataaggaagacacatgcgaagtggccttccttggtgcatctgagtccgaggtcgatgaggaactgctttcggacgtggacgacaatacgcaggtcgtgaattttgactgggattcagggctggtcgacattgaaaagaagctgaatagaggcgacaagatggagatgctacctgacactacaggcaagggcgcattgatgttcgcaaagaggcgtgagcgtatggaccaaatcactgcccagaaagaagaagataaagtcggtggtacaccaagccgtgagcaggatgcagcgcagaccgacggtctgagaactaccaccagctatcaaagaaaagaagaagagtccgtgcggacacagagttcagtctcaaagtcctacatcgaggtttcccatgggctcgggcacgtcccccagcagaatggattttccgggacaagtgagactgcgaacattcagaggatggtaccaatgaaccgcactgcaaaaccttttcctggatccgtgaatcagccggctacacctttcagtcccacgcgaaatatgacttcccccatagcagatttccccgctccacccccatacagcgccgtgacccctccaccggatgctttcagcagaggcgtgtccagcccgattgctggccctgctcagcctccaccctggccccagcctgcaccatggtcgcagccagccttttatgacagctctgaaagaatcgcgagcagagatgaaaggattagcgtcccggcaaaaagaactggcatactgcaggaggccaagagaaggagcaccactaaacctatgtttactttcaaagaaccaaaagtttcccctaatccagagcttctctccttgctacagaactccgagggaaagagagggacaggcgcagggggagactcaggcccagaggaggattacctctcactgggtgccgaggcctgcaatttcatgcagtcctcaagcgccaagcaaaagacgcctcctcccgtagcacccaagccagccgtcaagagctcatcttcccagcctgttacacccgtctctcctgtttggagtcctggtgtggcacccacacagcctccagccttcccaacctctaatccttccaaggggacggttgtatctagcatcaaaatcgcccaacccagctatccgccagctcggcctgcatcaacactgaacgtggccggtccattcaagggccctcaggccgcagtggctagccaaaactacacgcctaagccaactgtgagtaccccaactgtgaacgccgtccagccgggagccgtcggccctagcaacgaacttcctggcatgagtggtcgcggagcgcagctattcgcaaagcggcagtcccgtatggaaaagtatgtggttgacagcgacactgtgcaagctcacgcggctagagcccagagtcctacccctagccttcctgcaagctggaaatattcctccaatgttcgtgcgccaccaccagtggcttacaaccccatccacagtcctagttacccattggctgccctgaaatctcagccctctgcggctcaaccctccaagatgggtaaaaaaaaaggcaagaaaccgttaaacgctctggacgtgatgaaacatcagccctatcagctcaatgcatccctcttcacattccagcccccagacgctaaagacggtctgcctcagaagtcaagcgtgaaggtcaatagcgcactggccatgaagcaggcgctgccaccccgtcccgttaatgccgcttcaccaacaaatgtgcaggcttcctctgtttattctgtcccagcatataccagccccccaagcttctttgctgaagccagctcccctgtttccgcctctccagtgcccgtcggcatacctacatctccaaaacaggaaagcgcttcatctagctacttcgtagcgccacggcctaagtttagtgcgaagaaatctggggtgacaatccaggtgaagtgcaagtctggcatccacagccaggacataattcggacctatttccctgcatacctgtcaagttctacctag

SEQ ID NO: 30265 - DNA, 1554 bp, synthetic construct
  source 1..1554: mol_type = other DNA; note = Synthetic coding sequence
atggagacggacctgaactcccaggaccgcaaggaccttgacaaatttataaaatttttcgcactcaaaaccgtgcaggtgatcgtacaagcacggctgggcgaaaaaatttgcacccgctcctcttcatcgcccactggcagcgactggttcaacctggccatcaaggatatcccggaggttactcatgaggccaagaaagctctggccggtcagctccctgcggtcgggaggtccatgtgtgtagaaatctccctgaagacctcagagggagatagtatggaactcgagatttggtgtctggaaatgaacgaaaagtgcgacaaggaaattaaggtatcatacacagtgtataaccggctcagcctcctgctaaaaagccttttggccatcaccagagtgacgcccgcataccgcctttcacggaagcagggacatgagtacgtaatcctctataggatctactttggggaagtgcaattgtctgggctgggcgaaggcttccagacagtgcgagtggggacagtcgggacgcccgtgggaacaatcaccctcagctgtgcctacaggattaaccttgcgtttatgtcaacaagacagtttgaacgcacgccgccaatcatggggattatcatcgatcatttcgtggatagaccttacccttcctcctctccaatgcacccttgcaattatcgaacggctggagaggatacaggtgtaatctatcctagtgtggaggattcgcaggaggtgtgcaccactagtttttcaaccagccccccaagccagctctcttcgtccaggctcagttaccagcctgcagccctcggagtaggtagtgcagacctggcttaccccgtggtttttgccgctggcttaaacgccacgcaccctcaccagcttatggtgccaggcaaagaaggcggagttcctctagcccctaaccagcccgtgcacggcacacaggccgatcaggagaggctggctacgtgcacaccgagcgatcgtactcactgcgctgcaaccccctcctctagtgaagacactgagacagtctccaatagctctgaaggtcgcgcaagtccacacgatgtcttggaaacaatattcgtgcgcaaggttggggcttttgtgaacaagcctatcaaccaggtcactttgacatctctcgatataccttttgctatgttcgccccaaagaacctcgagctcgaggatacggaccccatggttaatcctcctgattctcctgagactgagagccctctgcagggaagtctccattccgatggatcttcaggcggaagtagtgggaacacccatgacgattttgttatgattgacttcaagcctgccttctcaaaggacgatatcctgcccatggatctcggaactttttatagggagtttcagaacccccctcaactttcttcactgtctattgatatcggggcacagtctatggccgaggacctggattcccttccggagaagctcgctgtgcatgaaaagaacgtgagggaatttgacgcatttgttgagactctgcagtag

SEQ ID NO: 30266 - DNA, 348 bp, synthetic construct
  source 1..348: mol_type = other DNA; note = Synthetic coding sequence
atgccacatctccctctggcctcattcaggcccccattctggggactgcggcatagtagaggcctcccacgattccatagcgtcagcacacagtccgaaccccatggctcaccgatctctaggagaaacagggaggcgaagcagaagcgtctaagagagaagcaggccacattagaggcggagattgccggtgagagcaagtccccggcagagagcattaaggcatggagaccaaaggagctggtgttatatgagattcccaccaagccaggcgaaaagaaagacgtctctggacctctaccacccgcatactctcccaggtacgttgaggctgcttggtatccctag

SEQ ID NO: 30267 - DNA, 1014 bp, synthetic construct
  source 1..1014: mol_type = other DNA; note = Synthetic coding sequence
atggagttgaagaccctgtgggagaataagctcatgcagtcccgtgcagtagacggcttccactctgaggaacagcagctgttactccaggtccagcagcagcaccaaccccagcagcagcagcatcaccatcatcaccatcaccagcaggcccagccgcaacaaaccgtgcctcagcaagcccagacacagcaggtgcttataccagcttcgcagcaggccacggcgcctcaggtaattgtgccagacagtaagctcatccagcacatgaacgctagtaacatgagcgccgcagctaccgccgctactctagccctgccagctggagtgaccccggtccaacaaattctgacaaactcaggtcaactcctacaggttgtgagagctgcaaatggggctcaatatatttttcagccacagcagagtgtggttctgcagcagcaggtgatacctcagatgcagcccggaggagtgcaggcccctgtgatccaacaggtcttagcaccactgccaggcggaatctccccacagaccggggtcattattcagccccaacagatattgtttaccggaaataaaacccaggtcattcccactacagtggccgctcccacacccgcacaggcgcagattacagcaaccgggcagcagcagccccaggcccaacctgcccagactcaggcacccctggtcctgcaggtagacgggacaggagacacttccagcgaggaggacgaggacgaggaggaggactatgatgacgatgaagaggaggacaaggaaaaggacggggctgaagacgggcaggtggaggaggaacccttgaactccgaggacgatgtctctgacgaggaggggcaagagctgtttgacaccgaaaatgtggtggtgtgccagtatgataagattcaccggtccaaaaacaagtggaaatttcatctcaaggacgggattatgaatctgaatggccgtgattacatattttccaaagccattggagacgctgaatggtag

SEQ ID NO: 30268 - DNA, 3012 bp, synthetic construct
  source 1..3012: mol_type = other DNA; note = Synthetic coding sequence
atgtcacagtggactccagagtataacgagctctacacattgaaggtcgatatgaagtccgagattccatccgacgcccctaaaactcaggaatcactgaagggcattctcctccatcctgagccgattggcgctgccaagtccttcccagcaggggttgaaatgataaattcaaaagttggcaatgaattctcccacctctgcgatgactctcagaaacaagagaaagagatgaatggcaatcagcaggagcaggaaaagtctttggtggtgagaaagaaacgcaagtcgcaacaggccggaccaagctatgtgcagaactgtgtgaaagaaaatcaaggcatcttgggtctccgacagcacttgggcaccccgtctgatgaggataacgactcctctttcagtgactgccttagctctccatctagttccctccattttggagattctgataccgtcacatccgatgaggataaagaagtgagcgtgagacatagtcagactatactgaatgccaaatcacgatcacactccgcacgcagccacaagtggccgcgaacagagactgaatcggtgtctgggcttctgatgaagcgaccatgcctacacggcagcagcctgagacgcctgccatgcagaaagaggttcgtaaagaataactctagtcagcgcacccaaaaacagaaagagcgaattctaatgcagcgcaaaaaacgagaagtcctggccagaagaaaatatgccctgttgcccagttcttccagctcctctgagaatgacttgtcttctgaatcgagtagctcctcatctacggagggcgaagaagatctcttcgttagcgcttccgaaaatcatcagaataatcccgctgttccatccggcagcatcgatgaggacgtggtggtcattgaggccagcagtacaccgcaggtgaccgcaaatgaagagattaacgtgacttccacagattctgaggtggaaatagtgactgtaggagaatcttatagatcaagatctactctgggacacagtcggagccattggagccagggtagctccagtcatgcatcgcgcccacaagagccgaggaatagaagcaggatcagtacagtgatccagcccttaaggcaaaacgcggctgaggtcgtagacctcaccgtggatgaggacgaaccaactgtggtgcccactactagtgcccgaatggaatctcaggccactagcgctagtatcaacaacagtaatcccagcactagtgagcaggccagcgacacagccagcgcagttacctcatcccagcctagtaccgtgtccgaaacatccgctacattgacgtcaaacagcaccactggaaccagcatcggagacgattcaagacgtacaacctcttctgccgtgacagaaaccggacccccagccatgccgcgattgccatcatgttgtccgcagcactctccctgcggagggtcctcacaaaaccatcatgcgttaggacacccgcacacaagttgcttccaacagcacggtcaccactttcaacaccatcatcaccaccaccatacccctcacccagctgtgccagtgtcgccttccttctccgaccccgcatgccctgtcgagaggccccctcaggtccaggccccatgcggggcaaactcttcttcaggaactagctaccacgaacagcaagctctacccgtagatctgagtaattcgggtattaggtcccacggttctggatcgttccatggcgcatctgccttcgacccatgctgccccgtgtcaagttcgcgggctgctatcttcggacaccaggcagctgcagccgcaccctcgcagcccctgagtagcatcgacgggtatggctcatccatggtagctcagcctcagccccaacccccacctcagccctccctgtctagttgtcggcattatatgcccccaccttacgccagcctgaccagacccctgcaccaccaggcctccgcgtgcccccattcccatggcaatcctccccctcagacccaacccccacctcaagtcgactacgttataccgcaccctgtgcacgcgttccactctcagataagtagtcacgccacaagtcaccctgtggcccctccaccccctactcatctggcctcaactgctgcaccaattcctcagcatctcccacccacccaccaacccatttctcaccatattcctgctactgctccgccagctcaacggttgcatcctcacgaagtcatgcagagaatggaggtccagagaaggcgaatgatgcagcacccaaccgggctgttcgtgttctgcgtgagccgcagggcgcatgaacggcctccaccgcaccctcacaggatgcaccccaattacggacatggtcaccatattcacgtcccacaaaccatgtcctcccaccctagacaggccccagagaggtcagcctgggagctggggattgaggccggtgtaactgccgctacctacacccctggcgcactccacccccatctcgcccactaccacgctccgccacggttgcaccatctgcagctcggcgctctgcctctcatggtgccagatatggccggatatccacacatcagatacataagctccggactggatgggacgtccttcagagggccttttcggggtaactttgaggagttaattcacctggaagagcgcctgggaaacgtcaatagaggagccagtcaggggaccatcgagaggtgtacgtatccacacaaatacaagaaagtcaccactgattggttcagccagcgaaaactgcattgtaaacaggatggggaggaggggactgaggaggacacagaagagaaatgtacaatttgtctgtccatccttgaggagggtgaagacgtccgcaggttgccttgtatgcacctattccatcaggtttgtgtggaccagtggctgatcacaaataaaaagtgcccaatttgtagagtggacattgaagctcagctgccctcagaatcttag

SEQ ID NO: 30269 - DNA, 3309 bp, synthetic construct
  source 1..3309: mol_type = other DNA; note = Synthetic coding sequence
atggctgaaaaggaggccagacgtaagtttaagcaaatcgttaccgcagtttacttctgtcattgtagaaatattgttcatcgggatttaaaagcggagaatttacttcttgacgccaatcttaatatcaaaattgccgacttcgggttctcgaacttgttcacaccaggacagttattgaaaacttggtgtggctcccctccgtatgccgcacctgagttgtttgagggaaaagagtacgacgggccaaaggttgacatctggtcgttaggggtggtgctctacgtgctggtgtgtggagctcttccgttcgatgggtccaccctccagaacctgagagctcgcgtgctgtccgggaagtttcgcataccgttcttcatgtctactgagtgcgagcatctgatcaggcacatgcttgtcctggaccccaataaacggctgagtatggaacagatctgcaagcacaagtggatgaagctcggagatgctgaccctaacttcgaccgtctgattgctgagtgccagcagctcaaagaggaacggcaggtggaccctttgaacgaagacgttcttctggccatggaagatatgggtctggataaggagcagaccttgcagtcacttcgaagtgacgcctatgaccattactccgccatctacagcctgctctgtgacagacacaaaaggcacaagaccctcaggctaggagcccttccatccatgccacgggctctggcttttcaggctcccgttaacatccaagcagaacaggcgggtacagcaatgaacattagtgtccctcaggtgcagttaataaaccctgaaaaccagattgttgagcctgacggtacgctgaacctggacagcgacgaaggcgaggagccatccccagaggctcttgttcgctacctctccatgcgacgccatacagtgggagtggccgacccacggactgaggtgatggaagatctgcagaaacttctgcccggtttcccaggtgtcaaccctcaggccccttttctgcaggtagcacccaatgtgaacttcatgcataacctgctgcccatgcagaacctgcaaccaacggggcagttagagtataaggaacagtcattactccagcctccaactctgcaattactcaatggcatgggccctctgggccgacgggcatccgatgggggagccaacatccagctgcatgctcaacagctcctgaagaggccgcgaggtccgtcgccactcgtgaccatgacacccgctgtgccagccgtgactccagtggacgaggaatctagcgacggggagccagaccaggaagctgtccagtcatctacatataaggattccaacaccctgcatctgcccacagagagattttctcccgtacgccgttttagcgacggcgcagccagtattcaggcttttaaagcacacctggaaaagatgggcaacaattcatccattaagcagctgcagcaagagtgtgagcaactgcagaaaatgtacggagggcagattgacgaaagaacactagaaaagacccagcagcagcacatgttgtatcaacaggagcaacatcaccagattcttcaacagcaaattcaggactcaatctgcccaccacagccgtcacctcccctacaggctgcttgcgaaaaccagccggctctccttacgcaccagctgcagaggctgcgtatccaaccaagctcccctcctcctaatcatccaaacaaccatttgttcaggcagccatccaactcaccgcctccaatgagctctgcaatgatccagccgcacggagctgcctcaagctcacagtttcagggcctgccctcccgctctgccatcttccaacaacagccagagaattgtagttccccccctaatgtagccttaacctgcctcggtatgcaacagccagcccagagccagcaggtgactatccaggttcaagaacctgtggatatgctgtctaatatgccagggacggccgcaggatcatccgggagaggtattagcatctcaccatctgcaggacagatgcagatgcagcatcggacaaacttaatggccaccttgagttatgggcataggccgctgtccaagcagctgagcgccgattccgctgaagcccatagcgcacatcagcaaccaccgcactataccacatcagctttgcagcaggctctgctgtcccctacaccacctgactataccagacatcaacaggtcccccatattttgcaagggttactgtcgccacggcactctctcaccgggcacagtgacatcagactgcccccaactgaattcgcccaactcatcaagaggcagcagcaacagaggcagcaacagcagcagcagcaacagcaacaggagtatcaagagctctttaggcacatgaatcagggtgacgccggatccttagccccatccctggggggacagagcatgactgaacggcaggcactaagctaccagaacgcagattcttaccaccatcacacctcaccacagcatttactgcagatccgagctcaggagtgcgtctcccaggccagcagtcccacacccccacacggctatgcccatcagcctgccctaatgcacagcgaaagcatggaagaggactgctcttgtgaaggggctaaggatgggtttcaggattcaaagagtagctccaccttaacaaaaggatgtcacgatagccctttacttctgagcaccggcggacccggtgatcccgaatccttactcgggactgtcagtcacgcccaggagctgggcatacacccttatggccatcagcccacagcggcattcagcaagaacaaagtgcccagcagggaacctgtaatcgggaactgtatggataggtctagtccgggacaggctgtcgagctgcctgatcataatggactgggttatcctgctcgtccttctgttcacgagcaccaccgtccaagagcattgcagcggcaccacaccattcagaattctgatgatgcttatgtgcagctggataacctgcctggaatgtctctcgtcgctggcaaagcactgagctctgcccgtatgtcggatgctgtactatcacaatcctccttaatgggaagccagcagttccaggacggagaaaatgaggaatgcggcgcaagtctgggcggacacgaacatcccgacctgtccgatggcagccaacacctgaacagctcatgctacccgagtacttgcataaccgacatactgttatcttacaagcatccggaagtctctttttccatggaacaggcgggtgtatag

SEQ ID NO: 30270 - DNA, 1461 bp, synthetic construct
  source 1..1461: mol_type = other DNA; note = Synthetic coding sequence
atgacgctaatggtccttacgtttagctcatatatcctggattttatcaacgttctgagctatgatttgcatggatcgtgggagagatttactggccacaacagcccgctgttctccctcccagaggatcccaaaagcagtgcttacgcaatgaactactggagaaagctgggagctcctagtgagaaactgatcatgggcatccctacgtacggacggacctttcgactgctcaaagcatcaaaaaacgggttacaggctagggcaatcgggccagctagccctggcaagtacaccaagcaggaaggcttcctggcatactttgagatttgcagcttcgtttggggtgccaaaaaacactggatcgactaccagtacgtgccttatgcaaacaaaggcaaggagtgggtgggatatgacaatgccatcagcttttcctataaggcttggttcataaggagggaacattttgggggtgctatggtgtggactctggacatggacgatgtgaggggcacattttgtgggacgggtccttttcctctagtttatgtcctgaacgatatcctggtgcgcgctgagttttccagtacctcattgcctcaattctggctctccagtgccgtcaacagcagcagtactgacccagagcgattggcagtgaccacagcctggaccaccgactctaagatcctgcccccagggggtgaggccggtgtgaccgaaatacatggcaagtgcgagaatatgaccatcacaccacggggaactacagtcaccccgaccaaagaaacagtctctctcgggaaacacacagtagccctgggagaaaagaccgagatcactggtgcaatgaccatgacaagcgtgggccaccagagcatgacaccgggtgaaaaagcccttaccccagttgggcatcaaagtgtcaccaccgggcagaagaccctcacatccgtggggtaccagtccgttactccaggcgagaagacactgactccagtcggccaccaaagtgtcactccagtcagccaccaaagcgtgtccccgggaggaactacaatgacacctgttcactttcaaactgaaaccttaagacaaaataccgtagcacctcgcaggaaagcagtggccagggagaaggttaccgtgccctctagaaacataagcgtgactccagagggtcagacaatgcctctccggggagaaaacctgacttctgaggtcggcactcacccacgcatgggtaatcttggcctgcaaatggaagccgagaatcggatgatgctttcgtcatctcccgtgattcagctgcctgaacaaactcccctggcctttgataatagatttgtaccgatatacggcaatcattcctccgtgaactccgttacgccccagacatctccgctatcacttaaaaaggagattccggaaaatagcgccgtcgatgaggaggcctag

SEQ ID NO: 30271 - DNA, 1017 bp, synthetic construct
  source 1..1017: mol_type = other DNA; note = Synthetic coding sequence
atggagctctggggcaggatgctgtgggctttactgagcggacctggacgcagaggctccacacggggttgggccttcagctcttggcagcctcagccgccattagctggattatcttcagcgatcgagctagtgtcacactggacaggggtttttgagaaacgaggtatccccgaagccagagagtccagtgaatatattgtggcccacgtattaggcgctaaaacttttcagtctctgagaccggctttgtggactcagcctcttactagccagcagttacagtgcatacgtgagctgtcctcccgcagactgcagcggatgccagtgcagtacattttgggggaatgggactttcaggggctaagtctgaggatggtgccacctgtcttcatccccaggcccgagacggaagaactcgtggagtgggttctggaggaagtggcacagcgatcacacgccgttggctccccaggaagtccactgatcctggaagttggctgcggcagcggagccatcagtttaagtcttctaagtcagctgccccaaagccgggtgatagcagtggacaagagggaagcagccatctccctgacacatgaaaatgcccagaggttgaggctgcaggatcgcatttggatcatacaccttgatatgacgtcggagcggagttggacgcatctgccttggggccctatggacttaattgtctctaaccctccatacgtgtttcatcaggacatggaacagctagcacctgagatacgatcttacgaagatccagcagctttggatgggggagaggaaggcatggacataatcactcacatcctggctctggcccctcggctgctgaaggactctggcagcattttccttgaggtggaccccagacacccggaattggtgagttcttggttgcagtcacgtcccgacctatatctcaacctggtggctgtaaggagggatttttgcggtcgccctcgattcctgcacattaggaggagtgggccttag

SEQ ID NO: 30272 - DNA, 1899 bp, synthetic construct
  source 1..1899: mol_type = other DNA; note = Synthetic coding sequence
atggacactatgatgctgaacgtccgcaatctctttgagcagctcgttcgtcgggtggaaattttatctgaaggtaatgaggtccagttcatccaactggccaaggattttgaggattttcgtaagaagtggcagcgcacggaccatgagctgggcaagtacaaggatctgctgatgaaagccgagacagaacgatctgcattagatgttaagctgaagcacgcccgaaaccaggtggatgtggaaattaagaggaggcagagggcggaagccgactgcgagaagctggaacggcagatccaactcatcagggagatgttgatgtgcgatacctcaggaagtatacaactatccgaagaacagaagtcggcattggcctttcttaaccgagggcagccctcgagcagcaacgcaggcaataagcgtctgtctaccattgatgagtccgggtcaattctttctgacatttcctttgataagacggacgaatctctggattgggactcttctctcgtgaagactttcaagctgaaaaagcgtgagaagagacgctctacaagtagacagttcgttgatggcccacctggaccagtgaaaaaaacccggtccataggttctgctgtcgaccaggggaatgagtctatcgtcgcgaagaccacagtgactgtgccaaacgacgggggtccgattgaagctgtgtccacaatcgaaacggtgccttactggacccgatcacgtcgcaaaacgggcacgttgcagccttggaattctgatagcaccttaaactcgaggcagctggagccgagaaccgagactgattctgttgggacgccccaatcgaatggcggtatgagactgcacgacttcgtatccaaaaccgttattaagcctgaaagctgtgtgccttgcgggaaaaggattaagtttggcaagctgagccttaagtgcagggattgccgagtggtgtcccatccagagtgtcgggaccgatgtcccctgccttgtatccctacgctgatcggtactcccgtgaaaatcggcgaggggatgctggcggatttcgtttctcagacttccccgatgattccaagtatcgttgtgcactgcgtgaacgaaattgaacagagggggctgactgagaccgggttgtacaggatatcagggtgcgaccgcacagtcaaggagttaaaggaaaaattcttaagagtaaagaccgtccccctgttgtcaaaggtcgatgatatacacgctatctgctctttacttaaagacttcctgcggaatctgaaagaaccattgctgacgttcaggctaaatcgagcatttatggaagccgctgaaattaccgacgaggataacagcattgctgccatgtatcaggctgtgggggagttgccgcaggctaatcgcgatacacttgcctttctgatgatccatctacagcgcgtggcgcagtccccccatacgaagatggacgtggccaatttggccaaggtttttgggccaactatcgttgcacacgcagtgcccaatccagatccagtgaccatgcttcaagacattaagaggcagcccaaggtggtggagcgcctgctctctctgcctctggagtattggtcgcagtttatgatggtagaacaggagaatattgatcccttacacgtgatcgaaaattctaacgcttttagcaccccacagacccctgacattaaggttagcttactgggccctgtgaccacccccgagcatcagttgctgaagacaccgtctagctctagtctctcacagcgcgtccgttcaacattaacaaagaacacccccaggtttggatccaaatccaagagcgcaacaaatttgggaagacaaggaaatttttttgcctcccccatgctcaagtag

SEQ ID NO: 30273 - DNA, 1791 bp, synthetic construct
  source 1..1791: mol_type = other DNA; note = Synthetic coding sequence
atgagtaaccagcaggagaagtacgaggctcagaatatcgtcaacagtacagaagaatccgatgacgccttcgataccgtcactattcccgtgccttctgaggagccacaggaaagtgaccagactgaggaacatgagtccgggatcgaacagtttagcgaatctcatgcgatccacgttgaagaacagagcgatcagtcattctcctcactagagcctgataatgagcagctcatggaagaggtgatttctccccgacaggtgtcatacactccacagcatcatgaaaagcagtacgctatgcagcgcccaaacgacgattccctcgcttttctggacaagatcaagagtgttaaggaatcccttcaggagagtgttgaagactcacttgcgaccgtgaaagtggtgctgatacctgtaggccaggagattgtgattcccttcaaggtagacacaattctgaaatatctgaaagaccacttctctcacctgctggggataccacattcagtactccagatccgctacagcggcaagatactaaagaacaatgaaacactggtgcaacacggagtcaagccacaggagatcgtccaggtggaaatctttagcactaaccccgacctgtatcccgtaagacgcatcgacgggctgactgacgtgtcccagattataacggtgaccgtccagaccggcctggaccagtaccaacaggtcccagtcgaaattgttaaatcagactttcacaaaccattcttaggtggctttcggcataaagtgacaggcgtggaataccacaatgcaggcactcagacagttcctaagcggatacctgagcgcttatccatattttgcagggatacacaaaccgtgtttcaaaagaagaacttgcaacaaacaacaaacacaacgagtacacagatgaccaatatcggtgtctatgtgagcaacatgacggacaagctcgtaaccccaggaaagtacttttccgccgctgaatatcatgcccaaaggctgaaggccgtgatcgtcattcaaacttattaccgacaatggcacgccaagatattcgttgaaaatctacggagacagaaatccttgaggctcgaatgggagacccagcaggaactccggaagattcgtgagaaagaggaatggatcaaactggactatcataggcgccataaccccaaaaccaatgaggatttcgaattcctctataacgcactggaattttggaggcaagaggagctgacacgcatcaatcagtcgttcacaggtgccgagcgcaaagctgccctgtgcgaactcctggagaaagaaacccagattattgcgtctatagggagacaccgatacatcgcctacatggcgaaccaagaagccgcaattcaggcctttctggacaagtgctctgccccaaaaatttggcgtacacctaacggtaaaaccatcgagatggacacccagttcactatccgagccagagagctgcaaaatatctataagtgtatcatgctgaagaacatcagccaggatgagcggcttgacgtgctactcacactgaagcatacagtgaaagagcacgagtgcaagcttacacaggagatcctggagcttatcgaccgggaggttgatctcatgatgcggggagtaaagcaccacaacctggagggcttgagaaagcgcatcgcaaccctctttttccattacattaagacacccctgttcaacccagaggtggctaagtatctaaagatgggaggtgagtacttatcgatggccctgtag

SEQ ID NO: 30274 - DNA, 1305 bp, synthetic construct
  source 1..1305: mol_type = other DNA; note = Synthetic coding sequence
atggtgcaggacggaacattcaaaactcgcgattcaacttggacttgtgaatctacccgcatggctgcagctccccctagttactgcttcgtagcctttcccccacgggctaaggatgggttggttgtgttcgggaaaaattccgcacgaccgcgagatgaggtgcaggaggtcgtgtacttcagtgctgccgatcacgagcccgagtccaaggtggaatgcacatacatttccatcgaccaggtgcccaggacatatgctatcatgatctcaagacctgcatggctgtggggagctgaaatgggagcaaatgagcatggagtttgcattgcaaacgaggccatcaatacccgagaaccagccgcagagatagaagccctgctgggtatggatcttgtacgcctgggtttggagagaggcgagactgctaaggaagccctggacgttatcgtatcactgttggaggagcacggacaaggcggaaactacttcgaggacgcaaattcctgtcattctttccagtccgcctacctgattgtcgatcgggacgaggcatgggtgttggagactattgggaagtactgggccgcagagaaggttaccgagggtgtccgatgcatttgctcccaacttagcctgaccaccaagatggacgccgagcacccagaactcagatcttacgcgcaatctcaggggtggtggacaggtgaaggcgaattcaactttagcgaagtattttcccccgtcgaggaccacctggactgcggagccggaaaagattctttagagaagcaagaagagagcatcaccgtccaaaccatgatgaacaccctgagggacaaagcctctggcgtgtgcatcgatagtgagttcttcctcacgactgcctcaggggttagtgtgctgccgcagaatcgctcctctccctgtattcactatttcactggtacgcccgacccttcaagatcaatcttcaaacctttcatctttgtcgacgacgttaaactggtgccaaagacacaaagcccttgctttggcgatgacgaccccgctaaaaaggaacctaggttccaggagaagcctgatagaaggcacgaactttataaagctcacgaatgggcacgggctatcatcgagtccgaccaagaacagggcaggaagctaaggagcaccatgctggaattggaaaagcagggcttggaggccatggaagaaattctgacatcttccgaaccactcgacccagccgaggttggggacctgttctacgattgtgtggataccgagatcaaattcttcaaatag

SEQ ID NO: 30275 - DNA, 1320 bp, synthetic construct
  source 1..1320: mol_type = other DNA; note = Synthetic coding sequence
atggcctggccttgcataacccgagcatgctgcatagctcgattctggaaccagctggacaaagccgatattgctgtgcccttggtctttactaaatatagcgaggccactgagcatccaggagcccctccacaacccccaccaccacagcagcaggcccagccagctctggcacccccttctgcccgagccgtcgccatagaaacccaacccgctcagggcgaactggatgcagtggcccgagcaactggtccggcacctggacctaccggcgagagagagcccgctgctggccctggcaggtctggcccaggaccaggtttagggtccgggtcgacaagcggccctgcagactccgttatgaggcaggactacagagcttggaaggtgcagcgaccggagccatcttgtcggccacggtccgagtatcagccatcggacgccccttttgagagagaaacacaatatcagaaagattttcgggcttggcctcttcctcgccgaggagaccacccttggattccaaagcctgtccaaatttcagctgcctctcaagcaagtgccccaatccttggtgcccctaaacgccgtcctcagagtcaagagcgttggcccgttcaggccgcagccgaggcaagggaacaggaagccgctccaggtggagcaggtggattggcggctggaaaagctagtggtgctgatgagcgagacacccgcaggaaggctggcccagcgtggatcgttagacgggctgaggggctaggtcacgaacagacccctttacctgcagctcaggctcaagtccaagccacaggccctgaagcgggtcgcggacgcgctgcagccgacgcgttaaatagacagattcgagaggaagtggcctcagccgtttcaagctcctataggaatgagttcagggcatggactgacattaaaccggtcaagcctattaaggccaagccgcagtacaagccacccgacgacaagatggtccacgaaaccagctacagcgcacagttcaaaggcgaggctagtaagcccactaccgccgacaataaagtgatcgacagacgtagaataagaagcttatactcggagccattcaaggagcctcccaaggtggagaagccatctgtgcaatcttctaaacccaaaaagacatcagcatctcataagcccactcggaaagcgaaggataagcaagctgtctcaggccaagcagccaagaagaagagcgcggaaggaccaagcaccacgaagcccgacgacaaggagcagtccaaggagatgaataacaaactcgctgaggccaaagaatag

SEQ ID NO: 30276 - DNA, 813 bp, synthetic construct
  source 1..813: mol_type = other DNA; note = Synthetic coding sequence
atgggagggtgtttctctaagcctaaaccagtggagctcaagatcgaagtcgtgctgcccgaaaaggagaggggaaaggaggagctgagtgccagcggcaaaggttccccgcgagcttaccagggcaatggtaccgcacgacattttcacactgaagaaaggctgtcgaccccccacccttatccttcgccccaagactgcgtcgaagcagcagtgtgtcatgtgaaagatctggagaacggccagatgcgtgaagtggaactgggatggggaaaagtgctgcttgtgaaggacaatggtgagtttcacgctttaggccacaagtgtccccattacggtgctcctctggtgaaaggtgtgttatcccggggaagggtgcgctgtccatggcacggcgcatgttttaatatctcaactggcgatctggaggactttccaggattggactccctccataagtttcaggtcaagattgagaaggaaaaggtgtacgtgcgcgcatccaaacaagcgctccagcttcagcgtcgtactaaagtcatggccaaatgtattagccctagtgccggttacagctcatccacaaatgtactgatcgtcggcgcaggggctgctggcctagtctgtgccgaaactctgagacaggaggggttttcagatagaatagtgctctgcacacttgatcgccatctgccctatgataggccgaagctcagcaagagtctagacactcaacctgagcagttggcactcagacccaaagagttttttagggcctacggaattgaggtcctcactgaggctcaggtgtag

SEQ ID NO: 30277 - DNA, 369 bp, synthetic construct
  source 1..369: mol_type = other DNA; note = Synthetic coding sequence
atggcgacaagtgctccgctcaggtcacttgaagaagaggttacttgttcgatctgtctcgattatctgagagatcccgttacaattgattgtgggcatgtgttttgccgatcatgtacgacggatgtcaggcctatcagtgggtcccgacctgtgtgtccactatgcaagaaaccattcaaaaaggagaacattcggcctgtgtggcaacttgcctctctagtcgagaatattgagaggcttaaggtagacaagggcaggcagcccggtgaagtgacaagggaacagcaggacgccaagctgtgcgaacgccatcgggagaagttgcattactactgcgaagacgacggcaagctgctctgcgtttag

SEQ ID NO: 30278 - DNA, 1269 bp, synthetic construct
  source 1..1269: mol_type = other DNA; note = Synthetic coding sequence
atgactccatccatcccatcgatccgccgtttgggttcaggttatttttcttctaacggaaaattggaggaagtgaagacccctaagaaccctgtcaagagaaaagatctgctgcggcatgatcctgatttgcacatgcaccagggatacgataagtacgacgttagcgagttttgttcttatattaaatcttccagttccctcgggaatgccacctctgatgaagaccctaacactaacattatgaacatcaacgagaacaaaaatatccccaaagccaagaataaaagcgagtctgagaacgagccaaaggctggcacggacagcccggtgagctgcgcttctgtgaccgaagagcgagtggctagcgattctcccaaacctgcccttacacttcagcagggccaagaattcagcgccggaggccaaaatgctgagaatctttgtcaattcttcaagatcagtcccgacctcaatataaagtgcgagcgcaaggatgatttccttggagccgctgagggaaaattgcagtgcaacagactcatgcctaattcgcagaaggactgtcactgtctgggggacgtgctgattgagaacaccaaggaatcaaaaagccaatcggaggacctcgggaggaagcctatggagtcttcttcagtggtcagttgtcgcgaccgcaaggatcgcagacgtagtatgtgttacagtgacgggaggagcctgcacctagagaagaacggaaaccataccccttccagcagcgttggctcctctgtcgaaattagcctggagaactcagaactgtttaaagacttgtcagatgcaattgagcagacctttcaaaggcgaaatagtgaaactaaggtgaggcggtctacccgccttcagaaggacttggaaaacgagggacttgtatggattagccttccccttccctctacttcccaaaaggctaagaggcgcaccatctgtacctttgatagttctggcttcgagagtatgagccccatcaaagagacagtgtcttcaagacagaagccccaaatggcgcctccagtgtccgatccagaaaattcccaggggcctgccgctggatcatccgatgaacctgggaagcgccgtaaaagtttctgtatatcaactttggcgaatacaaaagcaacctcacagttcaagggttacaggcgtcggtcttccctgaatggaaagggagagtcttcattaaccgcgctagaacgcatagaacataacggagagagaaaacagtag

SEQ ID NO: 30279 - DNA, 3336 bp, synthetic construct
  source 1..3336: mol_type = other DNA; note = Synthetic coding sequence
atggtccgtgagagaaagtgtattctctgccacattgtgtactcttcaaagaaggaaatggacgagcacatgaggagtatgttacatcaccgcgagctggagaatcttaagggtcggttcggtatcgaaatggtgcctttagtgcaaaatgaacaggaggccctcgacctcgacggtgaaccggatctgtcctccctggagggcttccagtgggagggcgtgtccatatcctctagccctggactggctaggaaacgcagtctaagcgaaagttcggttatcatggaccgggcaccatccgtctactcatttttctccgaggaggggactggaaaagagaacgagcctcagcagatggtctccccgtcgaatagcttgagagctgggcagtctcagaaggcaaccatgcatttaaagcaagaggttacccctcgcgctgcctcccttaggacaggcgaaagagccgagaatgtggcaacccaaaggcgacactccgcccaattatcctcagaccacatcattccacttatgcatcttgcgaaggatctgaacagccaagaaaggtccatcccaccttcggagaatcagaacagccaggagtctaacggggaggggaattgtctgagctcgtctgcttcttctgccctcgcaatcagctcacttgcagacgctgccacagatagtagctgtacctcaggcgcagaacagaatgatggacagagcattcgcaagaaacgtcgcgcaacgggcgatggttcttcccccgagctgccctccctcgaaaggaagaataaacgtaggaaaataaagggaaagaaggaaagatcccaggttgaccaactactaaatatttctctccgcgaggaggagttatccaaatctctccagtgcatggacaacaatctattgcaagccagagctgctcttcagaccgcttatgtggaagttcaacgcctactgatgctaaaacagcagattacgatggagatgagcgctctccggacccacagaatacagatcctgcagggactgcaggaaacctacgaacccagcgagcaccccgatcaggtgccttgctccttaacaagggagagaagaaattcacgcagccagactagtatcgatgctgccctgctgccaacgccatttttcccgctgtttcttgaacccccttcaagtcatgttagcccctcccccactggcgcaagtctgcagattacaactagcccaacttttcagactcacggaagtgtgccggctcccgatagcagcgttcagatcaagcaggagcctatgtcccctgaacaagatgaaaacgtaaatgcggtccccccatcctcagcctgcaacgtgtccaaggaacttctggaggcaaacagggagatctccgatagctgtccggtttatcctgttatcaccgcacggctgtcactcccggagagcactgaaagctttcacgaaccgagtcaagagctgaaattttctgttgagcagaggaataccagaaatagagaaaatagccccagttcccaatccgccggtttgtcctctatcaacaaggaaggtgaggaacccacaaaaggcaactctggatctgaggcctgcacatcttctttcctgcggttgtcatttgcttctgaaacacccctggagaaagaacctcattctcccgcagatcagcccgaacagcaagctgaatccactctgacgtctgcagagactcgtggatccaaaaaaaagaagaagctgagaaagaagaagtcactacgggctgcccacgttcccgagaacagcgatacagagcaggacgtgctgacggtgaaaccggtccgcaaagttaaggcaggtaagctcattaaaggcggtaaagtgacaacttccacttgggaagatagccgtacaggtagagaacaagaaagtgtaagggatgagcccgacagcgattcatcacttgaggtactggagattcccaatccacagttggaagttgtcgccatcgattcctcagaatccggagaggagaagccagactccccttccaaaaaggatatctggaactctacggagcagaatcctctcgagaccagtcgctcaggctgcgatgaggtctcgtccacatccgagattgggacccgctacaaggatggcattcccgtgtctgttgcagagacgcagacggtgatctccagcattaagggctctaagaactcaagtgagatttcttctgaacccggtgacgacgatgagccaaccgagggctcattcgagggccaccaggctgcagtgaatgcaatacagattttcgggaatctgctctacacttgttccgcagacaagacagtgagggtttacaacctcgtgagtcgaaaatgtatcggcgtgttcgaaggacacaccagtaaagtgaattgcctactcgtgactcagacaagcgggaagaacgctgcgctatacactggctcctcagaccatactattcggtgttataacgttaaaagccgggaatgtgtggaacaattacagctcgaagatagggtcctctgccttcatagtcgctggagaatcttatacgcaggcctagcaaacggtacggtggtcacatttaacatcaagaataacaagcgcctggaaatttttgagtgtcacggaccaagggccgttagctgcttggcgacagcacaggaaggcgctcggaagcttctcgtggtgggatcatatgattgcacaataagcgtgagagatgcacggaatggtcttcttttgagaacactggaaggtcactccaagacgatcctgtgcatgaaggtggttaacgatttggtgttctccggcagctctgaccagtcggtgcatgctcacaatatacatacaggcgagttggtgaggatttataagggacataatcacgccgtaaccgtggtgaatatcctcgggaaggttatggtcacggcgtgtctcgacaagtttgttagagtgtacgagctacaaagtcatgaccggctgcaggtgtacggcggtcacaaggacatgataatgtgtatgaccatacacaaaagcatgatatacacaggttgttacgatggtagcatccaagcggtgagactcaatctgatgcagaactaccgatgctggtggcacggctgttctctcattttcggcgttgtagatcatctcaagcagcatctcctcacggatcacactaatcccaattttcagacattaaagtgccgctggaagaactgcgatgcattttttaccgctcggaaaggctcaaagcaggatgctgccggacacattgaaaggcacgctgaggatgattccaaaatcgactcttag

SEQ ID NO: 30280 - DNA, 354 bp, synthetic construct
  source 1..354: mol_type = other DNA; note = Synthetic coding sequence
atgtacagccccattatttaccaagcgctctgtgagcatgtgcagactcagatgtctttgatgaatgacttgacgagcaaaaatatccctaatggcattccagcagtgccttgtcatgctcctagtcactctgaaagccaagccacaccacactcttcttacgggctttgcaccagcaccccagtgtggagtctgcagcgccctccttgtcctcccaaggtgcattccgaggtccaaacggacgggaattctcagttcgcctcacagggtaaaactgtgagtgctacctgtacagatgtgctgcgaaatagtttcaacacctctcccggtgtgccttgttcccttccgaagtag

SEQ ID NO: 30281 - DNA, 189 bp, synthetic construct
  source 1..189: mol_type = other DNA; note = Synthetic coding sequence
atggccgcacttcgcccactggttaaacccaaaattgtgaagaagagaaccaaaaaatttatccgtcaccagagcgataggtatgttaaaatcaagcggaattggcggaagcccagggggatcgacaacagagtccgaagaaggttcaagggccagatcctcatgccaaacataggatatgggtcgtag

SEQ ID NO: 30282 - DNA, 411 bp, synthetic construct
  source 1..411: mol_type = other DNA; note = Synthetic coding sequence
atgtcggcctcatgtgacgggtgtgtcggaagtcgcccacctgtacatctggctagcggatacagcctcgcagatctccttgtgctcgagatggggatgggtacccagtgttggacagaagaccagagacgatggtcaagcttatggccttggtcacatctgagttcagtattgctcgccgataaagagggcggaccccctgccgtggacgaggtgctcgatgaggctgtgccggagtaccgggcacccggacggaagtctctcctggaaatccgacagctggatcctgacgatcgtagcctggcaaagtataagcgggtcttactaggccctctaccacctgctgttgatccatcactgcccaatgtacaggtcacacgattaactttgctctcagaacaggccccatag

SEQ ID NO: 30283 - DNA, 1803 bp, synthetic construct
  source 1..1803: mol_type = other DNA; note = Synthetic coding sequence
atgcccgaaattcgcgtgacacctctgggcgcagggcaagacgtgggcaggagctgcattttggttagcatcgcaggtaagaacgtcatgctggactgcggaatgcacatggggttcaatgacgatcgaagattcccagacttttcgtatataacacaaaacggacggctgacagattttttagattgtgtcatcatcagccactttcatttagaccactgtggtgctctcccttacttttccgaaatggtggggtatgatggccctatctacatgacccatccaactcaggcgatctgccccatactgctggaggattaccgaaagatcgcagttgataagaagggcgaagccaacttcttcacctctcagatgattaaagattgtatgaaaaaggtagttgccgtccatctgcaccaaaccgttcaggtcgatgatgagctggagattaaagcctactacgctggtcacgtgctgggagcagccatgttccagataaaggtggggtctgaatcggtggtgtacacaggggactataatatgacaccagaccgccatcttggtgccgcttggatagacaagtgtcgcccaaacctgctgatcaccgagtcgacttatgccaccactattcgcgactccaagagatgtagagaacgagactttcttaagaaggtacatgaaaccgtggaaagaggcggaaaggtgctgatccctgtctttgcactgggacgagcacaggaactttgtattcttctagaaacattctgggaaaggatgaacctgaaagtgccaatttattttagtaccggattgactgaaaaggcaaaccactattataagctgttcataccctggacaaaccaaaaaatccgaaagacgttcgtgcagagaaacatgttcgaattcaaacatataaaggcttttgatagagcatttgccgacaaccccggaccaatggtggtgttcgctacacctgggatgctgcacgctgggcagagtctgcagatcttccgcaagtgggcaggcaacgagaagaacatggtcatcatgccagggtactgcgtgcagggcaccgttggacataagattctatcaggacaaaggaaactggaaatggagggtagacaggtgctggaggtcaaaatgcaggtggagtatatgtccttttctgcccacgctgacgccaaaggaatcatgcaactcgtgggacaagcagagcctgagtccgtcctactggtgcacggcgaggcaaagaagatggaatttttgaagcagaaaatagagcaagagttaagagtgaactgttacatgcctgcaaatggcgagactgtaacacttcctacctcacctagcatacctgtcggcatcagtctcgggctcctgaagagagagatggcacaggggttgttgcccgaggctaagaaacccagactccttcatggtaccctaataatgaaggactccaatttccgcttggtcagttcggaacaggccttgaaagagttaggcctcgccgagcaccagctgcgattcacctgtcgcgtccatctacacgataccaggaaggagcaggagacagcgctccgcgtgtattcccatctgaagagcgttctcaaggatcattgcgttcaacacctgccggatggttccgtgacggtcgaatcagtgcttttgcaagcggcagcaccctccgaagacccaggtaccaaagtgctgctggttagctggacatatcaggacgaagagttaggaagcttcctaacctccctcctgaaaaaaggcctccctcaggccccaagctag

SEQ ID NO: 30284 - DNA, 774 bp, synthetic construct
  source 1..774: mol_type = other DNA; note = Synthetic coding sequence
atgctggagtatgccctcaaacaggagcgagccaagtaccacaaattgaagttcggtaccgacttaaaccagggagaaaaaaaggctgacgtgtcagaacaggtcagcaatggacccgtcgagtctgtgacactggaaaactccccgctggtgtggaaagagggtcgccagctgctgaggcagtacttggaggaagtcgggtataccgatactattttggacatgcgtagcaagagagtcaggtctctgctcggcaggtcactggagctcaacggcgctgtggagcccagcgaaggcgctccaagggcaccgccaggcccagccggattatccgggggtgaaagcctcctagtgaagcagatcgaggagcagatcaagcgaaatgctgccggaaaggatggcaaagaaaggctcggaggatccgtactcgggcagattccattcttgcaaaattgtgaagacgaggactctgatgaagatgacgaacttgacagcgttcagcataagaagcaacgggtcaagctcccttcgaaggctcttgttccagagatggaggacgaggatgaagaggacgatagcgaagatgccattaacgaattcgattttctgggaagcggagaggatggcgaaggggctcccgacccaagacggtgtaccgtggacggaagtccgcatgaacttggacctgaactacattcgcctactgagtggcagggggcactgtcagtgggcaaggcctccccgatgcctgattgggtgggcactgccggatag

SEQ ID NO: 30285 - DNA, 381 bp, synthetic construct
  source 1..381: mol_type = other DNA; note = Synthetic coding sequence
atgccgggagtcaaactcacaacacaggcctattgcaagatggtcctgcatggcgctaaataccctcattgcgcagttaatggtttgctggtcgctgagaaacaaaagccccgtaaagagcacctgccccttgggggtcccggagcacatcataccttgtttgttgactgtattccattattccatgggactttggcactcgcacccatgttagaggtggctctcaccttgattgattcatggtgtaaggaccactcttatgtgatcgcaggttactaccaggctaatgaacgcgtcaaagatgctagccccaatcaggttgccgaaaaggtggcatcccgaattgccgagggcttcagcgatactgctctcatcatgtag

SEQ ID NO: 30286 - DNA, 450 bp, synthetic construct
  source 1..450: mol_type = other DNA; note = Synthetic coding sequence
gtccgggaactggaggctgagcttgatgccgagcaaaaaaaacacgcggaagctctgaagggggtgaggaagcacgaaaggcgggttaaagagcttgcctaccaggtcggagatcgcgtctccctcgggtcagggccaggagcaggccctgcccaggcaagtcccgaaagccctctacccgcacaggctgaagaggatagaaagaacctggcacgaatgcaagacctcgtggataaactacagtccaaagtgaaaagctacaaacggcagtttgaggaggcagagcagcaggccaatactaacctcgccaagtacagaaaagcccaacatgaattggatgacgctgaggaacgagctgatatggccgagactcaggccaataaactgcgcgctcgaacacgcgatgctctcggccctaaactatctctttctccccagcacaaggagtag

SEQ ID NO: 30287 - DNA, 2349 bp, synthetic construct
  source 1..2349: mol_type = other DNA; note = Synthetic coding sequence
atggactcctccatccacctttcgagtctgatttctcggcatgatgatgaggccacaaggacaagtactagcgaaggcctcgaggaaggcgaagttgagggcgaaaccctcctgattgttgagagtgaggaccaggcctctgtggacctctcacacgaccagagcggtgactctcttaactccgatgagggagatgtgtcttggatggaagagcaattgagttatttctgcgataagtgtcagaagtggatccccgcttcacagctgcgggaacagttgtcttacctgaagggcgacaattttttccgattcacatgttctgactgttctgctgatggaaaggagcaatatgagcggctgaagctcacctggcagcaggtcgttatgttggctatgtataatctctcattggaggggtcagggcgacagggttactttagatggaaggaggatatatgtgcattcatagagaaacactggacattcctgttagggaacaggaagaaaacctcaacgtggtggtcgactgtggcaggatgtctgtctgtgggcagtcctatgtactttagatccggggcacaagaattcggagaacccggttggtggaaactggtacataataagcctcccaccatgaagccagagggggagaaattgagcgcaagcacactcaagatcaaagctgcttcaaaacccactctggacccgataattaccgtagaaggccttaggaagcgagccagccgcaatcccgttgagtccgccatggaactcaaggagaagcggtctcggacacaggaagcgaaagacattcgcagagctcagaaggaggcagccggatttcttgatagatcaacctcttcaaccccggtgaagttcatttcacggggacgcagaccagatgtcatcttggagaaaggagaggtcatcgatttctcatccctttcgagttcggaccgaacacccctaacaagtccctccccttccccctccctggactttagcgcccctggcacgcccgcaagccattccgcaacacccagcctgctatccgaggccgacttgatccccgacgtgatgccccctcaagctctcttccatgatgacgacgagatggagggcgatggggttatcgacccaggtatggagtacgtccccccacctgctggctccgttgcttctggaccagttgtaggtgtgcgcaaaaaggtgcgtggacctgagcagatcaaacaggaggtggaatctgaggaggagaagccagataggatggacatcgatagcgaagacacggacagcaacaccagcctgcagacacgagcacgtgaaaaacgaaaaccccagctcgaaaaggacactaaacctaaggagccaaggtatactccagtttcgatttatgaggaaaagctgttacttaagagattggaggcttgccctggcgctgtcgcaatgacaccagaagccaggagattgaagcgtaagctcatcgtgagacaggccaagagagacaggggattgcctcttttcgatctcgatcaggtcgtgaatgccgcactgctgttggttgacggtatttacggagcaaaggaaggtggtatatccagactgcctgccggtcaagccacctaccgaacaacatgccaggactttaggatactggatcggtatcagactagtctgcctagccgaaaggggttccgccaccagaccaccaaatttctctatcggctggtgggctcggaagatatggccgtagaccaatccatcgtctctccctacacgtccaggatcctgaagccctacatcaggagggattacgagactaagccccctaagctgcagcttttaagtcaaatacggagtcatctgcaccgaagtgacccacactggaccccagagcctgacgctccgttggattattgttatgtgcggccaaatcacatccctactattaattccatgtgtcaagagttcttttggcccggaatcgatctgagcgagtgccttcaataccccgacttttcagtggtagttttatataaaaaggttatcatagcgttcggcttcatggtacctgatgtgaagtacaacgaggcgtacattagcttcttatttgtccatcctgaatggaggagagccggaatcgctacattcatgatataccatctaatccagacttgtatgggaaaggacgtcactttgcacgtatccgcatccaatcctgctatgttgttatatcagaagttcgggttcaagacagaggaatatgtgctggacttttatgataaatactaccccttagaatccactgaatgtaaacatgctttttttcttaggctgagacgctag

SEQ ID NO: 30288 - DNA, 495 bp, synthetic construct
  source 1..495: mol_type = other DNA; note = Synthetic coding sequence
atgatgagcgaggtcgaagaggctatgcagtgcgtggaagagttgaacgcgcaaggactgctgcacgtgtttgtgcgcgtgggggtggaatcaacacttgaaaggtcccagattacccgagatcatatggggcagttgctataccagctcgttcagtcagagaaattgtctaagcaggactttttcaagggcttcagcgagacgctggaactcgccgacgacatggccatcgacatccctcatatatggttatacctcgcagagctcgtaacacctatgctcaaggagggcggtatatctatgcgggaactaacaattgagttcagtaaacccctactgcccgttggacgtgcaggggtgctgctcagcgaaattctccacctgctgtgcaagcagatgagccacaagaaggttggtgctttgtggcgggaggctgatttatcttggaaggattttctgcctgaaggtgaggatgtccacaattttctgctgtag

SEQ ID NO: 30289 - DNA, 369 bp, synthetic construct
  source 1..369: mol_type = other DNA; note = Synthetic coding sequence
atggcaacatccgcgcctcttaggtccttagaggaggaggtgacgtgttctatctgtctcgattacctgagggatcctgtgaccattgactgcggacacgtgttctgtcgatcttgtacgacggacgtacgaccaatctctggcagcagacctgtttgccccctgtgtaagaaaccatttaaaaaagagaatatacgcccagtttggcagctggcttcgctggtcgaaaatattgaacgtctgaaagtggacaagggcagacagccgggtgaagtaactcgggagcagcaggacgccaaactttgcgagcggcatcgtgagaagcttcattactactgcgaagatgacggaaaactgctgtgcgtgtag

SEQ ID NO: 30290 - DNA, 3345 bp, synthetic construct
  source 1..3345: mol_type = other DNA; note = Synthetic coding sequence
atggcttgccgccgaaggtactttgtcgagggcgaggccccaagctccgagaccgggacttccctggacagcccctctgcataccctcagggacccctggttccagggtcaagcctctccccggatcactacgagcacaccagcgtgggagcctatggtctgtattctgggcctccagggcagcagcagcgcacgagaagaccgaagctccagcattcaaccagtatcctcaggaagcaggcagaggaggaagcaatcaagcgcagtcgcagtttgagcgagtcttatgagctgtctagtgatctccaagataaacaagtggagatgctggagagaaaatacggaggacggctggtcacgcggcatgcagctcgcaccattcaaacagccttcagacagtatcaaatgaataagaatttcgaacgcctgcggagcagtatgtcagagaacaggatgagcagacggatagtcctgagtaatatgaggatgcagttctcttttgagggccctgaaaaggtgcactctagttatttcgaggggaaacaggtttccgtaacgaacgacggaagtcaattaggggctcttgtgtccccggagtgcggcgacctgtcagagcctacgacactaaaaagccccgctccaagcagcgatttcgctgatgccattaccgagcttgaggatgccttttcccgtcaagtgaagtcattggcagagtcaatcgatgacgctctgaattgtaggtcactgcacaccgaagaagcccctgccctggatgcggctcgggctagagacaccgaacctcagaccgctcttcacggaatggatcataggaaactcgatgagatgacagcgagctacagcgacgtcacactgtatattgacgaagaagagctgagccccccactgcccttgtcccaggctggggatcgaccatctagtacagaaagcgatctcagactaagggccggaggcgctgcacctgattactgggctctagctcacaaagaagacaaggcagacactgatacctcttgcaggagtaccccatcactggaaaggcaggagcagcgcctaagggttgagcacttgcccctgctgactattgagccgccaagcgactcttctgtggacctctccgatagatctgaaagaggcagcttgaaaagacaatctgcctacgagagatcactgggaggccagcagggcagtcctaagcacggccctcattcaggggctcctaagagtttgcccagagaagagcccgagttgaggccccgacccccaaggcccctggacagccatcttgccattaacggttccgccaatcgtcagtctaagagtgaatccgattattctgatggcgacaacgatagcattaacagtactagtaatagtaatgatacgattaactgttcctccgaaagtagttcgagagactctcttcgggagcagacgctgtctaaacagacgtatcacaaagaggcccgtaattcttgggattctcccgctttcagcaacgacgtaatcagaaaacgacactaccggatcggactgaacctcttcaataagaagcctgaaaaaggggtacagtatctcatcgaaagaggtttcgtacctgacaccccagttggtgttgcccactttctgctgcagcgcaaaggcctgagccgccaaatgatcggcgaattccttggcaatcggcagaagcaattcaacagggatgtgttggactgtgttgtcgatgaaatggacttttcgacgatggaactggacgaggccctgcggaaattccaggcccacatacgcgtgcaaggagaagcccagaaagtagagcgtctgatagaggcgttctcccagagatattgtatctgtaacccaggagtcgtccgccaatttcgcaaccctgatacaatcttcatcctcgctttcgctatcattctgctgaacaccgacatgtatagtccaaacgtaaagccagagcggaagatgaagttggaggatttcataaagaaccttcggggagttgatgacggtgaggacatccccagggaaatgcttatgggaatttacgaacgcataaggaagcgtgagctgaagactaatgaggatcatgtcagccaggtgcagaaagtagagaagctcatcgtgggcaagaaacccatcgggagccttcaccctgggctcggctgcgtgctcagtttgccccacaggcggctggtttgttactgtcgactttttgaggttcctgatcccaataaaccacagaaattagggctgcaccagagagagatatttctgtttaacgacttgctggtagtgacaaaaatcttccaaaaaaaaaaaaattctgtgacctatagcttccgacagtcattttccctttatggcatgcaggtgttgttgtttgaaaatcaatactaccctaacgggatccgcttaaccagctcagtgcctggggctgacattaaggtgttgatcaactttaatgcacctaatccccaggataggaagaagtttaccgacgatcttcgggaatctatcgcagaagtacaggaaatggaaaagcacaggattgagagtgagttagagaaacagaaaggagtagtacgtccatctatgagccagtgttctagtctgaagaaagagtccggcaacggaactttaagcagagcatgcctcgatgactcttatgcaagtggggaaggcttgaaacgctccgcattgtcatcttctctgcgggacttaagcgaggctgggaagagaggccgacgttcttccgcaggctccctggaatccaatgtggaaggctccattatctcttcccctcacatgagacgaagagccacctcaacccgagagtgccctagccgcccacatcagaccatgcccaactcgtcaagcctgctgggatcgctgtttggtagtaaaagaggtaagccaccccctcaggcgcatttgcctagcgctccggctctgcctccccctcacccaccagtagtcctgccacacttacaacattcggttgctggccaccatcttggcccaccagagggccttccgcaggcggctatgcatgggcaccacactcaatattgtcacatgcagaaccctcctccatatcaccatcaccaccaccatcaccccccacagcatattcaacatgcccatcagtaccatcacgggccacatggaggacacccggcatacggcgctcacgcacacgggcacccccctttaccttccgcccatgtgggccataccgtgcaccatcacggtcagcctcctgccccaccccctccaaccagtagcaaagcaaagccttcgggtatctcgacaatagtttag

SEQ ID NO: 30291 - DNA, 903 bp, synthetic construct
  source 1..903: mol_type = other DNA; note = Synthetic coding sequence
atggccgaagaggtgagtacgctgatgaaagccacggtgctgatgcggcagcccggaagagttcaggagattgtcggcgctctgagaaagggagggggagacaggctgcaggtcatttctgactttgatatgaccttgtctcgcttcgcttacaacgggaaaaggtgcccttcaagctacaacatcctggacaattctaaaattatcagtgaagagtgtcggaaggaactcacggcgctcctgcaccactactatccgatagaaattgatccccatcgaactgtcaaagagaagttgccccatatggtggaatggtggacaaaagcccacaacctgctgtgtcagcagaagatccaaaagtttcaaatagcgcaggtagtcagggaatctaatgctatgctccgggagggctataaaaccttcttcaacaccctgtatcacaataatatcccactgtttattttttctgccggaataggagacatattggaggagattatcaggcagatgaaagtctttcatccaaatatccatattgtgtctaattacatggattttaacgaggatggatttctgcaaggattcaaaggacagttgatccatacttacaataagaactcttccgcctgcgagaatagtggctactttcaacaactcgaagggaagaccaatgttattctgctgggcgactctattggtgacctgactatggctgacggtgtgccaggcgtacagaacatcttgaaaattggctttctcaatgacaaggtcgaggaaagacgggaacgatacatggactcctacgacattgtactcgaaaaggacgagaccctggacgtagtcaatggacttcttcagcacatcctctgccagggcgtgcagttagagatgcagggcccatag

SEQ ID NO: 30292 - DNA, 834 bp, synthetic construct
  source 1..834: mol_type = other DNA; note = Synthetic coding sequence
atgtttcccggtgccactacccccctgccaaaggccgcagcttatcccggtgtatatgggagcaatggccgaacgcctcagccagcctacctgtctgaagcgatgaaactgacacagagcgagcaggcccaccttagcttggaactccagcgcgattcgcacatgaaacagttactgttgattcaagaaaggtggaagcgcgctcagagggaggagcgcctaaaagcccaacagaataccgacaaggatgctgctgcacacctgcaaaccagtcataagccttccgcagaggacgctgaaggccaatctcctctgtcccagaagtacagcccgtcaacagaaaaatgtctgcctgaaattcaagggatctttgatagggacccggacaccctgctatacctgctgcagcagaagtcagagcctgctgagccttgtattggctccaaggctcccaaagacgataaaacaatcattgaggagcaggcaaccaaaatcgccgacttgaagcggcacgtcgaattcctagtggccgaaaacgaaagacttaggaaggagaacaagcagctgaaggcggagaaggctcgtctgttgaaggggccaatcgaaaaggagcttgatgttgatgcagattttgttgagactagtgaactttggtccctgcccccacacgccgagacagctactgcgtcgagcacctggcagaaatttgcagccaacaccggcaaagcgaaggacattcctataccgaacctgcctccgctggatttccctagtcccgaattgccactcatggaactctctgaggatattctcaagggcttcatgaataactag

SEQ ID NO: 30293 - DNA, 138 bp, synthetic construct
  source 1..138: mol_type = other DNA; note = Synthetic coding sequence
atgtccccacaaaagcgggtgaaaaacgtgcaggcccagaataggacctcacaaggtagctcaagctttcaaaccactctgtcggcctggaaggtgaaacaagatcccagcaatagcaaaaacatcagtaagcactag

SEQ ID NO: 30294 - DNA, 819 bp, synthetic construct
  source 1..819: mol_type = other DNA; note = Synthetic coding sequence
atgcctggagatcacaggagaattagaggaccagaggaaagccagccaccccagctctatgccgctgatgaggaagaagcgcctggaacacgtgatccaaccaggctccgccctgtatacgcaagggctggactgctgtcccaagcaaagggatctgcctaccttgaagctgggggaacaaaggtcttgtgcgcagtttccggtccacgacaggccgagggcggagagcgcggaggcggacctgccggtgcaggaggggaggctcccgcagcattgaggggtagactgctctgtgacttccgcagagcaccattcgcaggaagacggaggagggcgcctcctgggggatgcgaagaacgggaactggctctggccctccaggaagcgttagaaccagccgtccggttagggagataccctcgagcccagctggaggtctccgcgcttctgctcgaggacggcggatctgcgctggccgctgcactgacggccgcagccttagcgctcgccgacgctggcgtggagatgtacgatttagtggttggatgtggtctaagtttagcccctggccctgcccctacttggctgctagacccaacccgacttgaggaggaacgggctgctgccggtttgacggtggcactcatgcctgtgctcaatcaagtggccggactcctcggctcaggtgagggtggcctgactgaatcttgggctgaagccgtgcggctgggccttgagggatgccagcggctgtatcccgtcctccagcagagcctggtcagggccgctcgacggcgtggggcagccgctcagccatag

SEQ ID NO: 30295 - DNA, 429 bp, synthetic construct
  source 1..429: mol_type = other DNA; note = Synthetic coding sequence
atggcaagtggcaacgcgaggattggaaaacccgcacctgattttaaggccactgctgtggtggatggagcgttcaaggaggtgaagttgtccgactataagggtaaatatgtggtgctgtttttttatcctcttgacttcaccttcgtctgccctacagaaatcatagcattcagcaaccgagcggaagattttagaaagctaggctgcgaagtgctcggagtatctgtggattcacagtttacgcacctggcttggtacgaacagggccctaaacgtgaggtggctgctaaactgacaccatcaggccctagctctgttgcctcatggcctctgctcaatttatggaacctgcgctttcctattgttaagattatggagacgctgccacccaaatcactgaggatgatgaccgtaatttcaatttag

SEQ ID NO: 30296 - DNA, 1137 bp, synthetic construct
  source 1..1137: mol_type = other DNA; note = Synthetic coding sequence
atggaagttaagccccctccagggcgacctcaaccagactccggccgtcgcaggcggagacgtggtgaggaaggacatgatcctaaagagcccgaacaactgcgaaagctcttcatcggaggactctcttttgagactaccgatgacagcctcagggaacatttcgagaagtgggggaccctgacggattgtgtcgtgatgcgtgacccccaaacaaagagatcgagaggtttcggtttcgtgacctactcctgtgtggaggaagtggatgctgcaatgtgtgccagaccccataaggtagacggcagagttgtagaacccaagcgagctgtgtccagggaggattcagtcaagcccggtgcccacctcactgtaaagaaaatttttgtcggagggatcaaagaggacacagaagagtataacttgcgtgattactttgaaaagtacggcaaaatagaaacgattgaggtgatggaagacagacagtctggcaagaagcggggattcgcatttgtgacctttgatgaccacgacacggtagacaagatagtcgtgcagaaataccacacaataaatggccacaactgcgaagttaagaaagccttgtccaagcaggagatgcagagcgccggatcacagcggggaaggggagggggatctggaaactttatgggtagaggtggcaattttggaggaggagggggaaacttcgggagaggtggcaatttcgggggaagggggggttacggcggtgggggaggcggaagcagaggatcgtacggaggcggagacggaggttacaatggcttcggcggtgatggcggaaattatggcggaggccctggctattcctcaagggggggatacggcggaggcggaccaggctatggcaaccagggcggaggctatggcggtggcggtgggtatgatggctataacgaaggcggaaatttcggtggtggaaactacggtgggggaggaaattacaacgatttcgggaattattccggccagcagcaatctaattacggccctatgaagggcggatcctttgggggacgaagctccggatcgccttacgggggaggctacggcagcggcggaggatccggaggatatggaagccgcagattttag

SEQ ID NO: 30297 - DNA, 324 bp, synthetic construct
  source 1..324: mol_type = other DNA; note = Synthetic coding sequence
taaatccacgagcagtgggaaaaagccaacgtgagtagcccccaccgcgaattccccccagccacagcaagagaggtggacccactgaggatccccccacaccaccctcacacttctagacagcctccatggcccaggaggggtggcatgattgtagatccattacggagtggatttccgagagcactgatcgatcctagcagtggactgccaaatcgcctgccacctggcgcagtgcctccaggcgctcgctttgaccctttcggccctattgggaccagcccgccaggcccaaacccagaccacctgcctccgcctggttag

SEQ ID NO: 30298 - DNA, 201 bp, synthetic construct
  source 1..201: mol_type = other DNA; note = Synthetic coding sequence
atggctgcggctaccggcgaccctggtctaagtaagctacaattcgcaccattctcaagtgctctcgacgtcggcttttggcatgaacttactcagaaaaagctgaacgaataccggctcgatgaggctcccaaggacattaagggatactactataatggagatagtgctggattgcccgcaaggctgaccttagagtag

SEQ ID NO: 30299 - DNA, 2115 bp, synthetic construct
  source 1..2115: mol_type = other DNA; note = Synthetic coding sequence
atgctgcccacagcaagcagtaagcgaagaacattcgccgcacgttacttcactcgctccaaatctctagtgatgggggaacagtcacgtagtcccggacgaatgccctgtccccacagactgggaccagttcttaaggcaggttggttgaaaaagcaaagaagcatcatgaagaactggcagcagcgctggtttgtcttgaggggcgaccagttgttctattacaaagacaaagatgagattaagcctcagggtttcattagcttacagggaacacaagtgacagaattgccacctggaccggaagaccccggaaaacaccttttcgaaatcagtcctggcggagcaggcgaaagagagaaagtgccagctaatcctgaagctctgttgctgatggcctcttcccagcgcgatatggaagactgggtgcaggccatacgaagggtcatttgggcacctctcggtggcggtatcttcggccaacggctcgaggagaccgtgcatcacgaacgaaagtatggtcctaggctcgcgccactgttggttgagcagtgtgtggattttataagagaaagaggcctaaccgaagaagggctgtttaggatgcctggtcaggctaatctggtcagggacttgcaggatagttttgactgtggagagaaacccctgtttgactcaactaccgatgtccacactgtcgcaagtttattaaagctgtatctgagggaattgccagaacctgtggtgccatttgcccgttatgaggactttctgtcgtgcgcgcagttgttgaccaaagatgagggggagggcaccctggagctggctaaacaggtctcaaatctaccccaggccaattataatttgctgaggtatatctgtaaatttttagacgaggtgcaggcttacagtaacgttaacaagatgtccgtgcagaatttggccaccgtgttcgggcctaatattctaagacctcaagtggaagatccagtaactattatggaagggacttctcttgtgcagcacctcatgacggtactcattaggaaacacagtcagctgttcactgcccctgttcccgagggtcctacttcgccaagaggcggtttacagtgtgctgtgggttggggttccgaagaagtcacacgggacagtcagggcgagcccggtggcccagggctccctgcacataggaccagctctctggacggcgctgccgtggcagtcctgtctagaacagcccctactggaccgggaagccgttgttctcccggtaaaaaggtgcagaccctgcctagttggaagtcatcatttcgccagcccagatctctcagcggaagccccaaaggcggtggtagttctttggaggtgcctattatttccagcggtggtaactggctgatgaacggattgtctagccttcggggtcacaggcgggctagctcaggcgacagactaaaagactcaggcagcgtgcagcggctgtccacatatgataacgtgccagcccctggactggtgcctggtattccatctgtcgccagtatggcctggtccggggcaagctcctctgagtcgtcggtcggcggaagcctgtcaagctgtacagcgtgtagagcaagcgactcatcggctcggtcgtccctgcataccgactgggccttggaaccctctccccttccaagttcaagtgaagatcccaagagtttggatctggatcattccatggatgaggcaggtgctggggcttcgaacagtgaaccttcagagcccgacagccccacaagagagcatgcaagacgttcggaagctttacaagggctggtgacagagcttagggcagaactgtgtcgacagcggacagagtacgaacgatctgtcaaacggatcgaggaaggcagtgcagatctgcgcaaaaggatgtctagattggaggaggagctcgatcaggagaagaagaaatacattatgcttgagatcaagctgcggaattctgagcgcgcaagagaggatgcggagcgaagaaaccagttgttgcaaagggagatggaagaattcttctctacacttggatctcttactgtcggcgctaaaggcgcaagggccccaaagtag

SEQ ID NO: 30300 - DNA, 630 bp, synthetic construct
  source 1..630: mol_type = other DNA; note = Synthetic coding sequence
atgatctccaactacagaaatgggtcagaactggtttgtttcaactctggggtcggatgctttctgattggttgcgattgggccttcaccgttcttgtaaatacctttttttcctttttgcgcagaaaaacggactttttcatcggcggtgaggaaggaatggcagagaagctgatcacccaaaccttctcccaccataatcagttagcccagaaaacaaggcgagagaagagggcgaggcaggaggctgaacggagagaaaaagcagaacgggctgccaggttagccaaggaagccaaaagcgagacttcgggcccacagattaaggagttgacagatgaagaagcagaacgcctgcagctagagatcgatcagaaaaaggacgccgagaaccacgaagcccagttgaagaacgggtcacttgactcgccgggtaaacaagatacggaagaggatgaggaggaagacgagaaggacaagggcaagctgaagcccaatctcggcaacggagccgatctgcccaactacaggtggactcagactctgagcgagctggatctggccgtgcccttctgcgtgaacttcaggctcaaaggaaaggatatggtcgtagacattcagagacgctag

SEQ ID NO: 30301 - DNA, 309 bp, synthetic construct
  source 1..309: mol_type = other DNA; note = Synthetic coding sequence
atgaacgaggctgagatcgtggatgtagccctagggattctcatcgaaagtaggaaacaagagaaggcttgtgaacagcctgccctggctggcgctgacaaccctgaacacagtcccccatgctcggtatcccctcatacctcatcaggttcaagctctgaagaggaagattccggcaagcaggctcttgctccgggtctgtcaccttctcaacggcctgggggatcaagtagcgcctgttccagatccccagaagaggaggaggaggaagatgtacttaagtatgttcgagagatcttcttctcctag

SEQ ID NO: 30302 - DNA, 273 bp, synthetic construct
  source 1..273: mol_type = other DNA; note = Synthetic coding sequence
atggccatggccccatctcccagtttggtgcaggtgtatacttctccagcggctgtcgccgtgtgggagtggcaggacggactcggcacctggcacccatactcagcgaccgtctgctcgttcatagagcagcaatttgtacaacagaagggccagaggtttgggctgggttcattggcacacagcattccgctcggccaggcagatccgtctttggccccttatatcatagacctgccaagctggacccagttcaggcaggatactgggtag

SEQ ID NO: 30303 - DNA, 207 bp, synthetic construct
  source 1..207: mol_type = other DNA; note = Synthetic coding sequence
atggacgcaaactctaaagataagcccccagagactaaggagtcggccatgaataacgctggaaacgcaagctttattttaggcacaggaaagatcgtcacaccccaaaaacacgctgagctgcctcccaacccctgcacgcccgacacattcaagtcacccctgaatttcagcacagtgaccgtcgagcagctggggattaactag

SEQ ID NO: 30304 - DNA, 879 bp, synthetic construct
  source 1..879: mol_type = other DNA; note = Synthetic coding sequence
atggatggctcgtttgtgcagcactccgtccgggtgcttcaggaattgaacaaacagcgagaaaagggtcagtactgcgatgccacgctggatgtgggagggttggtgttcaaagcccattggagcgtgctggcctgctgctctcatttctttcagtctctgtacggggatggatctgggggtagcgtggtgctgcctgctggttttgccgaaatattcgggttactcctagatttcttttatacaggtcacctggccttgacgtccggaaatcgggaccaagtgcttctcgccgctcgagaactgagagtgcctgaggcagtcgagctatgccaatctttcaaaccaaagacttctgtcggtcaagccgcaggcggacagtcaggcctcgggcctccagcttcacaaaacgtgaattctcacgtaaaggagcccgcaggtcttgaggaagaagaggttagcaggacccttggactcgtgcccagggatcaagagcctagaggatcacattcgccccagagacctcagctgcattcccccgctcagagcgaagggccatcttctttgtgcggcaagctcaaacaggcgctgaagccctgtcctctggaggataagaagcctgaagattgtaaagtcccaccacgtcccctagaggcggagggcgctcagctgcaggggggttccaatgagtgggaggttgtggtgcaagtggaggacgacggcgatggggactatatgagcgaaccagaggccgtcctaacaagacgaaaatccaatgtgatcagaaagccttgtgcagccgaaccggctctttctgccggtagtcttgccgcagaacctgcggagaatagaaaagggaccgcggttccagtggaatag

SEQ ID NO: 30305 - DNA, 408 bp, synthetic construct
  source 1..408: mol_type = other DNA; note = Synthetic coding sequence
atggcagccttgcgtccactggtgaaacccaaaatcgttaagaaacgaacgaagaagttcatcaggcaccagtctgatcgatatgtgaagatcaagcggaattggcgaaaaccacggggaatcgataatcgggtcaggcggagatttaagggtcaaattctgatgccaaatattggctatggaagcaacaaaaaaacgaagcacatgctgccatccggcttcagaaaattcctcgtgcacaacgtcaaagagttggaggtgctgcttatgtgtaataaatcctactgcgccgaaatagctcataatgtgagttctaagaatcgcaaggctatcgttgaacgggcagcccagctagccattcgtgtgacaaatcctaacgctcgactgagaagtgaagagaatgagtag

SEQ ID NO: 30306 - DNA, 810 bp, synthetic construct
  source 1..810: mol_type = other DNA; note = Synthetic coding sequence
atgaaaacacctgtcgagttagccgttagcggcatgcagacactcggcctgcagcaccgctgcaggggcggataccgcgtgaaagccaggacttcttacgtggacgagacactgtttggtagccctgcagggacgagacccacaccaccagacttcgacccgccatgggttgagaaggccaacagaacccgaggagtcggtaaagaggcgagcaaggccttgggcgcaaaggggtcctgcgagacaacaccgagtcggggtagcacccctaccctgacaccaaggaagaaaaataaatacagacctatttcacatactccaagttactgtgacgaaagtctgttcggcagccggtctgagggagcttcattcggcgctccacgaatggctaaaggcgatgccgcaaaactccgggcactcctgtggactccgcctcctaccccccgtggctctcattccccgcgaccacgggaagcaccattgcgcgcaatccatccggcaggtccaagcaaaacagaaccgggaccggctgccgactcccagaagctttctatgggtggactgcacagcagtcggccactcaagcgtggcctctcgcattcactcacccatctaaacgtgccttctactgggcaccccgctacctccgcgccacacactaacggccctcaggatctccgaccctccactagcggggttacgtttagatctccgctggtgacctctcgggcacggtcggtgtcgatctcggtgccatctacccccaggcggggtggagccacccaaaagcctaaacctccctggaagtag

SEQ ID NO: 30307 - DNA, 840 bp, synthetic construct
  source 1..840: mol_type = other DNA; note = Synthetic coding sequence
atggtggaccatctggccaataccgagataaacagtcagagaatcgctgcagtcgagagctgtttcggcgctagcggtcaaccactggccttgccaggccgagttcttctgggcgaaggagtccttacgaaggaatgtcgcaagaaagccaaacctaggatcttctttctgttcaatgacattttggtatacggaagcatcgttctgaataaacgtaagtacaggtctcagcacattattcccctggaggaagttacgcttgagctgctgcccgagaccttgcaggccaagaataggtggatgattaagaccgccaagaagagcttcgtggttagtgcagcaagcgccaccgagcgacaggagtggatatctcacatcgaagagtgtgtaaggcggcagcttagggccaccggcagaccaccttcaacagaacacgccgctccttggatccctgataaggcgactgatatctgtatgcgttgtacccagactcgctttagtgccctgacacggaggcaccattgtcgcaagtgtgggttcgtcgtgtgcgccgagtgctcacgtcaaagattcctgctcccaagattgagtccaaaacccgttagagtttgctctctgtgctaccgcgagttggctgcccagcagaggcaagaggaggccgaagaacagggagccggttctccagggcagcccgctcatctcgctaggccaatttgcggagcctcctctggagatgacgacgactctgacgaagataaagagggttctcgggacggcgattggccatcgtctgtggaattctatgcctctggagtggcatggtcggcctttcattcctag

SEQ ID NO: 30308 - DNA, 279 bp, synthetic construct
  source 1..279: mol_type = other DNA; note = Synthetic coding sequence
taacggtccagcacttcgccctgtgggacctctaaaagcccgaacagagagtgggagggaaagtcagtggcctatatgccttacgctgaggtgaaacgggcactggaacaagaagcacagatgcacaacaccgccgctcgttcagcatccccatgcagactttcaccacgcgaggtatccaaggctgcccctcagccagatatgagcgccgctcggtacagcgtgcctcctgtgctacagcctgcaccacaccaggtgatcactaatcttcccgaatag

SEQ ID NO: 30309 - DNA, 771 bp, synthetic construct
  source 1..771: mol_type = other DNA; note = Synthetic coding sequence
atgagcaacaatctctccgaactcgatacgaagatacaggaaaaggctatgaaggtcgacatggacatctgtcggaggatcgatataactgccaaactatgtgatgttgcccaacaacgcaactgtgaggacatgattcaaatgttccagaaaaaactagtaccctctatggggggacggaaaagggaacggaaggcggctgtcgaggaggacacaagcttgtctgaatcagaaggcccaaggcagccagacggcgatgaagaagagagtactgcgttatctattaatgaggagatgcagaggatgctcaaccagctcagggaatatgacttcgaagatgactgtgatagcctgacctgggaggaaactgaggagacccttctcctgtgggaggactttagtggctatgccatggccgctgcagaggctcaaggtgaacaacaagaggattcattagagaaggttatcaaggataccgagtcactgtttaaaacaagagaaaaggaataccaggagactatcgatcaaatcgaactagagcttgccaccgctaaaaatgacatgaataggcacctgcacgaatacatggagatgtgtagcatgaagagggggctggacgtccaaatggaaacctgcagacggctcattacacagagcggggaccgcaagtcccccgcattcaccgcggtgccattaagcgatccccctcctcctccctccgaagcagaggactccgacagggacgtgtcttccgactcaagcatgcgctag

SEQ ID NO: 30310 - DNA, 1620 bp, synthetic construct
  source 1..1620: mol_type = other DNA; note = Synthetic coding sequence
atggccacatctgcgccactgagaagccttgaggaggaggtgacatgctcaatttgcctcgactacttgcgcgatcctgttaccatcgactgtggtcatgtgttttgccgcagttgtaccaccgatgtgagacccattagcggcagccgcccagtctgtccactgtgtaagaagccatttaaaaaggagaatatccgacccgtgtggcagttggcaagtcttgttgaaaacattgagagacttaaagtcgataagggtcgtcagccaggggaggtgaccagggagcagcaagatgccaaactctgcgaacgccatcgagagaagttgcactattactgtgaagatgacggtaagttgctgtgtgttatgtgtagggagtcccgcgaacaccgacctcacacagcagtacttatggaaaaagcagcacaaccacaccgggagaaaatcctcaatcaccttagtactcttcgcagagatcgggacaaaatccagggattccaggctaagggggaggctgatatactggcagctctcaagaaacttcaggatcagagacagtacatcgtagcagaatttgagcagggccaccagtttctgcgggagagagaagagcacttgttagagcaactggcgaaactggagcaggaactcacagaaggacgcgaaaaattcaaatcccgcggtgtaggggaattggccaggctcgcactggttattagcgagctggaaggaaaagctcagcaaccagctgccgaactgatgcaggacacacgcgatttccttaacaggtatcccagaaaaaaattttgggtgggcaagccgattgcgagagtcgtcaagaaaaagacgggggaattttccgataagcttctttctctgcagaggggtctgcgagaatttcagggaaaactgttgagagatctcgagtataagaccgtatcggtcactctcgaccctcagtctgccagtgggtatctgcagctgtccgaagattggaaatgcgtaacttatacaagcctctacaaaagtgcttacctgcacccacaacagtttgactgcgaacctggagtactcggcagcaaaggcttcacttggggcaaggtgtactgggaagtggaggttgagagggaaggctggagcgaggacgaagaagaaggcgatgaagaggaagagggcgaggaggaagaggaagaggaggaggcaggctacggagatgggtacgatgattgggaaaccgacgaagatgaggaatccctgggagacgaagaggaggaagaagaagaggaggaggaggaagtattagagagctgtatggtgggcgtcgcgcgagactctgtgaagcggaagggagatctcagtctgcgacccgaagacggggtgtgggccctgcggctatctagcagcggcatatgggcgaatactagcccggaggcagagctttttcctgctttgcgcccacggcgagtgggaatcgccctggattacgagggtgggaccgtcactttcacgaatgctgagtctcaagaactgatttataccttcactgcaacattcacgcgtcgactggttcctttcttgtggttgaagtggcctggtaccaggcttcttctgaggccatag

SEQ ID NO: 30311 - DNA, 750 bp, synthetic construct
  source 1..750: mol_type = other DNA; note = Synthetic coding sequence
atggcctttatgaccagaaaactttgggatctagagcagcaagttaaggcacagacagatgagatcctttcaaaggatcaaaagatcgctgccctcgaggacctggtgcagactctccggccacatcccgctgaggccacactgcagagacaagaggagctggagacaatgtgcgtacagcttcaacgccaagtgcgcgaaatggagaggttcctaagcgattatggcctccagtgggtcggtgaaccaatggatcaggaggacagtgagtctaagacagtcagtgagcatggtgagcgtgattggatgactgcaaagaaattctggaagcccggtgattcactggcaccgccagaggtggattttgaccggttgctcgctagcctgcaggacctctcagagctggtcgttgagggagacactcaggtcaccccagtgcccggaggcgcacgtctccgcaccctggagcctatccccctgaagttataccggaatggcattatgatgtttgacggtccctttcagccattttacgacccatccacccagaggtgcttgagagatatactggacggtttcttccctagcgaacttcaacggttgtatccaaacggcgtgcccttcaaggtgataagctgctcaagtaatcatactttcggagactttgagggaagtggagatacccaaccgcctcagacaccacctattctgaggggtagccggtgtacaccatgggggacacccgtctag

SEQ ID NO: 30312 - DNA, 2763 bp, synthetic construct
  source 1..2763: mol_type = other DNA; note = Synthetic coding sequence
atgagtgaggactcggagaaggaagactatagtgatcgcacgatttctgatgaggacgagagcgacgaagatatgtttatgaagttcgtttcagaggacctgcaccgctgtgcgctcttaacagcagattccttcggagacccattttttccccgtaccacccagatcctcctcgaataccagctgggacggtgggtgcccagactacgcgagccaagagacctttatggtgtgagttcctctgggcctttgagccccacccggtggccctatcactgtgaagtgatagacgagaaggtgcagcatatcgattggacaccaagttgccctgagcctgtgtacattccaaccggtctcgaaactgagcccctctaccctgattctaaagaggcaacagtggtttatctcgccgaagatgcatacaaagagccatgcttcgtgtacagcagggtgggcggtaataggaccccattgaaacagccggttgattatagagacaacactcttatgtttgaggccaggttcgaatccggaaatctccagaaagtcgtgaaagttgccgagtacgaatatcaactgaccgtgcgccctgacctctttaccaacaaacacacacagtggtactatttccaggtcacgaatatgcgtgctgggatcgtctatcgatttacaattgtgaactttacgaaacccgcttcactctattcccgagggatgcggcctttgttttattcagagaaagaagccaaagctcaccatattggctggcagaggataggcgatcagattaaatattaccggaacaatcctggacaggatgggcgacactatttttcccttacctggacgttccagtttccacataataaggacacgtgctactttgcccattgttacccgtacacgtataccaatctccaggagtatctgtcaggaatcaacaatgatccggttcggagcaagttctgcaaaataagggtcctatgtcacacactggccagaaatatggtgtacattctgacgatcacaacacctcttaagaactcagatagccgtaagaggaaagcagtgatcctcactgctcgcgtccaccccggagaaacaaactccagctggatcatgaaaggctttctcgattatatcctagggaactcatccgatgcccaattactgcgggacacatttgtgttcaaagttgtgccaatgctgaatccagatggcgtcatcgttgggaactatagatgttctctcgctggacgggatttgaatcggaattacacatcactcctgaaagagtccttccccagtgtgtggtatacccgcaatatggttcatagactcatggagaaaagagaggtgatcctgtattgcgacctgcacggacactcccgcaaggagaacatcttcatgtacggttgtgacggaagcgaccggtccaaaaccctctatctgcagcagaggattttccctctgatgttgagcaagaattgtcccgacaaattctccttttctgcatgcaaatttaatgtgcagaagagtaaagaggggaccggaagagtggtgatgtggaagatgggaatcaggaattctttcacaatggaagccacgttctgtggatccacactggggaacaaaagagggacccacttttcaacaaaggatttggaaagtatgggataccatttctgcgattccctcttagattattgcgaccctgaccggacaaaatactaccgctgtctgaaagagctcgaggaaatggagcgacatatcacattggaaaaagtttttgaggactctgatacacccgtaatcgacatcacacttgacgtggaatctagctctcgaggatcggactcctccgagagtatcgacagtctaacctatctcctcaagctaacctcccagaaaaagcatctgaagacaaagaaagagcgtaattccaccattgcatcccatcagaacgcgaggggccaagaggtgtatgaccggggacatctgctgcaacggcacacccagagtaattctgacgtgaaagacacaaggcctaacgaacccgacgattatatggttgactattttcggaggcaacttcccaaccagggtctagatctccaccataatcttaagagtaagatcaaagagtgcatctcattccaatccaaaaaaacaggaatcaactggacagacgatgaaaagagaagttataaagataaaggcatcgttcagactcaagagatactccagtacctgttgccgatcgtacattccacaaagaacatgcagaccacccagattaaacaactattcaacccaagaacgaacttccagatccagcatcagctgaatcccgctacatgccggaacattaaaaaatattcaacttcctggacagctcccagaaaccatccatttgtgatacagggcgacgttatggctaatagctcagaatgggtccagtcgaaaccgcacagaagcctggagtctttgtccccattgaaggggcctaaaaagaataagcactctcagatctgggccatcaagaatgaggatatcaagccactcagttccaagtgggaaaccgcttctagttccttcggcatggacgctaacgtgctgaaatacaagtccctccaagctgaagaaacgaatcagcagtctagcaaacacacagcactgcacctgactaagaataaggacgagcaggccaataagaatgacggccagcctactttgtatctgaaatttcagcgggaaagctag

SEQ ID NO: 30313 - DNA, 858 bp, synthetic construct
  source 1..858: mol_type = other DNA; note = Synthetic coding sequence
atgacaaacgctcagataattctgctgatcgacaacgcacgcatggcagtcgacgactttaaccttaagtacgagaacgagcatagctttaaaaaggatctggagatcgaagttgaagggctccgcagaacactggacaacctgacaatcgtgaccacggacctagagcaggaagtggaaggcatgcgaaaagagctgatcctgatgaagaagcaccatgaacaggaaatggagaagcaccatgtcccaagtgattttaacgtgaacgtcaaagtggatactggtcctcgcgaagatctgatcaaagtgctggaggacatgcggcaggagtatgaactcataattaaaaaaaagcatcgggacctggacacatggtacaaggagcagtccgctgctatgtctcaagaggccgcttcaccagcaaccgtgcagtctagacagggcgacatccatgagctgaaacggacttttcaggctttggaaatcgatctccaaacacagtacagtactaagtctgccctagaaaacatgctgagcgagacccagagtagatattcatgcaaactgcaagatatgcaggaaataatcagccactacgaagaagaactgacccagctgcgtcacgagcttgaacgccaaaacaacgagtaccaagtattacttggaatcaagacccacctggaaaaagaaatcaccacttacaggaggcttctcgaaggggaatccgagggtactcgggaggaaagcaaatcctcgatgaaggtctcagccacccctaaaatcaaagctataacccaagaaaccatcaatggaagactggtcctttgccaagtcaatgaaatccagaagcacgcctag

SEQ ID NO: 30314 - DNA, 2013 bp, synthetic construct
  source 1..2013: mol_type = other DNA; note = Synthetic coding sequence
atgtctccatgcagcgggggtagaggcgagctgcgggctgcctgcctgcaacctgaggtgcctggggctcctggactgtcctggtggccatccaccgctggtcttcgccagagtcagacagacttacagctgagcctgagcatctggtgtggtaaaaaaatggggtcgtatctgagcgtcccagcctatttcaccagtcgggatctgtttagatgctccgaatgtcaggacagtctgaccaattggtactatgaaaaagatggtaaactgtattgtccaaaggactattgggggaaatttggcgaattctgtcatggttgttctctattgatgacgggtcctttcatggtcgctggcgaatttaaatatcatccagaatgtttcgcctgcatgagctgcaaggtcatcatcgaggacggggatgcctatgctctcgtgcaacacgcgactctctactgtggcaagtgtcataatgaagtggttctagcccctatgttcgagaggctttccaccgaaagtgtgcaggagcagcttccctattcagttactctcatctccatgcccgcaactacggagggacggagaggattttcagtgtcggtagagtcagcttgtagtaattatgcaaccaccgtgcaggtgaaggaggtgaacaggatgcacatttcccccaataaccgaaacgctattcaccccggagatcgtattctcgaaatcaatggtactccagtaaggacgctccgggttgaagaagtagaggacgcaattagtcagacctctcagacactacagcttctgatcgagcacgatcctgtgtcccagaggctggaccaactcaggctggaagccaggctagctccccatatgcagaacgcgggtcatcctcacgcgttgtccaccctggacacaaaagagaacctggaaggcactttgaggcggaggagcctccgccgttcaaatagcatctccaaatctcctggtccttcaagtccaaaggaacctcttctcttttcacgcgatataagtcggtccgaaagcttgagatgcagctcgtcctactcccagcagatcttcagaccctgtgacctgatccacggggaggttctcggaaaaggtttctttgggcaggccatcaaggtgactcataaggcgacagggaaggtcatggtgatgaaggagctcatccgctgcgacgaggaaacacagaagacttttctgaccgaggtgaaggtgatgcgcagcctagatcacccaaatgtgctgaagtttattggcgtcttatataaagataagaagctgaatctcctgactgaatatatcgaaggtgggacactaaaagattttctcagatccatggaccccttcccctggcagcaaaaagtccgctttgctaaaggcattgcctcaggtatggcttacctgcactctatgtgcataattcacagagacctgaattcccacaactgcctgatcaaactggataagaccgtggtggttgccgatttcggtctgtcaagattgattgttgaggagcgcaagcgagcaccaatggagaaggccacgacgaaaaagagaaccttaagaaaaaacgatcgtaagaagagatacaccgtcgtcggcaatccatactggatggcccctgagatgctgaatggcaagagctacgacgagaccgtcgacatcttttcttttggcatcgtactctgcgagataatcggtcaagtctacgctgaccccgactgcttaccgaggacgctcgacttcgggctgaacgtaaagctcttttgggaaaagtttgttcccacagactgcccccctgccttctttcctctggctgccatctgctgcagactggaaccggagagcaggcctgccttcagtaaattagaggattcttttgaagccctgagtctctacctgggcgagctgggaattccgttgccagctgagctcgaggagttagatcataccgtgtcaatgcagtatggcctaaccagggacagccccccatag

SEQ ID NO: 30315 - DNA, 459 bp, synthetic construct
  source 1..459: mol_type = other DNA; note = Synthetic coding sequence
atggcgcacttgaggggcttcgccaaccagcattctcgcgttgaccccgaagagctgttcaccaagctcgaccgcattggcaagggatccttcggggaagtttataaaggcattgacaaccacacaaaggaggttgtcgctattaagataatcgacttggaggaggcagaagatgaaatcgaggatatccagcaggaaatcacggtgttatctcaatgtgatagcccatacatcactaggtacttcgggagctacctcaaatctaccaagctatggatcataatggagtacttgggaggaggttcggcgttagatctgttgaagcccggacctcttgaagagacctacatcgccactattctgcgagagatcctgaaaggccttgattatttacatagtgagagaaaaatacaccgcgatattaaggctgccaacgttcttctgagtgagcaggggtag

SEQ ID NO: 30316 - DNA, 1365 bp, synthetic construct
  source 1..1365: mol_type = other DNA; note = Synthetic coding sequence
atggcaccctgccgggctcgtacgggtccctccacttggcgtagtgctactagtagcacgcgacgcaggaaaggggctagaaggcatctgtctgcgctgcaggtcctggagacctgcgtgaaaaattgtggccatagatttcatgtccttgtggccagtcaggacttcgttgagtccgtgctcgtccggacaatcctgccaaagaacaatcctccaacgattgtgcacgacaaagtgttgaacctcattcagagctgggctgacgcttttaggagttctccagatctgaccggggtcgttactatctacgaagacctgagacgcaaaggccttgagtttcccatgaccgatcttgatatgctaagtcccattcatacccctcagcgaaccgtctttaacagcgaaactcagagcggccaggacagtgtgggtaccgattcttcacaacaagaggattcaggacagcatgccgcacccctgcctgccccaccaatcctgtccggcgacacgccgatcgcccctacccccgagcagatcggcaagctgaggtccgagctagaaatggtgtccggaaacgtacgcgttatgagtgagatgttgactgagttggtgccaacgcaagccgagcctgccgacttggagttattacaggagctgaataggacttgccgtgccatgcagcagcgggttcttgagctgataccacagatagccaacgaacagctgacggaagaactcttaatcgtaaacgataacctgaacaatgtctttttgagacatgagcggtttgagcgctttaggaccggacagacaaccaaggctccgagtgaagcagaaccagccgcagatttgatcgatatggggcctgacccggcagcaactggtaacctttcaagtcagctggccggaatgaatctagggtcaagctctgtacgggcaggactgcaaagtttagaggcatctggtcggctggaggacgaatttgatatgtttgctctgacaaggggatcaagtctggctgatcagagaaaggaggtgaagtatgaagcacctcaggctacagatggtttagccggagcactagacgccaggcagcagtcaaccggagccatcccagtcacacaggcttgcctgatggaagatattgaacagtggttatcaacagacgtcggaaacgacgccgaagagccaaaaggagtcacctctgaagagtttgacaagttcctggaagagagagcaaaagccgctgacagactgcctaatctgagctctccgtcagccgaagggccacccggtccaccatccggtcctgctcccaggaaaaaaactcaagagaaggatgacgatatgctcttcgcactgtag

SEQ ID NO: 30317 - DNA, 378 bp, synthetic construct
  source 1..378: mol_type = other DNA; note = Synthetic coding sequence
atgcagaccagcagtagccggtcagtgcacttgtcagaatggcaaaagaactactttgcgatcacctcaggcatctgcacaggtccaaaagccgacgcctatcgtgcgcagatactgaggatccagtacgcttgggccaacagcgagatttctcaggtatgcgcaacaaagctattcaagaaatacgcagaaaaatattccgcaatcatcgactcggataacgtggagtccggcctaaacaattacgctgagaatatactgaccctcgcaggatcccagcagaccgatagcgacaaatggcagagcggactaagcatcaacaacgtgttcaaaatgtcctctgtgcagaaaatgatgcaagcgggtaagaagttctag

SEQ ID NO: 30318 - DNA, 30 bp, synthetic construct
  source 1..30: mol_type = other DNA; note = Synthetic coding sequence
atgtctcaccttcagagcttgcttctgtag

SEQ ID NO: 30319 - DNA, 270 bp, synthetic construct
  source 1..270: mol_type = other DNA; note = Synthetic coding sequence
atgtccgagcagggggacctgaatcaagccattgccgaggagggaggaaccgagcaggagacagcgacaccagagaacggaatagtgaagtccgaatctctggatgaagaagagaaactcgagctccagcggcgactggaggcacagaaccaggagcgacgaaaatcaaagagcggagcaggcaaaggaaagctcacacgctccttggccgtttgtgaggagagctccgcccgacctgggggagagtctctccaggaccagaccctgtag

SEQ ID NO: 30320 - DNA, 3732 bp, synthetic construct
  source 1..3732: mol_type = other DNA; note = Synthetic coding sequence
atgctaattaaggagtatcacattttgttgcctatgagtcttgatgaataccaggtcgcccagctgtacatgatccagaaaaaaagccgagaggagagcagtggcgaaggatcgggcgtagagatcctggcgaatcggccatatacagatggtcctgggggaagtggccagtatacccataaggtctaccatgtcggaagccacattcctggctggttccgggcactgcttcccaaggcagccttacaggtggaggaggagagttggaatgcatatccctacactcggactcgctatacatgcccttttgtcgaaaaattctctatcgaaatcgagacttactaccttcctgatggcggtcagcagccaaacgtttttaaccttagcggagccgagcggaggcagagaattttggacaccattgacatagtcagagacgcggtcgccccaggcgagtacaaggctgaggaagatccacgcctctaccacagtgtgaagacaggtcgcggaccactgtcggacgattgggcaagaacagccgctcagaccgggcctttaatgtgtgcttacaaactgtgcaaagtagaatttcggtattggggcatgcaggcgaaaatcgagcaattcatccacgatgtaggtctccgacgggtaatgttgcgggcacatcgccaggcttggtgctggcaggatgagtggaccgagttatcaatggcagatatcagggccttggaagaagagaccgcccgtatgctggcgcaacggatggccaaatgtaataccgggtcagagggcagcgaggcccagcccccaggtaagccttctactgaagctagaagtgccgcttctaacactggaacaccagatgggccagaagcacctcctgggcctgacgcttcccctgatgctagtttcggtaaacagtggtccagctcttccaggagctcctacagctcccagcacggcggtgctgtgagcccccagagcttgagcgagtggcgtatgcaaaacatcgccagggattcggagaattcctcagaggaagagttcttcgacgcacacgaggggttttctgattctgaggaagtgtttcctaaagagatgactaagtggaacagcaatgacttcatagacgcctttgcatccccggtagaagccgagggcacaccagagcctggggctgaggccgctaaaggcatcgaagacggcgcacaggcccctcgagactcagagggattggacggtgccggagaactgggtgccgaggcttgtgcagttcacgccttattccttatactccactccgggaatatcctggactcgggcccaggagatgccaatagcaagcaggccgacgtccagacactgtcgtctgcatttgaggcagtcacgcggatccattttcccgaggccctgggccatgtggctttaagattagtgccgtgcccacccatctgcgccgcagcttacgctctggtgagcaacctgtctccttattcccacgatggtgattctctgtctaggtcacaagaccatatacctctcgccgcactccctctgttggccactagtagctccagataccagggagcggtagctaccgttatcgcgcgtactaaccaagcctattctgcctttcttaggtcacctgaaggcgcagggttctgcgggcaagtggccctgataggggacggcgtgggcggtattctgggctttgatgcattatgtcactctgccaacgccggtactggctcccggggttcatcaagacgcggatcgatgaacaacgagttgttgtctcccgaattcggccctgtcagagatcctctcgccgacggagtcgaaggactgggcaggggatctcccgagccctcggccctgccaccccagcggataccctccgatatggcctccccggagcctgaaggcagtcagaacagccttcaggctgctcccgcaactaccagctcttgggaaccaaggcgtgccagcacagcgttttgcccccctgctgccagttccgaagctcctgacgggcctagttcaacggctagactagacttcaaagtgtcagggttttttctgttcggctcccctctgggcctcgttctggccctcaggaaaacagttatgcctgccctggaggcccagatgagacccgcttgcgagcagatatataaccttttccatgccgcagacccatgcgcctcacggctggagcccctgctggcccctaagttccaggccattgctccccttacagtgccacgataccagaagtttccacttggggatggaagcagcctgttgttagcggacacactgcagactcatagctctctttttttggaagagctggagatgctggttccaagtaccccaaccagcacctccggggcattctggaaaggctccgagctggctaccgatcctcctgctcagcctgcagccccatctacaacatccgaggtggtaaagatcctggaaaggtggtggggtactaaacgcatagattactctctctattgccccgaggccctgactgccttcccgaccgttactctgccccatctattccacgcatcatactgggaaagtgctgatgtcgttgctttcattctgagacaagtgattgagaaagaacggcctcagctagccgagtgcgaagagccctcgatctatagccccgctttccccagggagaagtggcaaaggaagcggactcaggtgaaaatccggaatgtgacaagcaaccatcgcgcatccgatactgttgtgtgtgaaggtcgccctcaggtgttaagcggaaggtttatgtacggacctctagacgtagtgacgctgactggcgagaaggttgacgtgtatattatgacccagcctttaagcgggaagtggatccattttggcactgaagtgacgaacagcagtggccgtctcacatttcccgttcctcccgaacgcgctcttggaattggagtgtatcccgttcggatggtggtcaggggcgatcatacatacgccgagtgttgtctgactgtggtggcccgaggcacagaagccgtcgtcttctccatagacggcagttttacggcttcagtctccattatgggaagcgacccgaaggtcagagcgggtgcggtcgacgtagttcgccactggcaggacagcggctatctgatcgtttatgtgactggaaggccggacatgcagaagcatagagtggtagcgtggcttagccagcacaatttccctcacggagtggtctctttttgcgatgggctcacccacgatcctcttaggcaaaaagctatgttcctgcagtctctcgtccaggaggtcgagttgaatatagtggccggatatgggtctccgaaggacgtcgctgtttacgctgctttgggtctgtcgccctcacagacgtacatcgttggacgcgctgtaagaaagttgcaggcacagtgccagttcctttcggacgggtacgtggcccacttgggccagctagaggccggttcccatagtcatgcaagttccggacccccaagagctgcccttggtaaatcaagctatggagttgccgcacctgtcgatttcctccgcaagcagtcccagttactccgttccaggggcccaagtcaggccgagcgagaaggtcccggaacccctcccacgaccctcgctcggggaaaggctagaagtatttccctgaagctagactccgaggagtag

SEQ ID NO: 30321 - DNA, 1614 bp, synthetic construct
  source 1..1614: mol_type = other DNA; note = Synthetic coding sequence
atgagtagttcaggctatcctcctaaccaaggcgctttctctactgaacagagcaggtatccgccacattctgtgcagtatacttttccgaatactcgacaccagcaagagttcgctgtgcccgactatcgctcttcccaccttgaggtttcccaagccagtcagctattgcagcagcagcaacagcagcagctgcgacgaaggcctagcctgctgtctgaattccacccgggatccgaccgccctcaggaacgcagaacttcctacgaaccattccacccgggaccatcacccgtcgatcacgattcactggaatcaaaacgccctcgattggaacaagtttctgattcacactttcaacgggtctccgccgctgtgctaccgctggtgcatcccttaccggagggcttacgggcttcagctgatgccaagaaagacccggcatttgggggtaagcacgaagccccaagcagtcctatctcaggccagccttgcggagacgaccagaatgccagtccatctaagctttccaaagaagagttgatacagagcatggatagggtggatcgtgaaatcgcaaaagttgaacagcagatcctgaagctcaagaagaagcagcagcagctcgaggaggaagcggcaaagccaccagagcccgagaagcccgtgagtccacccccagtggaacaaaagcaccggagtatcgtgcagatcatttacgatgaaaaccgaaaaaaagctgaagaggcacataagatcttcgaaggattgggcccaaaggtggagctgccgctttataaccaaccttccgatacaaaagtgtaccacgagaatatcaaaaccggcgtacctgcacgtcgtatgatgaagaatcaggtgatgagaaagaagctgattcttttcttcaagcgaaggaaccacgccaggaagcaaagagaacaaaagatatgccagagatacgaccagctgatggaagcctgggagaaaaaggtggatcgtatcgaaaataacccaaggcgaaaagccaaagaaagcaagacacgtgagtactacgagaagcagttccctgaaatacgcaaacagcgcgagcaacaagaaaggttccagagggttggccagcggggagcaggcttaagcgctactatcgctaggagcgaacacgagatctcggaaattatcgatggcctgagcgagcaagagaacaacgagaagcagatgagacagttgagcgtgatacctcccatgatgtttgacgccgagcaaaggagggttaagttcatcaatatgaacggtctgatggaggaccctatgaaagtttacaaagataggcagttcatgaacgtttggaccgatcatgaaaaggaaatttttaaggacaaatttatccagcatccaaaaaatttcggtttgatcgcctcctatctggagcgtaagtccgtacctgactgcgtcctgtactattaccttaccaaaaaaaacgaaaattacaaagctttggtgcgcagaaactacggaaagagacggggtcggaatcaacagatagccaggccctcacaggaggaaaaggtggaagagaaagaagaagataaagccgaaaagacagaaaaaaaatag

SEQ ID NO: 30322 - DNA, 147 bp, synthetic construct
  source 1..147: mol_type = other DNA; note = Synthetic coding sequence
atggaggacttatttgagactttccaggacgaaatggggttctctaatatggaagacgatgggcctgaggaggaggagcgagtggcggagcctcaagccaactttaacacaccccaagccctgcgccagttgctcctccttatgtag

SEQ ID NO: 30323 - DNA, 798 bp, synthetic construct
  source 1..798: mol_type = other DNA; note = Synthetic coding sequence
atggccagctccagcgtgccaccagcaacagtgtccgccgctaccgcaggaccaggacccggattcggcttcgcctccaaaacaaagaagaagcattttgtacaacagaaggttaaagtgtttagagcagcagatcctctggtaggggtttttctatggggcgttgcacatagcataaatgagctgtctcaggtcccccctcccgtcatgctccttccagatgactttaaggccagcagcaagatcaaagtgaacaaccatctgttccacagagaaaatctcccatcccacttcaaatttaaagagtattgccctcaggtgtttcggaatctgcgggacagattcggtattgacgaccaagattatctcgtgtctctcacccggaatccaccgagcgaaagtgaggggtcagacggacggtttctgatcagttatgaccgcaccctagtgattaaggaagtcagctctgaagacatagccgatatgcattccaatttatcgaactatcatcagtacatcgttaaatgtcacggaaacacactccttccacagtttctcggtatgtaccgcgtttctgttgacaacgaagatagttacatgttggtaatgcggaacatgttctcccacaggttgcccgtgcatcgcaagtatgacctgaaagggtctttggtgagccgcgagcctgctatcagaaaacggctgaaaaactgcccgcctctacgtatctggacattttcgacccgaaccagaaagtatattttggtgaaaaggcgaaggaaatatttttggagaagttag

SEQ ID NO: 30324 - DNA, 462 bp, synthetic construct
  source 1..462: mol_type = other DNA; note = Synthetic coding sequence
atgagcccggaagtcgctctcaatagaatttctccaatgctcagtccgttcatttcttcggtggtgcggaacggtaaggtaggtttagacgccaccaattgcttaaggatcactgatttgaagagtggctgtacttctctcacacccggtcccaactgtgataggttcaagctgcatattccttatgccggagagactcttaaatgggatattatcttcaacgctcaataccctgagctaccacccgattttatctttggagaggacgcggaattcctgcccgaccccagtgcccttcagaacctcgccagttggaatccgagtaatcccgagtgcctgttgcttgtggtcaaagagttggttcaacagtaccatcagttccagtgctctcggctgagggagagttctcgcctaatgtttgagtatcagaccctgctggaggagccacaatatggcgaatag

SEQ ID NO: 30325 - DNA, 78 bp, synthetic construct
  source 1..78: mol_type = other DNA; note = Synthetic coding sequence
atggaactccggtgcggaggactcttgttttcaagcaggttcgattccgggaatctggctcatgttgaaaaagtctag

SEQ ID NO: 30326 - DNA, 228 bp, synthetic construct
  source 1..228: mol_type = other DNA; note = Synthetic coding sequence
atggccagcgaagtgggccataatttggaatccccggaaacacctggtggcggaggatggacccgggtggaatttcctccccctgcccctaaaggcgcagcaacagtgtggtgcctgaatcgtttgggatcccgcaagctgagcttgatctggatcacttttaacaccggctggaatatgaagtctcgcctgattattttgatccagcaggtctcatgccaccactag

SEQ ID NO: 30327 - DNA, 1620 bp, synthetic construct
  source 1..1620: mol_type = other DNA; note = Synthetic coding sequence
atggcaacgtctgctcccctcagatctctagaagaggaagtcacgtgcagcatctgcctggattatttgcgagacccggtgaccattgattgtgggcatgtcttttgtcgttcttgcaccactgacgttaggccaatcagcggatcgcgtccagtgtgccctctctgcaagaagccttttaagaaggagaacatcagacctgtttggcaattggcctcattagtggaaaacattgaaagactgaaagtggacaaaggacggcagcccggagaggtgactcgggagcagcaagatgccaagctgtgcgaacgacaccgcgaaaagctccattactattgtgaggacgacgggaagttgctctgtgtgatgtgtcgagagagcagggaacacagaccccatactgccgtgctgatggagaaagccgcacagccacatagagaaaagatcttaaaccatctctccacactgaggcgggatagagataagatccaggggttccaggctaagggtgaagctgacatactggccgcacttaagaaattgcaggaccaaaggcagtacattgttgctgagttcgagcaaggtcatcaattcctccgagaacgtgaggaacaccttttggaacagctggccaaactcgaacaagagctcacagagggacgtgaaaaatttaagtccagaggagttggagagctggccaggttggccctcgtgataagtgaactggagggaaaagcacagcagccagccgctgaactgatgcaggacacccgcgacttcctaaatcgttaccctaggaaaaagttttgggtggggaagcctatcgcccgagtggttaagaaaaagaccggagagttcagtgataaactcctttcattgcaacggggtctccgagaatttcagggaaagttgcttagggatctggaatataagacagtttctgtgacgctcgatcctcagagtgcttctggttatttacagctaagtgaagactggaagtgcgtcacatatacctcattgtacaaatcagcctacctgcacccacagcaattcgactgcgaacctggggtccttggctcgaaaggctttacgtggggcaaggtttactgggaggtcgaggtggagagagaagggtggagcgaagatgaggaagaaggtgatgaggaggaggaaggcgaagaggaggaggaggaggaggaggcaggttacggtgatggctacgatgattgggagacggacgaagatgaagagagcctgggtgacgaggaggaagaggaggaggaggaagaagaagaagttctggagtcttgtatggtgggtgtcgcaagagactccgtcaaacggaagggcgacctgtctctcagaccagaagatggggtttgggcgttgcgcctttcttccagcggcatctgggcgaacaccagtccggaagctgaattattcccagcattgaggcccagacgtgtcgggatcgctctggattacgaaggaggcactgtgactttcacaaatgccgaatctcaggaattaatttatactttcaccgcaaccttcactaggagactggttcccttcctctggttgaagtggccaggtactcgcttactgcttcgcccatag

SEQ ID NO: 30328 - DNA, 390 bp, synthetic construct
  source 1..390: mol_type = other DNA; note = Synthetic coding sequence
atgcctggcctatcctgcaggttctatcagcacaagtttcctgaggttgaggatgtagtgatggtgaacgtaagatccatcgctgaaatgggggcttacgtcagtctcctggaatataacaatatagaaggaatgatcctcttatcagaactaagccgcaggagaattagatctattaacaagcttatccggattgggagaaatgaatgtgtcgtggtgatcagagttgacaaggagaaagggtatatcgacctcagcaagcgcagacttactctgtgggagacggagtctaacctgcgaaatacagagcagcgcttcctggctgtgaaccctcgtctcgaatctttcccagtgctcaaaactagtaaactaaacatattttatttttag

SEQ ID NO: 30329 - DNA, 1842 bp, synthetic construct
  source 1..1842: mol_type = other DNA; note = Synthetic coding sequence
atggccactatacctgactggaagctccagctcctcgccaggcgcagacaggaggaggccagtgttaggggccgtgagaaggcagagagggagcgtttatcccagatgcctgcttggaagcgcggattactggagagacgtcgggctaaactcgggctgagccccggagaacccagcccagtgctagggaccgttgaggcaggacccccagaccccgacgagagcgctgtgctgttggaggctattggtccagtccatcagaaccgtttcataagacaggagcggcagcagcagcaacagcaacaacagcgcagcgaagaattattagccgagcgcaaaccgggaccccttgaagcaagggagcgcagaccttctccaggcgaaatgcgagaccaaagccctaaaggaagagaatccagagaggaaaggttatctccacgcgagactagggagcggagattgggcattgggggagcccaggaactctccctgaggccgctggaagctcgcgattggcgccaatctccaggggaggttggagataggagctcccgcctatcagaagcatggaagtggcggctctctccaggtgagacccccgaaaggtctctgcgcctggccgaatcaagggagcaatctccaaggcgcaaggaggtcgagagccggctctctcccggagagtcagcgtaccagaagctcggcctgaccgaggcgcataagtggcgtccagacagtagagaaagtcaagaacagtccctggtgcagctcgaggccactgaatggcgcctccgcagcggggaggagcgacaggactattctgaagagtgcggcagaaaggaagagtggccggttccgggagttgcaccaaaggaaaccgctgaattatctgagaccctgacgcgcgaggcgcagggtaacagtagcgctggggtggaagctgccgaacaaaggccagttgaagacggggagcggggaatgaaacctacggagggctggaagtggaccctgaatagtggaaaggctcgggagtggacgccaagggatatcgaagcacagacccagaagcccgagcctcccgagtcagcagagaaactactggagtctccgggtgtcgaggccggtgagggcgaggcggagaaagaggaggctggcgctcaaggccgacccctcagagctctccaaaattgttgttccgttcccagccctctgccccctgaagacgcaggcaccggcggacttaggcagcaggaagaggaagctgtggaactgcaaccccctcctcctgcaccactgtctccaccccctcccgcacccacagctccgcagccacccggtgacccattgatgagccggcttttctatggcgtcaaggctggtcctggcgtgggagcacctagaagaagtggccatacttttacggtcaacccacggcgaagcgtgcccccagcgacacccgctaccccgacctcacctgctactgtggatgccgcagtgccaggtgcaggtaagaaaagatatcccacagctgaagagatcttagtgctgggcggttacctccgcctctcacggtcttgtctggccaaagggtcacccgagaggcatcacaaacagctgaagatctcgttttctgagacggcactggagacaacctatcaatatccctctgagtcgagcgttctggaagagttggggcctgagcctgaggtcccttcagctcctaaccctccggctgcccaaccggacgatgaggaggatgaggaggaactactcttgctgcagcccgaactacaagggggtcttcggacgaaggcgcttatagtggatgaatcctgtcggagatag

SEQ ID NO: 30330 - DNA, 1983 bp, synthetic construct
  source 1..1983: mol_type = other DNA; note = Synthetic coding sequence
atcgcgaaacctcagggaacataccaagtgcttcctcccaacaccggttctctgtacattgataaagattgtagcgctgtgtactgtcacgaaagtagttctaacatatactatcctttccagaaacgcgaacagttacgggctggccgttatatcatgagacatacttcagaggttatctgtgaggtgctggatccggaggggaacacattccaggtcatggctgacggatcaatcagcacgattcttcccgaaaagaagcttgaggacgatttgaacgagaagactgaaggctatgactccctaagctctatgcaccttgagaagaatcaccagcagatttacggggaacatgtgcccaggtttttcgtgatgtatgctgacggttccggcatggagctgctgcgagactctgacatcgaagaatacctgtctcttgcgtataaggagtccaataccgtagtgctgcaagagcctgtgcaagaacagccgggaaccttaacaattaccgtgttgagaccttttcatgaagctagtccttggcaggtgaaaaaagaggacaccattgtgccccctaacctgagaagtcggtcctgggaaaccttcccgtcggtagaaaaaaagacccctggcccaccgttcgggacgcaaatctggaaagggctctgcatcgaatctaagcagctggtctctgcaccaggcgcaatattgaaatccccaagtgtactccagatgcgccaattcattcagcacgaagtgattaaaaatgaggtgaaactcaggctgcaggtctcactcaaggactatattaactacatactcaaaaaggaagatgagctgcaggaaatgatggtaaaggacagtcgcacagaggaagagagaggcaacgccgcagatctgctgaaattggtgatgagcttccccaagatggaagagaccaccaaaagccacgtgaccgaggtcgccgctcacctgacagacctgttcaagcagtctcttgcaacgccaccgaaatgtccccctgacacatttggaaaagatttctttgagaaaacatggagacacactgccagctctaaacgttggaaggagaagattgacaagacaagaaaagagatcgaaacgacccagaactacctgatggatatcaagaatcgcatcatcccacctttttttaaatctgaactcaatcaattatatcagagccagtacaaccatttggactccctatccaaaaaactacctagcttcactaaaaaaaatgaagatgcaaatgagactgcggtgcaagatacatccgatcttaacctggattttaaacctcataaggtcagtgagcagaagtcctccagtgtgccttctctgccaaagcccgagatctcggcagacaaaaaggatttcaccgcgcagaatcagaccgaaaaccttacaaagtctccggaggaggccgagtcctatgaacctgtgaagattcccacacaatccctgctgcaagacgttgccggtcagactcgaaaagaaaaagtaaagcttcctcattaccttctctcttctaagcccaaaagccagcctcttgccaaggttcaggattcagtaggcggaaaggtgaacacgagcagtgtggccagcgccgcaatcaacaatgccaaatcaagtctgtttggtttccatctcctcccctcaagcgttaaattcggagtgctgaaggaaggccatacctacgccactgtggtgaagctcaagaacgtaggcgtggacttctgcaggtttaaggtaaaacagccacctccaagtacagggctgaaggtgacgtataaaccaggaccagtagccgcaggaatgcaaacggaactcaatattgaactgtttgccaccgctgtgggcgaggatggcgcaaaggggtccgctcacatctctcataacattgagattatgactgagcacgaagtcttgttcctgcctgtggaggctaacatcctgtag

SEQ ID NO: 30331 - DNA, 2475 bp, synthetic construct
  source 1..2475: mol_type = other DNA; note = Synthetic coding sequence
atgtattctaacgaggactccagacagactattgtatatagcgaggagtccaatactacgatgtcctatactcagaagatcacaaaccctctgcctgcggcaagctccactgatccagctcccttcgcgaacatcaatacgccagtattgcaggaggattatcgccaggactcccaaacaagaaggatcagcacactgaagctgacccacaatcaagaccttggctcctcgagcccaatttccactccacaattttctaaatccgttgaagttccatcctttcttaaaagaccaaggtccctgacccctaatcctgtgcccgagacccacacggcctctctctcaatccagattgcacccctctccggccaggacttagagtctcacaagcagcttcccgaactcagccccgaaaccgcaaagatccctttgcagcaggaacggcaaaaatctgccgttgctgcagccagtcagagtagtgattgcagagttagccagattacagttaatggcaacagtggcggagctgttagtcctatgagttattatcaaaggcccttttcgccttcagcctattccctacccgcatctctcaacagcagcatcgttatgcagcacggcacgtctctcgactcaactgatacatacccacagcacgctcagtctttggatggtacaactagttctagcatccccctgtaccgcagcagtgaagaggagaagagagtgactgtcatcaaggcccctcactatccagggatcgggcctgttgacgaaagcgggatacccaccgccatccgcactaccgtggacaggccaaaggattggtataagacaatgtttaaacagattcacatggtccacaagcctgacgacgacacagacatgtacaacaccccttacacctataatgccggtttgtacaaccccccttactccgcacagtctcatccggcagctaagacacagacgtaccgacctctgagcaagtctcattccgataactctcctaacgcattcaaagacgcttcaagtccagtgccgccaccacacgtgccgccaccagtgcctcctctccgaccacgcgatagatcatcaaccgaaaagcatgattgggatccccctgataggaaagtggatacccgcaaattccgttctgagcccaggagcatattcgagtatgagccgggaaagtcctcgattttgcaacatgagcggccacctcctctgcccacgacccccaccccagtgccacgagagccaggacgtaagccactaagcagttccaggttgggcgaggtaactggaagcccctcaccccctcctcggagtggagcccctaccccctcaagccgggctcctgcattgtcgccaactaggcctccaaaaaagcctctagattatgtgcaagaccattcttcgggcgtgtttaatgaagcatccctgtaccagtcctctattgaccgcagcctggagcggcctatgagttccgcaagtatggcgtctgactttcgaaagaggcggaaaagtgagcctgctgtagggcctccgaggggactcggggatcagagcgcatcgcgcacatcacctggccgagtggacctacccggatcgtcaacaactctgaccaagagcttcacttcaagttcacccagttctccaagcagagccaaagatcgggagagcccgagatcctactcctcgactctgacggacatggggagatctgcccctcgggaacgtcgcggaacccccgagaaggagaagctccccgctaaggccgtgtacgatttcaaggcgcaaacctctaaagaattatcatttaagaagggggatactgtgtacatcctcaggaaaatcgaccagaactggtatgagggggagcaccacggacgtgttggcattttccctataagctacgtggagaagctgactccacctgagaaggcacagcctgctagacctccacccccagcccagccaggggagataggggaggctatcgccaagtacaattttaacgcagataccaacgtcgaacttagcctgaggaaaggcgacagagtgatcctcttgaaaagggtcgatcagaactggtatgagggtaagattcccggaactaatcggcagggtatcttccctgtttcttatgtcgaggtcgtaaagaaaaacacgaagggcgcagaggattaccccgatcctcccatcccacactcatatagctctgatcggatccatagtctgagtagcaacaagccccagcgacccgtattcacgcacgaaaatatccagggcggaggtgaacctttccaggctctctacaactatacaccgagaaatgaagacgagctggagcttcgagagtcagatgtaatcgatgtgatggagaaatgcgacgatggctggtttgtgggaacctcgcgaagaaccaaatttttcgggacattcccgggaaattacgtgaaaagactctag

SEQ ID NO: 30332 - DNA, 228 bp, synthetic construct
  source 1..228: mol_type = other DNA; note = Synthetic coding sequence
atgaggtactacgggtcctattaccggggtctgggatacgggtgcgggggatttgggggattgggatatgggtgcggttgtggtgggtaccgatatggatcgggctatgggggatatcgatatggctgttgccgaccatcatgtagggaggggtatgggttttcagggtttaagaagcttgcggattcgcataccctgaccccacggagctgcccctatgcttcttag

SEQ ID NO: 30333 - DNA, 183 bp, synthetic construct
  source 1..183: mol_type = other DNA; note = Synthetic coding sequence
atggtattaatcctgggcagaagactgaatagggaagatctgggggttagggactcacctgcaacaaagcgaaaggtgtttgagatggacccaaaatccttgacaggacacgagttctttgattttagtagcggaagctctcatgctgagaacattctacagatttttaatgaattcagatag

SEQ ID NO: 30334 - DNA, 600 bp, synthetic construct
  source 1..600: mol_type = other DNA; note = Synthetic coding sequence
atgaagctcgggaagaagcctatgtataagcccgtggacccttacagtaggatgcagagtacctacaattataatatgaggggaggggcttatcccccacgatacttctaccccttccctgtgcccccactgttgtaccaagtcgagctctcagtggggggtcagcagttcaacgggaaggggaaaacccggcaggccgctaagcatgatgctgcagccaaggcccttaggatccttcaaaatgagcccctcccggaaagactcgaggtaaatggacgggagtccgaagaggagaacctgaataagtcagaaatctcccaggtgtttgagattgcgctcaaacggaacctgccagtcaatttcgaaagcttcccactgaaacaggtggctagagagagtgggcctccacacatgaaaaattttgtgacaaaggtttccgttggcgaatttgttggcgaaggagagggtaaatccaaaaaaataagcaagaagaatgctgcaattgctgttctcgaggaactcaagaagctgcctcccctgccagccgtggaaagggttaagcctagaatcaagaagaagacaaaacccatcgtcaagtag

SEQ ID NO: 30335 - DNA, 2685 bp, synthetic construct
  source 1..2685: mol_type = other DNA; note = Synthetic coding sequence
atgcctgaacagttctccgtagcggaattccttgccgttactgccgaagacctgagtagtccggcaggcgcagcggcatttgccgctaagatgccacggtacagaggtgccgctttagcacgcgaagagatcctcgagggtgaccaggctatactgcagcgtattaagaaggcagtgagggccatccactcttccggcctgggacatgtcgagaacgaggagcagtatagagaggcggtggagagcttaggtaactcacatctgtcccaaaactctcatgagttgagtaccgggtttctgaatctggcagtgttcacccgtgaggtcgcagctctgtttaaaaacctgatccagaacctgaataacatagtatcttttccattggacagtttgatgaaggggcagttacgcgatggacgccaggcaagtttgtctttgggaagtcgagctaagctggaaaaagaacgcgaccgggctagagtcacaggtggcatccctggtgaagtggcacaggacatgcagagagagaggaggatctttcaacttcacatgtgcgaataccttctgaaggccggagagtctcagatgaagcaaggaccggatttcttgcagtccctgatcaagttctttcatgcacagcacaactttttccaggacggctggaaggccgctcagtcactttttcccttcatcgagaagttagctgccagtgtgcacgctctgcaccaggcgcaggaagacgaactacagaaactgacacagctgagagactcgttgcggggaaccctgcaacttgagtcacgcgaagagcatttgagtcggaagaacagcggctgcggctacagcatacatcaacatcagggcaacaaacagttcgggaccgagaaggtgggctttctgtacaagaagtccgacggaatcaggagagtctggcaaaagagaaagtgcggggtaaagtacggttgcttgaccattagccattccacaataaaccgtccccctgtcaagctgaccctgttgacctgccaagtccgccctaacccggaagagaaaaagtgttttgacctggtaacgcacaaccgaacataccattttcaagctgaggatgaacatgagtgcgaggcttgggtgagtgtcttacagaatagtaaggacgaagctctctcaagcgcctttcttggcgagccctcagccggacctggatcttgggggtccgcgggtcacgatggagagccacatgatttgactaaattgctgattgccgaggtcaaaagtcggccaggtaatagccagtgctgcgattgcggagccgcagaccctacctggctgagcaccaatctcggtgtcttgacctgtattcagtgtagcggtgttcatcgggagttgggagttcggtttagccgcatgcagagcttgaccttggacctgctgggaccgtcagaactgcttttggcattgaacatggggaatacctcatttaacgaggtgatggaggctcagctgccatcccatggaggacctaagccaagcgctgagtctgatatgggaactagaagagactacatcatggccaagtacgtcgagcatagattcgccaggagatgcaccccagaacctcaacggttgtggacggccatctgtaacagggacctgctctccgttctggaggcattcgcaaatggacaggacttcggccagccactccccggaccggatgcccaagcccctgaagaacttgtgcttcatctcgccgtgaaggtcgccaaccaggcatccctgcctctggtagattttatcatacagaacggcggacacctggacgccaaggcggctgacggaaatactgccctgcattacgccgcattatacaaccagccagactgtttgaaactcctactcaagggtcgggcactggtaggcaccgtgaacgaagccggagagactgccctggacattgccagaaaaaaacaccataaggagtgtgaagagctcctggagcaggcacaagctggaacattcgcatttccgctccatgtggactacagttgggtcatctccactgaacccggatctgattccgaggaagacgaggaggagaagcgatgcctgctaaaactgcctgcccaagctcattgggcaagtggcagactggatatttcgaataagacctatgaaactgtggcctcgctcggggctgcaaccccccaaggtgaatccgaagactgtccacctcctcttcccgtgaaaaattctagcagaaccctggtgcaaggctgtgctcgacacgcctcaggcgaccgctccgaagtctcatcgctctcatccgaggctccagagacaccagaatcgctgggctcacctgcatcttcctcttccctgatgagtccactggaacctggggacccaagccaggcacctccaaattccgaagaggggttgcgagaaccacctggaacaagccgccctagtctgacttccgggactactccctccgagatgtatttacctgtgcggttctccagtgagtcaactcggagttaccggcgaggtgccagatcacctgaagacggaccgagcgcgcgacaacctttgcctcgccgaaacgtcccagtcggcattaccgaaggtgacgggtctcgaaccggatcattgcctgctagctccgttcagttactgcaggattag

SEQ ID NO: 30336 - DNA, 354 bp, synthetic construct
  source 1..354: mol_type = other DNA; note = Synthetic coding sequence
atggcgttcagtggaagagcacgcccatgcattatccctgaaaatgaggagatccccagagcggcactgaacacagtccacgaggccaatggtaccgaagacgagcgcgctgtgagcaaactgcagcggcgacactccgacgtcaaggtctacaaggagttctgcgatttctatgcgaaattcaatatggcaaacgcacttgcatcagccacctgtgagcggtgcaaggggggatttgctcctgcggaaacaatcgtgaactccaacggcgagctctaccatgaacagtgcttcgtgtgtgcgcagtgctttcaacagttccctgagggtctgttctatgaggaaaggacatag

SEQ ID NO: 30337 - DNA, 1797 bp, synthetic construct
  source 1..1797: mol_type = other DNA; note = Synthetic coding sequence
atgtttgtctccgacttccgcaaggagttctacgaggtggtgcagtctcagcgtgttctgttgtttgtggcgtctgatgttgatgccctgtgcgcttgcaagattctacaagccttatttcaatgtgatcacgtccagtacacactggtcccagtctcaggctggcaagagctggagactgcattcctcgaacacaaggaacagttccactatttcatacttattaattgcggggcaaacgtcgacctccttgatatcctacagcccgatgaggacacaatctttttcgtctgtgatactcacagacctgtgaatgttgtgaacgtctataatgatacacagattaaactcctgatcaaacaagacgatgaccttgaagtcccagcctacgaggacattttccgggatgaggaggaggatgaggagcatagcggcaatgactcagatggttcggagccatctgagaagcgaacccggctggaggaggaaattgtcgaacagactatgcgccgacgtcagaggcgagaatgggaagccagatccgggtctggatctgaaccagtggcagcagcactggagaagtcctccagacttttcgcaggaccaatgagcgatcgaacagctccaaggtcaccacgcagggatatcctattcgactatgaacagtacgagtatcacggtacctcatccgccatggttatgtttgagctggcatggatgctgtccaaggatctgaacgacatgctgtggtgggccattgtcggattaactgaccagtgggtccaggacaagataacccagatgaaatatgtcaccgacgttggagtcctccagagacatgtctccagacacaaccaccgtaacgaggatgaagaaaatacattgtctgtggattgtacccggatctcctttgagtacgacttgcggttggtcctctatcagcattggtctcttcacgattcactgtgcaacacgtcttacaccgccgctagatttaaattgtggtccgtccatgggcagaagcgcctgcaagaatttctggctgacatgggattaccactgaaacaagtgaaacaaaagttccaggccatggacatctccctgaaagagaacttgcgcgagatgattgaagagagtgccaacaagtttgggatgaaagatatgagggtccaaactttcagcattcatttcgggtttaaacataaattcctagcttcagatgtggtgtttgcaacaatgtcactgatggagagtcccgagaaggatgggtcaggcaccgatcattttatacaggcgctcgacagcctttccagaagcaacctggataaactataccatggacttgagctcgctaagaagcagttgcgggcaactcaacaaaccatagcctcatgcttatgcacgaatttggtcatatcccaggggccttttttgtattgtagtcttatggaaggtacaccagacgtaatgctgttctcccgacccgctagtctcagccttctctcaaagcacctcctaaaaagctttgtctgtagcactaaaaacagaagatgtaagctgctcccactcgttatggcagcccctctcagtatggagcatggcacggtgacagtagtgggtattcctcccgagacagacagctcagatcggaagaacttttttggcagggcttttgaaaaagccgctgagtccacatcctcacgaatgctgcacaaccactttgatctgagcgtgattgagttgaaggcagaggacagatccaagtttttggatgccctgatctctctgttgtcttag

SEQ ID NO: 30338 - DNA, 2994 bp, synthetic construct
  source 1..2994: mol_type = other DNA; note = Synthetic coding sequence
atgcccagcgagaagaagatctcatccgctaacgattgcatctcttttatgcaggctgggtgcgagctgaagaaagtgcgtcccaattctcgaatttacaatcgtttctttactctcgatacagacctgcaggccttgcgctgggaaccgagtaagaaagacctcgaaaaagccaaacttgacatttcggccatcaaagaaataagactcggaaagaacaccgaaacattccgcaataatggtctcgccgaccagatatgtgaggattgcgctttctcgatcctgcacggggagaactatgaatccttggatctggtggctaattctgctgacgttgccaatatatgggttagtggactgagatacctggtatcacgcagtaaacaacccctcgatttcatggaagggaatcagaacacgcctcgttttatgtggctaaagactgtgtttgaagctgccgacgttgacgggaacggtattatgctcgaggatacgtcagtcgagctgatcaaacagctcaatcccactctgaaggaagcgaaaatcagactgaagttcaaagagattcagaagtcaaaggagaaattgacgacccgcgtaactgaagaagagttctgcgaagcgttttgcgagttatgtacgagaccggaggtgtacttcctcctagtgcaaatttcgaagaataaagagtacctggacgcaaacgacctgatgctcttcctggaggcagagcagggcgtcacccacatcaccgaggacatttgcctagatattatcaggaggtatgaattaagtgaagagggccgacagaaggggtttctcgctattgacggctttactcaatatctgttaagctccgaatgtgacatcttcgaccctgaacaaaagaaggttgcacaggatatgacccaacctttgtcacattactatattaatgcatcgcacaatacatacctgatcgaagatcagttcagagggccagcagatatcaacggctatatccgcgctttgaagatgggttgtcggtcggtggaactcgacgtttctgacgggtccgataacgaacctatattatgtaaccggaataatatgacaacccatgtgtcttttcggtccgttattgaagtcatcaataaatttgccttcgtggcgtctgagtacccgcttatcctgtgtttaggaaaccattgttcccttccgcagcagaaagtgatggcacagcagatgaagaaggtctttgggaacaaactgtacaccgaggcccctttgcccagcgaaagttaccttccctctcctgaaaagctgaaaaggatgatcatcgtcaaaggaaaaaagctaccctccgacccagatgtacttgagggggaggtgacagatgaggacgaggaggcggagatgtcccgaaggatgtcggtagactacaatggcgagcagaagcagattaggctttgccgagaactcagtgacctcgtctccatctgcaaaagtgtgcagtatcgggacttcgagttgtccatgaaaagccagaattattgggagatgtgttctttctcagaaaccgaagcctcgaggatagctaatgaataccccgaggactttgtcaactataataagaaattcctgtcgcgcatctacccttctgcgatgagaattgactcatctaatctgaacccacaggacttctggaactgcggctgccagatagtggcgatgaattttcagacccctggtccgatgatggaccttcacacaggttggtttcttcaaaatggagggtgcggatatgtcctgaggccgtctattatgcgcgacgaggtcagctatttctcagccaacacaaagggaatcttgccaggcgtgagtcctttggcactgcacatcaagatcatatccggtcagaattttccgaagccaaagggggcttgcgcaaagggcgacgtgattgatccctacgtgtgcatcgagatccacggcattccagctgattgtagcgaacagaggacgaaaacagtgcagcagaactctgacaatccgatattcgatgagacatttgaatttcaggtaaacctgccggaactggccatgatcagatttgtggtcctggatgacgactacatcggggatgagttcatcggacagtataccatccccttcgagtgcctgcagccagggtaccgtcacgtgccattacgttcttttgttggggatattatggagcatgtgaccctgttcgtgcacattgccattacaaacaggtctgggggaggcaaagctcaaaagcgctcactcagcgtgcggatgggcaagaaggtccgagagtacaccatgctgcgcaatataggcctcaaaaccatcgacgatatctttaagatcgccgtgcacccactgagggaggcaatcgatatgagagaaaatatgcagaacgctattgttagcattaaagaactgtgtggcctgccgccaattgccagccttaagcagtgcctgctaacgcttagtagtcgccttatcactagcgacaatacgccctcagtgagcctagttatgaaggactcattcccgtacctcgagcctctcggcgctattcctgatgtacaaaaaaagatgctgaccgcctacgatctaatgatccaggaatctcgctttctaattgagatggcggacaccgtccaggagaaaatcgtacagtgccagaaggccggaatggaattccatgaggaacttcacaacctgggagctaaagaggggctcaaaggccgtaagcttaataaagcaacagagtcatttgcctggaacataaccgtcctgaagggccaaggagacctgctgaagaatgccaagaatgaggctatcgagaatatgaagcagatccagctggcttgcttgtcctgcggcttgtctaaagcccctagcagttcagcagaagctaagtctaaacgatcactagaggctatagaggagaaggaaagctctgaggaaaacggtaaactgtag

SEQ ID NO: 30339 - DNA, 612 bp, synthetic construct
  source 1..612: mol_type = other DNA; note = Synthetic coding sequence
atgagaaatggggattttctgcctacacgacttcaagcacagcaggacgctgttaatatcgtctgccactcaaagacgcgcagtaatcctgagaacaatgtcggattgataaccctggcaaatgactgcgaggtcctgactacacttacgcccgataccggcagaatcctttccaagctacacaccgttcagcctaagggaaaaatcactttctgtactgggattcgggtcgctcacttggcattgaaacaccgtcagggtaaaaatcataaaatgcgaatcattgcctttgtcggctcccctgttgaggacaacgagaaggatctggtgaaattagcaaagcgccttaagaaggaaaaagtgaatgtcgatatcatcaactttggggaagaggaggtgaatactgaaaaacttaccgccttcgtgaacacattgaacggcaaagatggaaccggttcccatctggttaccgtcccgcctggcccatctctcgccgacgcactgattagtagcccaattcttgccggagaggggggagctatgctgggattgggggctagtgattttgagtttggcgttgacccgagtgccgatcctgagttagccttgtag

SEQ ID NO: 30340 - DNA, 429 bp, synthetic construct
  source 1..429: mol_type = other DNA; note = Synthetic coding sequence
atgagtatcagctctgacgaggtcaactttctggtttacagatatctgcaggagtctgggttctcccattccgcgtttacattcggcatcgagtcccacataagccaatcgaacattaacggggctttggtcccgcctgctgctctcatttccatcattcaaaagggtctgcagtacgtcgaagccgaggtctctattaatgaggatggaactcttttcgacggacgcccaatcgagtctctgtccttgatcgacgccgtgatgccggatgttgtgcagacaagacaacaagcctatcgcgataagctggcccagcagcaggcagccgctgccgcagcagctgctgccgcagcctcgcagcaaggttctgccaaaaatggcgagaacaccgcgaatggggaagagaacggagcccacaccatcgcatag

SEQ ID NO: 30341 - DNA, 1410 bp, synthetic construct
  source 1..1410: mol_type = other DNA; note = Synthetic coding sequence
atgtgttcactggcgtcaggtgccactggctatagccacctgctgaagaagcattttcacactgtatcgttgtccatctcccttattttaactgcgtggttcataaacatgaatcccactgttgaatacatgaactcaatttacaatcctgtcccttgggagaaggaagagtacctgaaaccggtgctggaagacgatctgctgttacaattcgacgtggaggacctgtacgaacctgtgtctgtcccttttagttatcccaatggcctgagcgaaaatacatccgtcgtggagaagctgaaacacatggaagcccgagccttgagtgctgaggcagccctggccagggccagagaggacctccagaagatgaaacagtttgctcaagactttgtcatgcacaccgatgtgcgcacgtgtagctctagtacaagtgtcatcgcagatctccaagaagatgaagacggggtttacttttcgtcatacggccactatgggatacatgaggagatgttgaaagacaagataagaactgaaagctacagagactttatctatcagaatccacatattttcaaggacaaagtggtactcgatgtggggtgcggtacaggcatcttgagcatgttcgctgcaaaggctggcgctaaaaaggttctgggagtcgatcagtccgaaatcctatatcaggcgatggatataatcagactgaataagcttgaggataccatcaccctaattaagggtaaaattgaggaagtgcacctgccagtggagaaagtagacgtgatcatttcggaatggatggggtacttcttgctctttgagagcatgctagactcagtgctctatgcaaagaataagtatttggccaaaggaggcagtgtgtatcctgatatttgtactatttctctcgtcgccgtttcagacgtgaacaagcacgcggaccggatagcattctgggacgatgtctatgggtttaaaatgagctgcatgaagaaggccgtcatccccgaagcagttgtagaggttctggacccaaaaacactcatttcggagccttgcggtataaaacatatcgactgccacacaacttccattagtgatctagagtttagctccgattttaccctaaagataacaaggaccagcatgtgcaccgctatcgccggatatttcgatatatacttcgaaaagaactgccacaatcgcgtcgtcttcagcacaggtcctcagtccactaaaacgcactggaaacaaaccgtctttctcttagaaaaacccttttcagtcaaggctggagaggctctgaagggaaaagttacagtgcataagtctaagaaggacccgcgatcgctgacggttaccctgacccttaacaactccacgcaaacctacgggctgcagtag

SEQ ID NO: 30342 - DNA, 525 bp, synthetic construct
  source 1..525: mol_type = other DNA; note = Synthetic coding sequence
atggcttccgccggtactcagcactactcaataggacttcgtcaaaagaacagcttcaagcaatcaggccctagtggtacggtacccgctactcctccagaaaagccatctgagggacgcgtgtggccacaggcccatcagcaggtgaagccgatctggaagttggagaagaagcaggtggagaccctgtccgccggactgggcccaggcctcctgggcgtccctccacagcctgcctactttttctgccctagcactctctgtagttcaggaactaccgctgttatcgcaggccatagcagctcatgttatctgcactccttgcctgacttgtttaactccacactgctatacaggagaagcagttaccgtcagaagccgtaccagcagctggagagtttttgcctacgctcaagccccagtgaaaagagtcccttcagccttcctcagaagtcgctgccagtgagtcttacagcgaacaaggctacttcttccatggtattctctatggcccaaccaatgtag

SEQ ID NO: 30343 - DNA, 1572 bp, synthetic construct
  source 1..1572: mol_type = other DNA; note = Synthetic coding sequence
atgcagaaggaacgtgaacttcaggaaaccatttactttaaaaacacctggccagcctgtatgttcctgatagtagcaccactaagcgtactatacaattggaaggacgagctggatacttggggctatttccgcgtaaccgtccttcacggcaatagaaaagataacgagctgattcgcgttaaacagcgaaagtgcgagatagcgctcacaacatatgaaacattgagactgtgtctggacgagcttaactccttagaatggagcgcggttatcgtggatgaagcccatcggatcaagaacccaaaggcccgagtgactgaagtgatgaaggccctgaagtgcaacgtgcgaatagggctgaccggcacaatcctccaaaataatatgaaggaactttggtgtgtaatggactgggccgtgcccggactgctagggagcggcacatatttcaaaaaacagttctctgatcccgtcgagcacgggcagagacacacagcaacgaagcgcgagttggcgacaggaagaaaagccatgcaaagattagcaaaaaagatgtctggctggttcctcagaaggactaagactctgatcaaggaccaactgccaaagaaggaagatcggatggtctactgttctttaactgactttcaaaaagccgtgtatcagaccgtcttggaaactgaagatgttaccctgatactgcagagctcagagccttgcacctgccgttctggtcagaaaaggcggaactgttgttataagacaaattctcatggggaaacagtcaaaacattgtatctttcttatctgacggtcctgcaaaaggtggccaaccacgtggcactgctccaggctgctagtacttcaaagcagcaggaaacgctgataaagcgcatctgcgaccaggtgttttctcggtttcccgactttgtgcagaagagcaaagacgctgcattcgaaacactgtctgatcccaaatattcaggtaagatgaaggtgctccaacagctgctcaatcactgccgcaagaaccgagacaaggttctcctcttctccttttctacgaagttgttggatgtgttgcagcagtactgcatggcctccggcctggactacagacgccttgacggaagcactaagagtgaagaacggctgaagatcgtgaaagagtttaacagcacacaagatgtgaacatttgcctggtgagtaccatggcgggagggctcggtctcaatttcgtgggggcaaatgtggtggtcctctttgatcccacctggaaccccgcaaacgacctgcaagctatcgaccgcgcttaccggatcggccagtgtagagacgtcaaagtactgcgacttattagcctgggaaccgtggaagaaattatgtatctccgtcaaatttacaagcaacagctgcactgtgtcgtggtggggagcgagaatgcaaagcggtactttgaagcagtgcagggctcgaaagagcatcagggagagttatttggaatccataatctttttaaattccgtagccagggttcctgcctgacaaaggatatactggaggtatag

SEQ ID NO: 30344 - DNA, 1179 bp, synthetic construct
  source 1..1179: mol_type = other DNA; note = Synthetic coding sequence
atggggacaacttgcctgcacctgggtaccttggagcagagcctcgtcttcgagaacaaggtgaacagtgaaaaggtgaagctatctctgcggaatttcccacacaatgattacgaagacgtgttcgaagagcccagcgaatccggctctgacccatctatgtggactgcacggggacctttccggagagatcggtggtcatccgaggacgaggaggctgccggtccaagccaggcgctgagcccattactttccgatacaaggaagattgtgagtgaaggcgaactggaccagctggcccagatcagacccctgatctttaactttcatgaacaaactgctatcaaagattgcttgaaaatccttgaagagaaaacagccgcttacgacattatgcaggagttcatggccctggaactgaaaaacctgccaggtgagtttaatagcggcaaccagccttcaaaccgcgagaagaatcgctatagagatatactcccatatgattcgactagagtacccctgggtaagtcaaaagactacatcaacgcttcctacattcggatcgtcaactgcggcgaagagtatttttatattgccacccagggacctctgctgtctactattgacgatttctggcagatggttctggagaacaattcaaatgtcatagcaatgataacccgggaaatcgaagggggtatcatcaagtgctaccactactggcctatttctctcaaaaagccgctggagcttaaacatttccgagtgtttctcgaaaactaccaaatccttcaatattttatcatccggatgtttcaggtggtcgagaagagcaccgggacctcacacagcgtcaaacaactacaatttaccaaatggccagaccacggaaccccagcttcagctgattctttcataaaatacattaggtatgcacgcaagtctcatcttaccggcccaatggtcgtgcattgctcagccggtataggacgtactggggtgtttctgtgcgtggatgtcgtgttttgcgccatcgttaaaaactgctctttcaatatcatggacatagtcgcccagatgagggagcaaaggagcggaatggtccaaaccaaagagcagtatcacttttgctatgacattgttctggaagtgctgagaaagctcttgacgctcgactag

SEQ ID NO: 30345 - DNA, 1566 bp, synthetic construct
  source 1..1566: mol_type = other DNA; note = Synthetic coding sequence
atggagcagtcaagtttgtacttctgggatctgcttgaaggaagcgagaaggccgtggtcggcactacatacaaacacctgaaagatctgctatccaaactcttgaactcggggtacttcgagtccattccagtgccgaaaaacgcaaaggaaaaagaggtgcctctagaggaggagatgctgatccagtctgagaagaagacacaactgtccaaaacagagagcgtgaaagaatcggagtcactcatggaattcgcccagcctgagatccagccgcaagaattcttgaataggagatatatgaccgaggtggattatagtaacaagcagggtgaggagcagccatgggaggcggactacgccaggaagcctaacctacccaaacggtgggatatgctcaccgagccggacggtcaagaaaaaaagcaggaatcattcaagtcttgggaggcatcaggaaagcatcaggaggttagtaagcctgccgtctccctggaacagcgtaagcaggacacttcaaagcttcgctcaaccctgccggaggaacagaagaagcaggagatcagtaaaagcaaacctagccccagccagtggaagcaggatacacctaaaagcaaggccggatacgtacaggaagaacagaagaagcaagaaactcctaagttgtggcctgttcaactccagaaagagcaggaccctaagaagcagacaccgaaatcctggaccccaagcatgcagagtgagcagaacactactaagagttggaccacccccatgtgtgaagaacaggacagcaagcagccagaaacccccaaaagctgggagaacaatgtggaatcccagaagcattccctaactagccagtcacagatatctcccaagtcgtggggggtggcaactgcctccctgatccctaacgaccaattactgcccagaaaactcaataccgaacctaaggacgtccctaagcccgtccatcaacccgtgggctcctcctccactctccccaaggatcctgtgttaagaaaagagaagctgcaggatcttatgacgcagatccagggaacctgcaacttcatgcaggaaagcgtgctcgattttgacaagccttcatccgctatcccaacctctcagccacctagcgccacacctgggtccccagtcgcatccaaggagcaaaatctcagctcgcaatcagactttctgcaagagcctcttcaggccgctatcccacccggaaagcaaccctcgtcactggcatcacccaatccgccaatggccaagggcagcgagcagggctttcagtctcctcccgcaagttccagttcagtcacaataaacactgccccattccaagccatgcagaccgtattcaacgtgaatgcccctctgcctcctaggaaagagcaggaaattaaggaatctccatactcacccggttataaccagtccttcacgacagcttccactcagactcctccacagtgtcagctgccctctatccacgtcgaacagaccgtgcactcccaggagactgccccaggaaaccaccattccactttttag

SEQ ID NO: 30346 - DNA, 480 bp, synthetic construct
  source 1..480: mol_type = other DNA; note = Synthetic coding sequence
atggccacctccgcaccactgagaagtcttgaggaggaggtaacctgttccatatgcctcgactacctgcgggacccagtcaccatcgactgtggccatgtcttctgccgatcgtgcaccacagatgtgcggcctatcagtggcagccgccctgtttgtcccctctgtaagaagccatttaagaaggaaaacattcggccagtgtggcagttggagaagattctcaatcacctatctacgctgcgtcgagatagagataagatacaaggcttccaagccaaaggggaggctgacattttagccgcacttaagaaactgcaggaccaaaggcaatatatcgtggccgaattcgaacagggtcaccagttcctgagggaaagggaggaacacctacttgaacaactggccaaactggaacaagaactgactgaagggcgtgagaagttcaaatcccggggagtgggtgaactggcaagatag

SEQ ID NO: 30347 - DNA, 270 bp, synthetic construct
  source 1..270: mol_type = other DNA; note = Synthetic coding sequence
atgagcgagcagggagatttgaatcaggcaatcgcggaggaaggaggcactgagcaagagacggccactccggagaatggaatcgtcaagtccgagtctctcgatgaagaggagaagctggagttgcagcggaggctggaggcacagaaccaggagagacgcaaatctaaaagcggagccggtaaaggaaaacttactcgctccctggccgtgtgtgaagagagtagcgcacgcccaggcggagaatccctccaggaccagacgctgtag

SEQ ID NO: 30348 - DNA, 1356 bp, synthetic construct
  source 1..1356: mol_type = other DNA; note = Synthetic coding sequence
atggccgagggcgctcagcctcaccagccgcctcagctcgggcctggagcagccgcacgagggatgaaacgcgagtctgagctggagttaccagtgccaggggcaggcggagacggcgctgatcccggactgtcaaaaagacccaggacggaggaggccgctgctgatggtggaggtggaatgcaaaacgagccacttaccccaggataccacgggtttcccgcaagggatagtcaagggaaccaagagccaacaaccaccccagacgccatggtccagcctttcaccactattccctttccccctccccctcagaacggcattccgactgagtacggcgtgccccacacacaggattacgccggacaaacaggagagcacaatctcacactgtacggctccacgcaggctcatggcgagcaatccagcaatagtccctcgacacagaatgggtctctgacgcagaccgaggggggagctcagacagacgggcagcaatcgcagacccagtctagtgagaatagtgagagtaagtctaccccaaagcggctacacgtctccaatatcccctttcggttccgcgacccggatctgagacagatgttcggtcagttcgggaagatattggatgttgagatcatatttaatgaaaggggctccaagggcttcggattcgtcacgttcgagaactctgctgatgcggacagagcacgcgagaagctgcacggaaccgtggtggaaggacggaaaattgaggtaaacaacgcaactgccagagttatgacaaataaaaaaatggttacaccatatgccaacggctggaaactgtcgcccgtcgtgggggctgtgtacgggccagaactctatgctgcttcctcgttccaggccgatgtgtctcttgggaatgacgccgcagtacctctgtcaggccgaggtggcattaatacctacatacccttgatttcccttcccttggttcccggtttcccctatcctactgctgccactactgcagcggcttttcgtggagcccacctacggggtcggggacggactgtgtacggcgctgtgagagctgttccccctacagccattcccgcataccctggcgtggtctatcaggacgggttctacggagcagacttatatgggggatatgccgcttataggtacgctcagcctgcaactgcgactgccgcaactgcggctgcggcagcagccgctgcatattccgacggttacgggagagtgtacaccgcagacccctatcacgcccttgcgccagccgctagctacggcgtgggagccgtcgcctccctctatagaggcggttacagtaggttcgccccttattag

SEQ ID NO: 30349 - DNA, 855 bp, synthetic construct
  source 1..855: mol_type = other DNA; note = Synthetic coding sequence
atgttctcccgaagatcgcatggtgacgtgaaaaagtctacacagaaggtgttagacccaaagaaggacgtactgacccggcttaagcacctgcgagcccttctagacaatgtggacgccaacgacctcaagcagttctttgaaacaaattatagccagatttactttatattttacgagaacttcatcgccctagagaactcactcaagctcaaaggcaacaacaagagtcagcgcgaagaacttgactctatactgtttttatttgagaaaatcctccagttcttgcctgagaggatctttttccggtggcattaccagagtatcggatccactttgaagaaacttctgcatactgggaactccattaagattcgttgcgagggaatcagactgtttctcctttggctgcaggccttgcagaccaactgcgctgaggaacaggtgctaatcttcgcctgtctggtccctggctttcctgctgtaatgtcatctaggggcccttgtactctggaaacactaatcaacccctcaccttcggtcgcagacgtgaaaatttaccctgaggagatcacacccctcctgccagccatctctggggaaaagatcgccgaagatcagacgtgcttcttcctgcagattctcctgaaatatatggtcatccaggccgcttccctggaatggaaaaacaaggagaatcaggacactggcttcaagtttctcttcaccctcttccgcaagtattaccttccacacctgtttccctcgttcaccaagctgacaaacatttacaagccggtacttgacatccctcatctgaggcctaagcccgtgtatataaccacgacacggtag

SEQ ID NO: 30350 - DNA, 846 bp, synthetic construct
  source 1..846: mol_type = other DNA; note = Synthetic coding sequence
atgggcgatacagtagtggaacctgccccactcaagcctacgtccgaaccaacaagcggaccgccaggaaacaatgggggttcactcctcagtgtcatcaccgagggcgtgggggagcttagcgtcatcgaccctgaagtggcccagaaggcatgtcaggaggttttggaaaaggtgaagctgctccatgggggagtcgctgtgtcaagccgaggtacccccctggaactcgttaacggagatggtgttgactcggagattcgttgcctggatgatcccccagcacagattcgcgaggaggaggatgagatgggggctgccgtcgcatcagggactgcgaaaggtgctcgacgcagacgacagaacaactcggctaaacagtcctggctcctcagactcttcgagtcaaagctttttgacatcagtatggcgatatcctatctttacaacagcaaggagccaggcgtgcaggcatacattggaaatcgacttttctgtttcagaaacgaagacgtggacttttaccttccacagctgctcaatatgtatatccacatggacgaagacgttggtgatgcgatcaaaccctacatagtgcaccggtgtcgacagtcgattaacttttccttgcaatgtgctctgctattgggtgcatactcatccgacatgcacattagcacacagcggcactctcgaggcacgaaacttcggaaactgatcctgtctgacgaattaaaacctgcgcacaggaagagagagctgccatcactgagtccagcccctgataccggcttgtctccttctaaacggacccaccaacggtccaagtcagacgccactgcctag

SEQ ID NO: 30351 - DNA, 591 bp, synthetic construct
  source 1..591: mol_type = other DNA; note = Synthetic coding sequence
atggaagacctgtttgagaccttccaggacgagatggggttctctaacatggaggacgatggtccggaggaggaggaacgggtcgcagagccacaggcaaacttcaacactccacaggctctccgatttgaggagttgctcgcgaacttattgaacgagcaacaccagatcgcgaaggaactctttgaacagcttaaaatgaaaaagccatcggccaaacagcagaaggaagtggagaaagtcaagcctcagtgcaaggaggtgcaccagacactgatcctggatccggctcagcggaagaggctgcagcagcagatgcaacagcacgtccagctcctgactcaaatccaccttttggcaacttgcaaccctaacttgaaccccgaggcctcttccacacggatttgcctcaaagagttgggtacattcgcgcagagcagcatcgccttgcaccatcagtataatccgaagttccagacactgttccagccttgcaatctcatgggcgctatgcagcttattgaggacttcagtacgcatgtatccatcgattgtagtccacataaaacggtcaagaagaccgtgtgctag

SEQ ID NO: 30352 - DNA, 1620 bp, synthetic construct
  source 1..1620: mol_type = other DNA; note = Synthetic coding sequence
atggcgaccagtgctcccctcagaagcttggaggaagaagttacctgctctatctgtctcgattatctgagagatccagtcacgatcgactgcggacatgtcttttgccgtagttgtaccaccgacgtcaggcctatttccggttctcggcctgtttgccccctttgcaagaagccttttaagaaagagaacattaggccagtttggcagttggcttctcttgttgaaaatattgaaagactgaaagtggataaaggccgacagcccggtgaggtcacccgcgaacagcaggacgcaaagctgtgcgagcgtcatagggagaagttacactactactgtgaagatgacggaaagctgttatgcgtcatgtgcagagaatcacgagagcataggccgcataccgcagtcctgatggagaaggcagcacagccgcaccgagagaagatcctcaaccacctgagcacactccgccgagacagagacaagattcagggattccaggccaagggagaggctgacattcttgcagcgctgaagaagcttcaggatcagcgccagtacatagtggccgaattcgaacagggacatcagttcctgagagagcgtgaggaacatttactcgaacagctcgcaaagctggaacaagagctaacggaaggcagggaaaagttcaagtcccggggagtcggagaactggccaggctcgctctcgtgatctccgaattagagggaaaagcccagcagccagctgcggagctgatgcaggacacccgcgatttccttaaccgctatcctagaaaaaagttctgggtgggtaagcctatcgcgagggttgtcaagaaaaagacaggtgagttcagtgacaaactgctgtccttgcaacgcggactacgcgagttccaggggaagctcctgagggacctggagtacaagaccgtgtccgttaccttggatcctcagtctgcatccggttacttgcagctcagcgaagactggaagtgcgtgacatacactagcctttacaaaagcgcttatctgcacccacagcagttcgattgtgagccaggcgtgttgggcagcaagggattcacttggggtaaagtgtattgggaggtcgaggtcgagagagaagggtggagtgaggacgaggaggagggcgatgaagaagaggaaggcgaagaggaggaagaggaggaggaggccggttatggcgacggttacgatgattgggagaccgatgaggatgaggaatccctgggagatgaggaagaagaagaggaggaggaggaagaggaagtactcgagtcttgtatggttggggtggcacgggactctgtgaaaagaaaaggcgatctgagcttgaggcccgaggatggagtatgggccctaaggttaagtagcagcggaatatgggccaacacctcacccgaagccgaactgttccccgctcttcgcccacggagggtcgggattgctctcgactatgagggaggcaccgtaacattcacaaacgcggagtcacaagagctgatttatacattcactgccacattcactcgtcggttggtcccctttctctggttgaaatggcccggaactagacttttgctgagaccctag

SEQ ID NO: 30353 - DNA, 1086 bp, synthetic construct
  source 1..1086: mol_type = other DNA; note = Synthetic coding sequence
gtaacaactgaaaagacctataccagcactagcaataactcaatctcgggcagtctaaagagactcgaagataccactgctaggttcacaaatgcaaactttcaggaggtgagcgcccatacctcctccggtaaggatgtgagcgagacgaggggcagcgaaggcaaggggaagaagagtagtgcacattcgtctggacagagaggtcgcaagccaggaggcggacgcaaccctgggacaacagtctctgctgctagcccatttccccaagctgggtacaagcgtgcgcaaacatcaggaattgaggaggaaacggtcaaggagaagaagcgaaagggcaataagcaatcaaagcacgggcctggcagacctaagggcaataagaaccaggaaaatgtcagtcacttgtccgtgagttctgcaagccccacctcgtctgtagcctctgctgcaggcagcatcacatcttccagtttgcaaaagtcccccactctcttacgcaacggctctctgcagagtctgagcgttggatctagcccagtaggtagcgaaatatcaatgcagtacaggcacgatggggcatgccctacgactacatttagcgaactgctcaacgctatccataatgaccgcggagattcaagcacactaaccaagcaggagctcaagtttattggaatctacaattcaaatgatgtggccgtgtcatttcctaacgtagtgtcagggtctggttcttctacacctgtgtcttcttcccacctgccccagcaatcctcaggccacctccagcaggtgggggcacttagccccagtgcggtgtcctctgccgctcccgcagttgccaccacacaggcaaacaccctgagtggcagttcattgagccaggctccgtctcacatgtatggaaaccgcagtaattcatccatggctgctctcatcgcccagtctgaaaacaaccagacagaccaggatctgggtgacaactctcggaatcttgtggggagggggagctctccacgtggcagcctctctcctagatctcccgtgagctccctgcagatccgatacgatcagccagggtag

SEQ ID NO: 30354 - DNA, 426 bp, synthetic construct
  source 1..426: mol_type = other DNA; note = Synthetic coding sequence
atggcagccgcacctccttcatactgcttcgtcgccttccccccacgggctaaagatgggctggtagtgttcggcaagaactctgctagaccaagagatgaggttcaggaggtcgtgtacttctcagccgctgatcacgagcccgagagtaaggtggaatgtacgtatatctccatcgaccaggtccctcggacttacgctatcatgattagccgtccggcttggctgtggggcgcagagatgggggcaaatgagcatggggtctgcattgccaacgaggccatcaacactcgggaacccgctgcagagatagaggccttgctcgggatggatcttgtgagacttggtctcgagcgcggtgaaaccgccaaagaagccctggatgtgatcgtgagcctgttggaagagcacgggcagggcggatag

SEQ ID NO: 30355 - DNA, 573 bp, synthetic construct
  source 1..573: mol_type = other DNA; note = Synthetic coding sequence
taacagctcgcagcactgaaagaaatccaggcagaagttcaggaaaaggaaagcgatgctgtgaagccaaagaatcaggacattcagggaggtaaagctgctcctgccgaggcgcttggcatacccgatgagcactacctcgacaacctgtgtattttttgcggtgaaagatccgaatccttcacagaggaaggtttagatctgcattattggaagcactgtctgatgctgacaagatgcgatcactgtaagcaggtggtggagatcagctcactaacggaacatttgctgacagagtgcgataaaaaggatgggttcggaaagtgttaccgctgttccgaggctgtttttaaggaagaactcccacggcatatcaagcacaaggattgtaatcccgcaaaaccggagaaactagccaatcgctgcccgttatgtcatgagaatttttcgccaggagaagaggcatggaaagcccaccttatgggcccagctggctgcacaatgaaccttaggaagactcatatccttcaaaaggctcctgccctacagccaggcgaggggcagcgaaggtag

SEQ ID NO: 30356 - DNA, 723 bp, synthetic construct
  source 1..723: mol_type = other DNA; note = Synthetic coding sequence
atgaccgtgggaaagtcatccaaaatgcttcaacacatcgattaccgaatgcggtgcatcttacaggacggcaggatcttcattgggacttttaaagccttcgacaagcatatgaaccttatcctatgtgattgcgacgagttcagaaaaatcaagcccaaaaactcaaagcaggctgagcgggaagagaagcgggtgctagggctggttctgctccgaggtgagaatttggtttccatgacggtagagggccctccccctaaggatacaggtatagcacgcgtcccgcttgccggagccgcaggaggccctggcattggtcgtgccgcaggtagaggtatccctgcgggagtcccaatgccgcaggctcccgctggcctcgctgggccagttaggggcgtgggagggccttctcaacaggtcatgacgcctcagggtcgaggcaccgtggccgctgcggctgcagcggctactgcatcaatagccggtgccccaactcagtatccccctggcaggggtggtcctcccccacccatggggagaggggcacccccacctggcatgatgggacctcccccaggtatgagaccaccaatggggcctccaatgggcataccacccggacggggaacccctatgggaatgccgcctccagggatgcgtcccccacccccaggcatgaggggtcctcctcctccaggtatgcgtccaccaaggccatag

SEQ ID NO: 30357 - DNA, 420 bp, synthetic construct
  source 1..420: mol_type = other DNA; note = Synthetic coding sequence
atggagacagattgtaatcccatggagctgtcctccatgtcaggatttgaagaagggagcgagcttaacggcttcgaaggaacggatatgaaggatatgcgcttagaggcggaggcagtcgtcaatgacgtgctgttcgcagtcaataacatgtttgtcagcaagagtctgcggtgcgcggatgacgttgcatacataaatgtcgagactaaggaacgcaacaggtactgtctggagttaaccgaagcgggactgaaggtcgtgggctatgcatttgatcaagtagatgatcacctgcaaacaccatatcacgagactgtctatagcctcctggataccctgagcccagcgtaccgcgaggccttcgggaatgctctgttgcagagactggaggctcttaaacgagatggccaaagttag

SEQ ID NO: 30358 - DNA, 606 bp, synthetic construct
  source 1..606: mol_type = other DNA; note = Synthetic coding sequence
atggccggactagaggtgttattcgcatcagccgcacctgccattacctgccgccaagatgcccttgtgtgctttctccactgggaggttgttacacacggctactttgggctgggcgtgggtgaccagccgggtcctaatgacaagaagtcagaacttttgcccgctggatggaacaacaacaaggatctgtacgtgctgcgttatgagtacaaagacgggtctcgcaagcttttggtgaaggcaatcactgtggagtcatctatgattctcaatgtcctcgagtacggcagccagcaggtggccgacctcacattgaacctggacgactacattgacgccgagcatttgggggattttcaccggtgcgacccacttgggcctttcgttgtgggtggagaggatttggaccccttcggacctcgccgaggcggtatgatcgtagatccactgcgctccggtttcccaagagctctgatcgatccctcctctggtttaccaaacagactccccccaggcgctgttcccccaggagcgcgtttcgatcccttcggcccaatcggcacctcaccaccaggacctcgtcctgatcgtcgcggacaatag

SEQ ID NO: 30359 - DNA, 747 bp, synthetic construct
  source 1..747: mol_type = other DNA; note = Synthetic coding sequence
atggctacgtctgccccactgagatccctggaggaagaggtgacctgtagtatttgcttagactatctacgagatccagtgacaattgattgcggccacgtcttttgcagatcctgcacaactgacgtcagacctattagcgggagcaggcctgtgtgtccactgtgtaagaagccatttaaaaaggagaatataagacccgtgtggcaactggccagcttggtggaaaacattgagcgtcttaaggttgacaaagggagacaacccggagaagtgacacgcgagcagcaagatgccaagctgtgtgagagacatcgggaaaagttacattactattgcgaggacgacgggaagctcctgtgtgtgatgtgtagagaatcccgagaacacaggccccacactgccgtactcatggaaaaagctgctcagccccaccgtgagaagatactcaaccatctctcgactcttcggcgagatagagataagatccagggcttccaagcaaagggcgaagccgatattctagcggctctcaagaaactacaggaccaacgccagtacatagtcgccgagttcgaacaagggcaccagttcctaagagagagagaagagcacctgttggagcaattagctaagttagagcaagagttaaccgaaggacgcgagaagtttaagtcccggggagtcggtgagctggcgcgattggccttggttataagcgaactggaggggaaggctcaacaatag

SEQ ID NO: 30360 - DNA, 1842 bp, synthetic construct
  source 1..1842: mol_type = other DNA; note = Synthetic coding sequence
atggcaacaatcccagactggaagctgcaattgctggctcgcagacgtcaggaggaggctagcgttcggggaagagagaaggccgagcgggaaagattatcacagatgcccgcatggaagaggggactgctggagcgacggcgtgccaaactgggcctttcacccggagaaccttcccccgtactgggtacagtggaagccggaccgccagatccagacgagtctgccgtgctgctggaggccattgggcctgtgcaccagaatagattcataagacaggaaaggcagcagcaacagcagcagcaacagagatctgaagagctgttggctgagcggaaacctgggccactcgaggcgcgagagcgcagaccaagtccgggtgagatgcgcgatcagtctcctaagggtcgggaatcaagggaagaaaggttatccccccgtgagacgcgggagagaagactgggaattgggggtgcccaggagttgtcgttacgcccactggaggctagggactggcgtcaaagcccaggcgaggtgggggatcgctctagtcgcctctcggaggcatggaagtggagactgagtccaggagagactccagagcgctcgctcagactggctgaatcccgcgaacaatcacctcgcaggaaggaagtagagtcaagactatctcctggcgaatccgcttatcagaagctcgggctgactgaggcccacaagtggcggcctgactcccgcgagagccaagagcaatccctcgtgcagctagaagccaccgagtggcgcctccggtcgggggaggaacggcaggactattcggaggaatgcgggaggaaggaggaatggcctgtgcccggagtcgcccctaaggaaacagccgagttatccgagacactcaccagggaagctcagggcaacagttctgcgggtgtggaggccgcagagcagcggcctgtggaggatggtgaacggggtatgaagcccaccgagggctggaagtggaccctcaacagcggtaaagctcgcgagtggaccccgcgagacatagaggcccaaactcaaaagccagagcctcctgaaagtgctgagaaactgctggaaagtcctggagtggaagccggagaaggcgaagctgagaaggaagaggctggcgctcagggtcggcctctgcgggcactgcaaaactgttgctccgtgcctagccccctgccccctgaagatgcagggactgggggactgcgacaacaagaggaggaggcagtggaactgcaacctccaccaccagcaccactgtctccacccccaccggctcctacagcccctcaacctcccggtgatcccttgatgagtaggctcttttacggagttaaggcaggccctggggtgggtgcccctcgccgaagcggacacacattcaccgtgaacccccgaagatctgtgccacccgctaccccagcaacccctaccagtccggcaacggtcgacgccgctgttccaggcgctgggaaaaagcggtaccccacagccgaagagattctcgtcctcggtgggtaccttcgattgagccggtcttgtcttgctaagggatctccagagagacatcacaaacaactgaaaatcagctttagcgagactgcattagagacaacgtatcaatatccgtctgagtcatcagtgcttgaggagctaggccctgagccagaggtgccatcggccccaaatcccccagccgcacagccagacgatgaggaagacgaagaagagctgctgctcttacagcccgagctccagggaggcctccggaccaaggcacttatagttgatgagagctgtaggcgctag

SEQ ID NO: 30361 - DNA, 1620 bp, synthetic construct
  source 1..1620: mol_type = other DNA; note = Synthetic coding sequence
atggcaacatctgcccctctcaggtccctcgaagaagaagttacatgctcgatttgcttagactacctgcgagatccagtcaccatcgactgcggccacgtgttttgtcgctcctgcacgacggacgtgaggcccatttcaggcagcagaccagtttgtcctctctgcaagaagccttttaagaaagagaacatccgccctgtttggcagctggccagcctggttgaaaatatcgagagacttaaggtggataagggcagacaacccggagaagtcacacgcgaacagcaagacgccaagctgtgcgagaggcatcgcgaaaaactgcactactactgcgaagacgacggaaagctgttgtgcgtaatgtgtcgcgagtcccgagagcataggccacacaccgcagtgctcatggaaaaagccgctcaaccacacagggaaaagatcctgaatcacctttcaacccttaggagagaccgggacaagatccaaggcttccaagctaaaggagaagccgatatcctcgccgcactgaagaagctccaggaccagaggcagtacatcgtggcagaatttgagcaggggcaccaatttttacgggagcgtgaggagcacctgctagaacagctggccaaactcgagcaagagcttacagagggacgtgagaagttcaagtccaggggcgtgggagagcttgcccgactcgctctggtgattagcgagctggagggcaaagcccaacagcccgctgccgaactaatgcaagatactcgagacttcttgaacagataccctcgcaagaagttctgggtgggtaaacccattgccagagtggtgaaaaaaaaaactggggagttctctgacaaactgctgagcctgcagcgagggctgcgagagttccaagggaaactcttacgggacctcgagtacaagaccgtgagtgtgacactggacccccagagcgcctcagggtatctgcaactttctgaagactggaagtgcgtgacctatactagcttatacaagagcgcatatctccatccacagcagttcgactgtgaacccggagtactaggaagcaaaggttttacgtggggtaaggtatactgggaggtggaggtggaacgggaaggctggagcgaagatgaggaggaaggcgacgaggaggaagagggcgaagaagaagaagaggaggaggaggcgggttacggcgacggttatgacgattgggagactgacgaggacgaagaatctctcggagatgaggaggaggaagaagaggaggaagaagaagaagtactcgaatcttgcatggtcggagttgccagagatagcgttaagaggaagggtgacctgtctctgaggcccgaggacggggtttgggcactccgactctccagcagcggcatttgggctaatacaagtcctgaggctgaattgtttcccgctctgagacctcgtcgagtgggaatcgccttagattatgaaggtgggaccgtgacattcaccaatgccgagtcccaggagcttatctacacctttacagccacgttcacacggagattggtgccatttttgtggcttaagtggcccggaacccgtctgctgcttaggccttag

SEQ ID NO: 30362 - DNA, 1089 bp, synthetic construct
  source 1..1089: mol_type = other DNA; note = Synthetic coding sequence
atggctcccaaacccggtgccgagtggagcacagctttgtctcatctggtgctgggcgtcgtttccctgcatgcggctgtgagcactgcagaagcgtctcgcggtgctgccgcagggttccttctacaagtgctggccgcaactacgacccttgcccctggactgtctactcatgaagactgcctcgctggcgcttgggttgccacagttatcggtttgccacttcttgccttcgacttccattggtgtacaaacggccacctgatgtgtgccggatgttttattcatctgctggcagatgccagattgaaggaggagcaggccacctgtcccaattgtcgctgcgaaatatctaagtcgctgtgctgccggaacctggctgtagagaaagcagtgagtgagttgccatccgagtgcggcttttgtctgcggcaattccctcggagcctgctggaacggcatcagaaggaggagtgtcaggaccgagtgactcaatgtaaatataaacgtatcgggtgtccctggcacggaccctttcacgaactcactgttcatgaagctgcctgtgcacacccaacgaaaaccggctccgagttgatggagatcctggacggcatggatcagtctcacagaaaagagatgcagttgtacaacagcatcttttctctgttgtctttcgagaagatcggatacacagaggtgcagtttaggccatatcggacagatgattttatcaccagactgtattatgaaaccccgaggtttaccgtgttgaaccagacatgggtgcttaaggccagagttaacgactcagagagaaatccaaacctgagctgtaaaagaaccctgtcattccagcttctgttgaagtcgaaagtcactgctcctctcgagtgtagctttctgcttctgaaggggccttacgacgatgtgaggatctccccggtcatttaccactttgtctttactaacgagtccaatgagacagactacgtccccctgcctattatcgatagcgtggagtgcaacaaactgctcgccgcaaaaaatatcaacctgaggctgtttctattccagatccaaaagtag

SEQ ID NO: 30363 - DNA, 273 bp, synthetic construct
  source 1..273: mol_type = other DNA; note = Synthetic coding sequence
atggccatggctcctagcccatctctcgtccaggtttatacttcccccgctgccgtggctgtctgggaatggcaggatggtttgggaacttggcatccatacagcgccacagtctgtagtttcatcgagcagcagttcgtacagcagaaaggccagaggtttggcctgggatcactggctcactccattcctctcggccaggcggacccttccttggccccttacataatcgacctacctagctggactcaatttcggcaggacaccggatag

SEQ ID NO: 30364 - DNA, 2502 bp, synthetic construct
  source 1..2502: mol_type = other DNA; note = Synthetic coding sequence
atggcagtggaggactctacgttgcaggtggttgttcgagtgcggcctccgacgccccgagagctggactcacagcgaaggcccgttgtgcaggtggtcgatgagagggtgctggtgttcaaccctgaggagcctgacggtgggttccccggactgaaatgggggggaacgcacgatgggccaaagaaaaaaggcaaggacctcaccttcgtgtttgatagggtgttcggcgaagcggctacccaacaagacgtgtttcagcatactacccactcagtgttggactcttttctgcagggttacaactgttcagttttcgcttatggcgcaacaggggcaggcaagacccacacaatgctgggacgcgagggagatccaggcattatgtacctgacaacagtggagctctataggagactggaggctaggcagcaagaaaaacattttgaggtgctgatcagctatcaggaggtgtacaacgaacagattcacgatctgctggagcctaagggccctctcgccattagggaagacccagataaaggcgtggtggtgcagggactttcatttcaccagcccgctagcgctgaacagctgttagaaatactgacccgtgggaacaggaatagaacacaacatcccaccgatgccaacgccacttccagtcgatcgcacgctattttccaaattttcgtgaagcagcaagatagggttccaggcctgactcaagcagtacaagtggctaaaatgtccctcattgacctagcgggaagtgagcgggcaagtagcacacacgcaaaaggcgagcgcttgagagagggtgcgaacattaatcggtcactcctcgccctcataaatgtgctcaacgccctggcggacgctaaaggtcgcaaaacccatgtgccctacagagactccaaactcacaaggctcctgaaggacagtttagggggaaattgcaggaccgtgatgatcgccgcaatctcacctagtagcctgacctatgaagacacctacaacaccctcaaatacgcggaccgagccaaggaaatccgtctgagcctgaaatccaacgtcaccagcctggactgccacatcagccagtatgccaccatctgccagcagctgcaggcagaggtagccgctctcagaaaaaagcttcaggtgtatgagggcggaggacagccaccgcctcaggacctcccgggttcccccaagtccggcccacctcccgaacacctgccttcatcaccacttccccctcaccctccatcacagccatgtactcctgagctgcccgcaggacccagagctcttcaggaggaaagtttaggcatggaagctcaggtggagcgcgctatggagggcaacagtagcgatcaggagcaaagccccgaagacgaggacgaaggcccagcagaggaggtcccgactcagatgccagaacaaaaccccacacacgcattgcccgagtctccccgtctaactctgcagccaaagcccgtggtggggcacttttccgcccgtgaactggacggggacagatccaagcaactggccctcaaggtgctgtgtgtggcccagcgccaatactctctgctgcaggctgcaaatcttctgactcctgacatgatcaccgaatttgagacgctgcaacagctcgttcaagaggagaagattgagcctggcgctgaggccttgcggacatcgggcctggccaggggcgcaccccttgcccaggaactctgttcggaatctatcccggtgcccagtcccctttgtccggagccccctggctacacagggccagtgacccggactatggcacgtcgactttccggaccactccacaccttgggtataccaccaggaccaaattgcacccccgctcagggcagtcggtggccaatggagaaaaaacgaagacgaccctccgcgttggaagcagattcacccatggctccaaaacggggaacaaagcggcagaggcaaagcttcctgccctgtctgcgccgaggcagcctgcctgatacacagccaagccagggcccatccaccccaaagggcgaaagagcgtcttctccctgccactctccaagagtttgtccggctacggtgatcaagagcagagtgccgttggggccaagtgctatgcagaattgtagcactccactcgctctaccaacacgcgacttaaatgcaacattcgacttaagcgaagaacctccttcaaaaccgtcattccacgagtgtattggatgggataagattccacaggagctctcccggctcgaccaacctttcatcccccgtgcacccgtgccactcttcactatgaaaggaccaaaacctacatcatccctgcccggtaccagcgcctgtaagaagaaaagggtggccagctcatccgtgagccatggcagatcgcgaatcgcaaggttgccctcatccactttaaagcggccagccggaccactagtgctccccggagactggcactag

SEQ ID NO: 30365 - DNA, 1842 bp, synthetic construct
  source 1..1842: mol_type = other DNA; note = Synthetic coding sequence
atggccactattcccgattggaagctccaattgctcgccagaagacgtcaggaagaggcttctgtgagaggtagagagaaggccgagagggaacggttgtctcagatgccagcatggaaacggggtttgctggaaaggcgacgcgcaaaattaggactgtcccctggtgagccaagccccgttctgggtaccgtggaggccggacctccagatcctgatgagtccgctgttctgctcgaagccattggccctgtgcatcaaaacagatttattcgacaggagcggcagcagcagcaacagcagcagcaacggtcagaagaactcttggccgagaggaaacctggtcctctggaggcccgagagcgaagaccttctccaggcgaaatgagagatcagagcccaaagggcagggagtcccgtgaggagcggcttagcccaagggagactcgagaacggcgactgggcattgggggtgcccaggagttaagtctccggccattagaagcccgtgactggcgacagagcccgggagaagtgggggatcgtagttctagactgtccgaggcatggaagtggcggcttagtcctggcgagactccagaacgctcactgagactggccgaatcgcgggagcagagtccccgtagaaaggaagtggaaagccgcctcagtcctggagaaagtgcttatcaaaagttgggacttacagaagcccacaagtggcgcccagactccagggaatcccaggaacagtctctcgtgcagctggaagcaaccgagtggcgtcttaggtcaggcgaagagcggcaggactactctgaagagtgtgggaggaaggaggagtggccggttcccggtgtcgctcctaaagagactgcggaactctcagagacacttactcgagaagcgcaaggcaattcctcagccggtgtcgaggccgcagaacagcgccctgtggaagacggtgagagaggaatgaagccaacagaaggctggaaatggaccctgaactccgggaaagccagggagtggactccaagagacattgaggcgcaaacacaaaagccagaaccaccagagtctgccgaaaagctcctggaaagccccggagtggaggccggtgagggggaggccgaaaaggaggaggccggagcacagggacgacccctgcgggcactgcagaattgttgctccgtgcctagccctctcccacctgaggatgcaggcacaggcggtctgcgccagcaggaggaggaagcggttgagcttcagcccccaccaccagctcctctctcccctcctcccccagcccctacagctcctcaaccgccaggggaccccttgatgagtcggctgttctacggagtcaaagccggacccggtgttggggctcctaggagatctgggcatacgtttacagtaaaccccaggagatccgtacctccggctactcctgccacacctacatcgccagctactgtggacgccgcagtacccggagcgggaaaaaagcggtaccccaccgctgaagagatcctcgttctcggaggataccttcgactgagccgtagttgtctcgctaaagggagtcccgaaagacatcacaagcagcttaaaatttctttttctgaaaccgcactggagacaacgtatcagtatccgtccgaatcaagcgttctggaagagctggggccagagccagaggtgcccagcgctcccaacccacccgctgctcagccggatgacgaggaggatgaagaagagctgctgcttttacaacccgagctgcaaggcggtttgcgcaccaaagccctgatcgtggatgaaagctgcagaaggtag

SEQ ID NO: 30366 - DNA, 654 bp, synthetic construct
  source 1..654: mol_type = other DNA; note = Synthetic coding sequence
atgaatagtcaaccccagacaaggagcccgttcttccagagacctcagattcaacccccaagggccaccatccccaattcctccccctccattaggcccggtgctcaaacgcccactgccgtataccaagctaaccagcatatcatgatggttaatcacctcccgatgccatatcccgttccccaggggcctcaatattgcatcccccagtaccggcacagtgggcctccatacgtcgggcctcctcaacagtacccggtgcagcccccaggccctggccctttctaccctggcccaggccctggggattttcctaacgcctatggcactcctttctaccctagccagcctgtgtatcagagcgcgcctattattgtacccacccagcagcagcctccacccgcaaaacgggaaaagaaaaccataagaatccgggatcccaaccagggagggaaggacatcaccgaagaaatcatgtcaggcggaggttcgcggaaccctacacctcctattggacggcctaccagtaccccaacgcctccccagcaactgccgagccaggtgccagagcattcaccagtcgtatatggcacggtggagagcgctcacttagccgcatcgacccccgtgacagctgctagcgaccagaaatag

SEQ ID NO: 30367 - DNA, 969 bp, synthetic construct
  source 1..969: mol_type = other DNA; note = Synthetic coding sequence
atgtacttctgttggggagctgactcccgtgaactgcaaagaagaagaaccgccggttcccccggagctgagctcttgcaggcagcctccggcgagagacactctctcctgctacttaccaaccaccgggtcctctcttgcggcgacaatagccgaggacagctgggcaggagaggcgctcagagaggcgagttgcccgagccgattcaggctcttgagaccctcatagtggatttagtgtcatgtggcaaagagcattcgctcgctgtttgtcacaagggtagggtgtttgcctggggggcaggctccgaaggacagctggggatcggagagtttaaggagatttcttttacgcccaaaaaaatcatgaccctgaatgatatcaagatcatccaggtgtcctgcggacattaccactctctggcgctgagcaaggattcgcaggttttctcatggggtaaaaactcccatggacagctcggcctaggtaaagaattccccagccaggcatcgccacagcgggtgagatctctggagggaattccccttgcccaggtggccgcaggcggagctcattcatttgccctttccttatgtggcacttcttttggttggggatctaattctgctggccagcttgctttaagtgggagaaatgtgccagttcagtcaaacaagcctttgagtgtgggagcgctgaagaatttgggggtcgtgtacatcagctgcggagacgcccataccgccgttctcactcaggatggtaaggtttttactttcggtgacaatcgatctggacagctcggatactcccccacacccgaaaagcggggtcctcagctggtcgagcgaatcgacgggcttgttagtcagatcgattgcgggcgtcttcgagggtgcagttctcagacacatttctgctggaatatctgccagctgtgcgacaattcatcagttaaattggagtag

SEQ ID NO: 30368 - DNA, 1743 bp, synthetic construct
  source 1..1743: mol_type = other DNA; note = Synthetic coding sequence
atgagagccctgactgtccagcgtgtgaaatttgctatggatctgccgcttctgaagagggcgggacaggatctggccgagaaaacaaagaacttcgtgtccaggtccctagtcattggggaagtgctcagtatggcagatatggccactggggtcaagtgtggcatcatttactggcttttcggcggagctattcggaatctggggtcaccagaacatgtgaccaaatggtttcagcccctgcaggaacagaagtacacaggtatgttcgcaatgacagagcgaggccacggttccaacgcccgtggaatccaaaccgaggcgacatttgatctcagtgcccaagaattcgtgattgacacaccctgcgagaatgcagagaagatgtacattgggaacgccatgtacgggaactacgccgcagtgttcgcccagctcatcattgatggcaggagtcagggtccgcattgctttattgttcctgtgagagatgaaaatgggagcctctaccccggagtcactgctatcgatatgatgtacaaggaggggctacatggagttgataatggcatccttatcttcgacaaggtgcgcattcctagagaaaacctcctggataaattcgggagcgtggctcccgacgggcaatatcactcccccatccggaacaaatctgccagattcaacgccatgctcgccgcactcacccctagcaggctggctgtggccttccaggcaatgggtgctatgaagctgggcctgactatagctatcaggtatagccacagtagacgccagttcggacccaagactaaagaagaggtaaagatcattgagcatcagacccagactctgagactgatgccacatctggcgaccgccctggccctgactttcgtttctcgctatgcaggcgcattgctcgacgaggacgtgttccagggcaaggaactcgtcaattcccgctcactgcaggcactggtggccggactgaaagcttacagcacttgggagaatattagatgcctgcaggactgcagagagtgcaccggcggaatggtggtggggagagagctcttggcccagtataccaagcagtacgaagagaaaccgttatttgggctgctacagaattgggctgagtctgtgggtgataaacttcggacttcattcctggcattcaacatggatacagtggacgacctcgccttccttcttaaagccgttaagttcagggagagagtgctgcaaagaggactcgtggcaaggatctactataaggttaagactaaaaaagaggacttttttcatgcctggaacagctgcttgcaccatgtcgcttccttatccctcgctcacactcaccgggtgactctggagcagttcagcctggcggtgaaatcttgtcccgaccaggaggatcagacactacttatgaagttttgtttgctgtacggaaccaagttggtctttcaggagagagcatggtatctcgaacataaatacctgacacccatggcgagtactcgcataaggaaccagctgctggatttgtgtgactccgtgaaggacgatgctcgaagggtgatctccacgtttaatatcccacatacatatctgcacgcaccaatcgctggcatttcaaatccccgagcagcatgggccttttacccagcaccactccagccccgaccaagagaagaagccagatctagaagaccgaaactgggcgctaaactttag

SEQ ID NO: 30369 - DNA, 561 bp, synthetic construct
  source 1..561: mol_type = other DNA; note = Synthetic coding sequence
atgggagtgaatcagtccgtgggttttcctccagtcaccgggcctcacctcgtggggtgcggggatgtgatggagggccagaatttgcaggggagcttcttccgactgttctacccgtgtcagaaagctgaagaaacaatggagcagccgctgtggattccacggtatgagtattgtaccgggctcgcggagtacctgcagttcaacaagcgttgcggtggtctcttgttcaatttggcagtcggtagctgtcgcctccccgtgtcttggaacggacccttcaaaaccaaagattcagggtaccctttaattattttctctcatggtctcggcgctttcagaaccctttattccgccttctgtatggagttagcatcccggggattcgtggtcgccgtgcccgagcatagatgtgtgtactttagggacagatcagcagccacaacatatttctgtaagcaggctcctgaggagaaccaacccactaacgaaagcctccaggaggagtggatacccttccggagggtggaggagggagaaaaggagtttcatgtccgctag

SEQ ID NO: 30370 - DNA, 1620 bp, synthetic construct
  source 1..1620: mol_type = other DNA; note = Synthetic coding sequence
atggccacctctgccccactcagatctctggaggaggaggtaacctgctccatctgcttagactatcttagagacccagtcaccatcgactgtgggcacgtgttctgtaggtcctgtacaactgacgttaggcccatttctggcagccgaccggtgtgcccgctatgcaaaaagccctttaagaaggagaatatccggcctgtgtggcagcttgcatcgctggtcgaaaacattgaacgtctcaaggtggacaagggtcgccaacccggagaagttacccgggagcagcaggacgccaaactttgcgaacgccatcgagagaaactgcactattactgtgaagatgatggtaaactcctctgcgttatgtgcagagaatccagagagcacaggccacacaccgctgtcctgatggagaaagctgctcagcctcacagagaaaagattttaaaccacctctctaccctgagacgcgatagagataagattcagggcttccaggcaaaaggtgaggctgacatcctggctgccctcaaaaagctgcaagatcagagacagtacatcgtagccgagtttgagcaggggcatcagttcctgagggaacgtgaggaacacctccttgaacaacttgccaagctggagcaagaactgacagaaggacgggaaaagttcaaatctaggggagtcggtgagctagcaagactcgccctcgtcatcagtgagctcgagggcaaagcccaacagcctgccgcagagctcatgcaggacacgagagatttcttgaaccgctaccctaggaagaaattttgggtaggcaaacccattgcgcgtgtagtgaagaagaagacaggggagttttcagataaactgctgagccttcagagaggactgagggagttccagggtaagcttctgcgcgatctcgaatataagaccgttagcgtgacattagatccacagagcgcatccggctatctgcagctttcggaggactggaagtgtgtgacctatacatctttgtataaatctgcttatctgcacccacagcagtttgattgcgagccgggagtcttgggcagcaaaggcttcacatggggaaaagtgtattgggaggtggaggtggagagggaggggtggtctgaagacgaggaagaaggcgacgaagaggaggagggagaagaggaggaggaagaagaagaagctggatacggggacgggtacgatgactgggagacagatgaggatgaggagagtctgggtgacgaagaagaggaggaagaagaggaagaggaagaggtcctggagtcctgtatggtgggcgtcgccagggatagcgttaagcgaaaaggtgacctctccctgcgaccggaggacggcgtgtgggcacttaggctgagttcttccgggatctgggcaaatactagccctgaagcagagctgttcccagcactgcgtccgcgacgggtgggcatcgcactggattacgagggtggcacggtgaccttcacaaatgccgagagccaggagttgatctacacctttacggccaccttcacacggcgtctggtcccatttctatggctgaagtggcccggtacgagactcctcctacgcccttag

SEQ ID NO: 30371 - DNA, 2613 bp, synthetic construct
  source 1..2613: mol_type = other DNA; note = Synthetic coding sequence
atgagcaggaaccctagctctaatagtccagaagaggataccgtccccgtgcccaaaggatctgtccccgctgccagaccaagccgcggaggcatgagtgtcgtcggtatagatttaggcttcttgaactgttatatcgccgtggcccgtagcggtggaattgaaacaatagccaacgagtattccgataggtgtacacccgcttgtatttctcttggaagtaggacccgtgccatcgggaacgccgcaaagtctcagatagtaaccaacgttaggaataccatacatggcttcaagaaactccacggaagatcatttgacgacccaatcgttcaaactgagcgaattcggcttccatatgaactccagaaaatgcccaacggaagcgcaggagtgaaggtgcgctacctggaagaagaaaggcctttcgccatagaacaggtaactggcatgctgctcgccaaactgaaagagacatccgagaatgccctgaagaaaccggttgccgattgtgtgatttcgatcccctcgtttttcacggacgctgaaaggcgttcagtgatggctgcggcacaagtggctggactgaactgcctccggcttatgaatgagactaccgcagtggccctggcttacgggatctataaacaagatttgcccccacttgatgagaagcctagaaatgtggtgtttatcgatatgggccacagcgcctaccaggtgctggtctgcgctttcaacaaaggcaaactcaaggttcttgcgaccacgtttgacccttacctcggcggtaggaactttgacgaagcgctggtcgattacttttgtgacgagtttaaaaccaagtataagattaacgtgaaggagaattcaagggcattgttaaggctgtatcaagagtgcgaaaagttgaaaaaacttatgagcgcaaacgcaagcgacttaccgttaaacatagaatgcttcatgaatgaccttgatgtgagctcgaagatgaatcgggctcaatttgagcagttgtgtgctagcttgctggcacgggtggagcctcctctaaaggctgttatggaacaagcgaatctgcaacgcgaagacatctcctctatcgagatagtcggcggagccacaaggatacccgctgtgaaggaacaaatcacaaagttttttttgaaggacatctctactacactgaacgccgacgaagccgtggctcggggatgtgcactccagtgtgcaattctgagccccgcattcaaggttagagaatttagcatcactgacctggtgccttactccatcactttgcggtggaagacctcattcgaggatgggtccggggagtgcgaggtgttctgtaagaaccaccccgctccgttctccaaggtaattacattccataagaaggagcccttcgaacttgaggccttttacacaaacctgcacgaggtgccataccctgatgcaaggatagggtcctttactattcagaacgtcttcccgcagagcgacggcgattcctctaaagtgaaggtgaaagtacgggtgaatatccacgggattttctccgtagcgagtgcgtccgtcatcgaaaagcagaacctggaaggcgaccacagcgacgcacccatggagaccgaaactagttttaaaaatgaaaacaaagataatatggacaagatgcaagtggaccaggaggagggacaccaaaaatgtcatgctgagcacacacccgaggaggagattgaccacaccggcgcaaaaaccaagtccgcggtttccgacaagcaggatcgtctgaaccagaccctgaagaaagggaaagtcaaatctattgacctgccaattcagtcctccctctgtcgacagctgggtcaggatcttctgaattcctatattgaaaatgaaggtaagatgatcatgcaagacaagttggagaaggaacgaaacgacgccaaaaacgctgtggaggagtacgtgtatgacttccgtgatcgactggggaccgtttatgagaagttcattactcctgaagacttgtccaagctctcagccgtgctggaggacaccgagaactggttatatgaagacggcgaagatcaacctaagcaagtgtatgtggataagctgcaggagctgaagaagtatgggcagccgattcagatgaaatacatggaacacgaagagcggccaaaagctctgaacgacctaggcaagaagatccagctcgtgatgaaggtgattgaggcataccgcaacaaagacgaaagatatgaccatctggaccccaccgagatggaaaaagttgaaaagtgcatcagtgacgcaatgtcctggcttaatagcaaaatgaacgcacagaacaaactgtctctgacccaagacccagtcgtaaaggtgagcgaaattgtagccaaaagcaaggagcttgataatttttgtaatcctatcatatacaagcctaagccgaaggcggaggttccggaagacaaacctaaggccaatagtgagcacaacggacccatggacgggcagtcaggtacagaaaccaagagcgatagtactaaggatagtagtcagcacacaaagtcgtctggcgagatggaggtggattag

SEQ ID NO: 30372 - DNA, 5462 bp, synthetic construct
  source 1..5462: mol_type = other DNA; note = Synthetic coding sequence
atggagccgcctcaggaaaccaaccgacccttctccacacttgacaacaggtccggccaggtccaggttttgtctgctactcctcttttgcagaggaacccctacagcagccctgatattatgcacataaaaggtagtgaagccagtagtgtgccatacgcacttaaccagggaaccactgcactaccaaagaataagaaccaggaggggactggacaccgtcttcttaacatgttgcgcaagactctcaaagaatctgactctgaggaattagaaatcacgcaggagacgcctaacctggttcccttcggagatgtagtcgggtgcctggggattcacatcaaaaactgcaggcactttatgcccaagattagcttacagcactacgccaacctattcatcaggatatctattaataaagctgtgaaatgcaccaaaatgtgcagtttgttgtcaaagaacgatgaaaaaaatacggtgatcaaatttgacgaagtgaagtattttagcgtccaggtgccacgcagatatgacgacaagcgtaacaatattctccttgagctgatccagtacgataatagagagaaaagagccttcctgttagggagtgttcagatccacctgtacgaagtgattcagaaggggtgctttatcgaggaagttcaagtcttacatggcaacatcttcgtatgtcggttagaggtcgaatttatgtttagctacggcaactttggctacggcttttcccatcaactgaagcccctgcagaagattaccgaacccagcatgttcatgaacctggcgccaccacccgaaaggaccgatcccgtcaccaaagtcatcaccccacagacagtggaatacccagcattcctgtcaccagacctgaacgtcacagtcgggactccggcagtccagagctcgaaccagcctagcgtagtgaggctcgagaagctgcagcaacaacccagagaaagactggagaagatgaaaaaggagtataggaacctcaatacttggatcgacaaagcgaactacctggagtccattctgatgccaaaactggagcataaggacagtgaagagactaacattgatgaggcatccgagaatacaaaatcgaaccatcccgaggaagaactggagaacattgttggagtagatatccctctcgttaacgaagaggctgagaccactgctaatgagctgttagataacgactccgagaagggtttgacaatccccacgcttaaccagagtgatcaggataattctaccgctgacgccagcaaaaatgacgagtctacccccagtcccaccgaggtccacagcctctgtaccatctccaatcaggaaacaatcaaggccggacgtattcccccactgggggagaggcagtccgagtccatgcccgatcggaagatgaaaaacgttttctttcctttagaagtgaagctgaaagataactacccctctatcttgaaggcagattcaagcctctcagaagtcgcattttctccgaaggagtacaactccccatccttccgccctgaatatatcgaattcaagccaaaatttcaattccagaaatttaataaaaatggctttgaccccttcctcagaaatatcaataaaatgtctgtaaggaagagaaaggatcaggatatctataaatatcggaacatcctcggcgcagaggtgattgagcacgaagaccaggaccccccatatcctgctcagtcaaagacagcagggcctgccaatactacatgggcccatgatcctaacatctttactactaaaatgcttgagacagaaaacaagctcgctcccgatcctacgataaatacaatcaagggcttagacaccaaaaattctctgaaggaaaaccttcccaacgtctccctgcctagcatcaaaggtgagagctctcgggcagggaacgtgcaggcaaacacatgtcacctctccaagtcactcaactttacccctcacattgaatatctaaaacagtcaatgattctaaaatcaattctttccgagaacctccaggacctgagcgataaattgttttccaagcctgaagtctccatgaactcagaggcgagagagaaatcgtcctccccattactctcgattcacgacaaatcttccagcagtatggaggataacgtgctagagaagaagcaagacttaaacaactggcttagcgaaaaggatattctgaattcgaaaaccacactgtctcagattataaagaatatacccgcagatagtttcagcgaaggtagccaaattatcgagaatattccagcggactccctattggaagggggtcaggtgatcaaaaacatccctgaatatagcctcagcgaaggaggccagatcattaagaatatccctgccgactccttcctcgagtccggtcccggacagagtcctgaagtggaagaacacgtctccaaaaaacactttgaggccgatgagagggatttccccattaagaagaacagctccaccaagaagaaacacttgatttctgaggtgcccaactcgaaatctgggagctccggcacagtgcacgactacatcatgcggcagatcttcactgcccctattttctcagagctcgaaattgaggtgaaagagccttccgaaacacctatgaacttggagaaccagcttcccacgccttggaagaggtccttatcttctcacattctcttccatgaggaaaacgcggacgagattgagttgcctcagccccgtagcgcaacttcacagatcatccaagcatttccgatcgatactctactggaatcagggatcatcaaagtgattgaattagacaaggaacaccacaagtcctcgttgctgggtaccggtatcacttcaccaaaaggcaacctgaaggattctcaggaatactacagtgaaattcgaagtgagacagaaccgttatcagagcagagcattcccattattccgaaagacacgacatccgtgtctcgcgcagaattcattcaggaagaccagaacatgttcccccaagatagcagctattactcaatagccaataaggagctttacctgcctagaaacgggcagcgcctttgcaaggacaagaacgacctgagcagtacattggagtccctcacgaacagtctgatggacaaactcagtgagagcgacgagattatgttaaaatcttttctgaagaacatcttcaatgtgttcttcaagtacaaccactccgaaagacgagggcagcccgaaaaagaactcgagcgtttgatacagccttctttcacctccgacacagaacacctggaggaactgcaggaggatttcgacaaggccgataagttggaccgcaagcccatcttatcgcctaagctgagagttttcctggaagagctgagtgaatctgaagtcaaacacctgaagagcgaactgagcaagcagattcagcactatttggtagaacgcttatctgagtccggacacatcaccaaggaggatctgcccaagatctaccagaacctctacctgatgaatgaaaaagctgaacagaaggggcctaacagtttccagggtaagtattctgagactgtcaaagagataatgtccttcgtgaacaattttaatcaccactttatcgataagcacctagaaattaaattgagatcttttctcaaggaaatcttgcagaattacttcctgaaaaacatctctgagagcagcttatttaacgaaactgcatccgagaccatctatcccaacatctcttcactgcggacaaaatccgtgagcatctcattccacgaactcgaacaggacatatcaaagggcagtttcggtcgcagatttgagatcaacatgaagtacccactgtctaagtctcttcaaaactaccttatcgcactttccgagaacgagttgttacacctcaaggccgacctgagcaagcacctgcagtccctttttatcgagaagctgagtaagagcggactcatgaccaagaagcagctggaagggattaaccaacacataaacctcttgaattccagttccattcccctgaaatacattaaaacacatctgccctttcgggacgactgtcacttcgttgagaagcacagcgaaaagcagaataagtattcacggatagtgcagcagacgaccctccagacggtctctgaggacaaacttagagaggccgagcttattagagaaaaagagaagaaatactttcccctccaaaatctgaagggcaactctagcctgatcaaagaacagaaatcatattatactaaagaggaagcaaaaaccccctcactaatcaaggtccagccaagctccaatgaaaacattcaggcctcccccttatcaaagtcttcagaaattctgacggacattttgcttaagaagctccggaaggaacacgtattcacccagttaccccaagccgagaatagtgtgcacaaaactgaaatccaggatccatactcctggggaggcaagagtaagatcactcaaagtaaggcttggtgtgagaagaccctgaagatgaagagtctggaccggaaagaacatgttaacatctataaatggactgtacaagaaaagcccgaggccgtgctgacctcatatccgcgaatcccaaatgcgcgaatgcccagggaagacgagtatctgaataggattacatttccgagctggcagagctctacacttacccatttcaacaccgaaacgggagaaaaatccaagctcgaagaccagtactgccaaaccctgaaagggaacaataataacaacaagaaacacctggtgaccttcgcccagtataagaaggagattcagaccctgtacattaaaccggatgagatctgctctgaaaaatgtgccaaatttcccgagatacagtcgtttcaatacaaagtcgtggaggacgagaagaacttgaaacctcatttgtttccggagctttttaagattgaagacctgaaacccaaagtgcgtaaagagagagatcgggtcgcacagcccaagaaatcatttaataagatagtcagaattcttccaacaacactccctacaactaggattcacctgaagaagtctgttcctcgcacactcttgcactggaccgcaagacgtaccatccacgactgttcagacaagtttgaagaccttcatgatatgacgtcttttacccacctcaagaaagtgaaatcaagatcacggcttctgggtaagtcctcagacgacattcacaaccatgcacgccatagcgcccgaccttacactgcccctgaggtgaataaacaaagagagtcttactccggcaaatttaccagtagacgcatggtttcctctggacttgtccacatcaacgataagacaagtgattatgaaatgcataagatgcggcctaaaaagataaagaggggttacta

SEQ ID NO: 30373 - DNA, 498 bp, synthetic construct
  source 1..498: mol_type = other DNA; note = Synthetic coding sequence
atggagccgactcgcgactgccccctctttgggggtgcattcagcgctatcctcccgatgggagctattgacgtgtcagacctgcggccagtgcctgacaaccaagaggtattctgccaccccgtcaccgaccagagcttgatcgtggagctcctggagctacaggctcatgtccgtggcgaggctgcagcgaggtatcactttgaggacgtggggggtgtgcagggagccagggccgtccatgtagagtccgtccagccactatcgctcgaaaatctggctttgcgtgggaggtgccaggaggcttgggtgttaagcggtaagcaacagatcgcaaaggagaatcaacaggtcagagccagggagtgcgtgatgagttggaagggtggcagcggcgacgcggaaattcaggtttctatcttgaccttgatccctcttggttccaaggggagggatacctctagcggtttggccgaggctgcacccgtgccagattag

SEQ ID NO: 30374 - DNA, 4482 bp, synthetic construct
  source 1..4482: mol_type = other DNA; note = Synthetic coding sequence
atggcctccataacacagctattcgatgacctatgtgaggcgctgttacccgcagccaaaacccacctgggtcaacgctccgtgaatcgcaagcgggctaagcggagtctgaagaaagtagcgtataacgccctcttcactaacctgtttcaggacgagacccagcagctacaacccgacatgagcaaactcccggctagaaacaagatcctcatgctgtcattcgacctgagggtagggggactgggcccaaaggcagaccggctcgaagaactggttgaagaactggaggcagcaccctgctgtcctttacttgaggtaggctccgtccttgatctgttggtgcagctggcaggttctggtcctccccaggtcctgccccgaaagcgcgattactttctcaacaacaagcacgtgggacggaacgttccatatagtggatatgactgtgatgacctgtcagtatttgaaatggacgtgcagagcctcatcagtcgggaagaatgcctgtgccactccatgatccaagagacccttcaggtgatggaggccgctccagggacaggattacctacagtcggattgtttagctttggggatccatgtggtgatcggttcgagagagatactagagtttctttgttcggcgcactcgtgcactcaaggacctacgacatggatgtgcgcctcggtctcccacccgtcccagacaatgctgacctcagcggactcgccatcaaggtcccaccttctgtggaccaatgggaggatgagggttttcagagcgcctctaatttaacacctgactcacagtcagagcctagtgtcaccccagatgtggatctatgggaagcggcactcacctatgaggctagcaaaaggcgttgctgggaaagagtggggtgtcctccaggccacagagaggaaccatacctgacagaggctggcagagatgccttcgataaattctgtaggttgcaccagggcgagctgcagctcctcgcaggcggagtgctgcaggcaccccaacccgtactcgtgaaggagtgcgagctggtcaaggatgtgcttaatgtgctaattggtgtggtttccgctactttctccttgtgccagccagcacaggcctttgtagttaagagaggcgtgcacgtaagcggcgcttctcccgaaagcatcagcagccttcttagcgaagtagctgagtacggcacatgttatacacggttgtcccatttttctcttcagccggtgctggactcactatactctaagggactggtgtttcaggcctttacctcaggtctccggcgttatcttcagtattaccgcgcatgtgttctcagcacccctcccaccctgagcctgctgactatcggttttctttttaaaaagcttggaagacagctccgatacctcgccgagctgtgcggggtgggcgctgtgctacccggaacctgtggaggcggacccagagcagctttcccaactggtgtcaagctgctttcttacttataccaggaagcgctccataactgttcaaacgaacactaccctgtactgctcagcctgctgaagaccagctgcgagccctatactcgtttcattcatgactgggtgtatagcggagtatttagggacgcatatggtgagtttatgattcaggtgaaccatgagtatctgtccttccgcgataagctgtactggacccacggctacgttttgattagcaaggaagtggaggactgcgttcctgtgttcttgaagcacattgctcacgatatttacgtgtgtggcaaaacaatcaaccttctgaaattatgttgtccacgccattacctttgctggtctgacgtgcctgtgcccagaataagcgtcattttttctctcgaggaactcaaggagatcgagaaggattgcgcggtgtatgttggcaggatggaaagggttgccaggcacagcagcgtgagtaaggaggaaaaggagctgaggatggagatcgctaagcaagagttaattgcccacgctcgtgaggcggcaagccgcgtcctgtcagccctctccgaccgccagatgtctgaacgtatggccctggacgcaaggaagcgggagcaatttcagagactcaaagaacagtttgtaaaagaccaggaacgccgacaagcagctaggcaggaggagctcgacgatgactttagttatgccagagagttgagggacagagagcgtcgcctgaagagcctggaagaagagctcgaacggaaagctcgccaggctcttgtcgatcactattctaaattgtctgcagaagctgccaggcgtgagcagaaggcattgtggcgtatccagcggcatagattggagagtgccagactccgcttcttgttggaggacgagaagcatatccaagagatgctgaaggctgtttctgaggcccaccaaccccaggaaccacctgacgtcctgctctcagtccatccccaggtgacaagtcccggacccgaacacccagagggtggtcaaggctgtgattcgggatcagcagagcagcattccccagcatgggacggttggaaccggcctggcctcctgaccccgcagcctttgaaaccattggcagtcggtgccggaggtcggggactgcaacaagctgagggtgccagacccttctcagactccctgagtatcggagacttcttacctgtgggacctggcgcagagcccagcgtgcagaccggcatggtgccccttctggaagtggctcttcaaactatcaaccttgatctgccaccgagtgcccctggggaggcacccgctgccgcttctactcagccttcaagaccacaggagtacgacttttccacagtgctgaggcccgctgtggcaaccagcccagccccaggccctttgcaggcggctgagtgttccctgggaagctcaggcctccaactgtgggaggattcttgtggaaaaatggacgcatgtggctccgcatcccgggagacgctccttccctctcacccccctcgaagagccgcactcgaggagggttcatcgcaacccaccgagcgcttgttcggccaggtgtccggcggaggcctcccaaccggcgattatgcctccgagatcgcccctacccggccacgatggaatacccacggccacgtatcagacgcttctatcagagtcggcgagaatgtcagcgacgtcgctcctacccagcctagatggaacacacacggacacgtcagcaacgcatccattagcctgggcgagtctgtgtccgacgtcgcccctaccagacctcgctggaatattcacggtcatgtgagcaatgcgtccatcagggtcggtgaaaacgtatctgatgtggcgcctactcggccacgatggaatacgcacggacatgtttcaaacgcatctattagagtcggcgagaacgtgtccgacgtagccccaactcggccacggtggaatacccatggccacgtgagtgatgcttcgatctcccttggagagagtgtgagcgacatggctcccgctcgccctcgttggaacacgcacgggcatgtctctgacgcctccatcagcctcggcgagtctgtgtccgatatggcacccacaagaccaagatggaatacccacggccatgtgtcagacacttcaatccgagtgggggagaatgtatcagacgtcgctcccatccgcagtcgctgtaatacccacggccacgttagtgatgccagcatcagtttaggtgaacccgtatcggacgttgttagcacgagacctcggtggaatacccacgtgcccattcctccgcctcacatggtgttaggcgctctgtcccctgaggcagaaccaaacaccccacgtccacagcaatcaccccctggacatactagtcagtccgccctttctctgggtgctcaatcaaccgtgttggattgtggccctcgccttccagtcgaggtaggaccatccttgtcatccccttcttctgggtgcggcgagggttcgatctctgtcggggagaatgtttctgacgttgctcccacacagccttggtggcctaatacaccaggagatagcgtctcggaggaactgggtcagagtagagtcgctggcggacaggaatgggattgtggtacccaccgcgcttgggaagccctggggggagctgggacattaaggacctccttgcagatcggactgtccacacacaggaagacccagctccccagagctgcacaggctgtcgttagacggcgtcgccaccgacggagaaggctgcgggtcggttcccgccctacttggcaggcgtggcagggctcaactacctggtccggaactagaaccgtgacaagcccttgcccaagccgccctcttctgattttttgtgcgccttgcttccccggtccgagcccaagcccatggaccccaagatcgtccctccccctgatgcgactgctctgcagctag

SEQ ID NO: 30375 - DNA, 1077 bp, synthetic construct
  source 1..1077: mol_type = other DNA; note = Synthetic coding sequence
atggcccctcagaacctgagcacattctgcctgctacttctctatctcattggcgcagtcatagccggtcgggacttctacaaaatcttaggcgtgccccgttctgctagcataaaggacatcaagaaggcctataggaagctcgcgcttcagcttcatccggacagaaaccctgacgatccgcaggcccaagaaaaattccaggatctgggcgcagcatatgaggtgctctctgactctgaaaagaggaagcagtacgatacatacggtgaggaggggttgaaagacggccatcaaagcagtcacggggatatcttttcacactttttcggcgactttgggtttatgtttgggggtactccacgccagcaggaccgcaatattccaaggggcagtgacattattgtggatctagaagtgactttggaagaagtgtacgcgggaaatttcgtggaggtcgtccggaacaaaccagttgctagacaggcccctggcaaacgcaaatgtaattgtcgccaggagatgcgcaccacccagttagggcctggacgattccagatgacccaggaagtagtttgcgacgagtgccctaatgtgaagcttgtcaacgaagaacgaactctggaagtggagattgagcctggagtccgggatggcatggaatatcccttcattggagagggcgagccccacgtggatggtgagcccggtgacctccgcttcaggattaaggtggttaagcatcctatattcgaacggcgaggtgacgatctctataccaacgtgacgatcagccttgtggagtctctggtgggcttcgagatggacatcacccatttggatgggcacaaagtgcacattagcagagacaaaattactcgccctggtgccaagctgtggaagaagggtgaaggtctccctaattttgacaacaacaatatcaagggatcactgattattacattcgatgtggattttcccaaggagcagctcacagaagaggctcgtgagggcatcaagcagcttctgaagcaaggttccgtgcagaaagtttataatggccttcagggctactag

SEQ ID NO: 30376 - DNA, 2757 bp, synthetic construct
  source 1..2757: mol_type = other DNA; note = Synthetic coding sequence
atggcttctctgagtcgggctctgagggtggctgcagctcatcccagacagagtcctacacggggaatggggccatgcaacctgagtagtgctgccggtcccacagccgagaagtccgtgccctaccaacgaaccctgaaggaaggtcaaggcacgtctgtggttgcgcagggcccttcccgtcccctgcccagtaccgctaacgttgtcgtcattggcggtggcagcttgggatgtcagaccctgtaccatctggcaaagctgggtatgtctggggcagtcctcctagagagggaaaggctgacttctggcacaacatggcataccgccggactgctatggcagttaaggccatccgatgtggaagtagagctcctcgctcataccaggagagtagtgtcacgggaactcgaggaggaaaccgggctgcacacggggtggattcagaacgggggactgtttatcgcatctaataggcagcgcttagacgaatacaagagattgatgtcactcgggaaagcctacggggtggaaagccatgtgctgtcacctgccgaaacaaagaccctttaccccctgatgaatgtcgacgatctctatggcaccctgtacgtcccccatgacggcacgatggatccggctggcacgtgcacaaccctggctagggctgcctccgccagaggggctcaagtgattgagaattgccccgtaactggtatccgagtctggacagacgacttcggggtgaggcgtgtagcaggggtggagacacagcatgggtctatacaaaccccctgcgtcgtgaattgtgcaggtgtctgggcttccgccgtaggccgaatggcaggcgtcaaggtgccactggtagcaatgcaccatgcctacgtggtcacggaaagaatcgaaggcatccaaaatatgccgaatgtgcgcgatcacgacgcttccgtctatctccgcctccagggggacgccctgtccgttggcggatatgaagcaaaccccatcttttgggaggaagtgagtgataagttcgcattcggactcttcgaccttgactgggaagtatttactcaacatatagagggtgctatcaaccgagtgcccgtcctcgagaaaacagggattaagagcaccgtatgtggcccagaaagctttactccagaccacaagcccctcatgggtgaagcacccgagctcagaggcttttttctgggctgtggcttcaattcagccggaatgatgcttggtgggggatgtggccaagaactagcccactggataatacatggccgacctgaaaaagatatgcacggttacgacataagacggtttcatcattctctcaccgaccacccaagatggatccgagagcggtctcatgaatcttacgctaagaactactctgtagttttcccacatgacgagcccctggctgggagaaacatgcgacgcgatccacttcatgaggagctactcgggcaaggttgtgtttttcaggagcgccacggctgggagagacctgggtggtttcatccccgaggacctgcccctgtgttagaatatgattactacggagcctacggaagccgtgcccatgaagattatgcctatagaaggctgctggccgacgaatataccttcgcatttccaccccatcacgacactattaagaaagaatgtctggcatgcagaggggctgcagccgtgttcgatatgagctacttcggcaagttttaccttgtaggactcgatgcacggaaagccgctgattggttgttttccgctgacgtgtctcgccctcccggatcaacagtgtatacatgcatgctaaatcacagaggtggtaccgaaagcgatcttacagtttctaggctggctccatcacaccaggcgtctccactggcccctgcgtttgagggcgacggatattacctggcaatgggcggtgccgtcgcgcagcataactggagccacattaccacagttctccaggatcagaaaagccagtgtcagctgatcgattcatccgaggatttagggatgatcagtattcagggacctgcctctagggcaatcctgcaggaggttctcgacgcagatttaagcaatgaggctttccccttctctacacacaagctgctgagagcagccggacacctagtgcgtgctatgcgcctgtctttcgtcggagaactcggctgggaactgcatataccaaaagcctcctgtgtgcccgtatatagggccgtgatggcagctggggctaaacatggtctcatcaatgccggttatagagctatagatagcttaagcattgaaaagggctataggcattggcatgccgatctgagaccagatgacagccccctggaagctggactagccttcacctgcaagttaaagagccctgtgcctttcctcggacgggaagcacttgagcagcagcgagcggcaggactgcggagaaggctggtctgctttacgatggaggacaaagtgcccatgtttggactcgaggcgatctggagaaatggacaggttgtgggacatgtgcgacgcgctgactttgggttcgcaattgacaaaacgatcgcatacggttacattcacgacccgtccggcggaccagtatctttggacttcgtcaagagcggcgactatgccctggaacgtatgggcgtcacgtacggagctcaagcccatctgaaaagtccctttgatccaaacaataagcgagtaaagggcatttattag

SEQ ID NO: 30377 - DNA, 222 bp, synthetic construct
  source 1..222: mol_type = other DNA; note = Synthetic coding sequence
atgtcctatcagcagcagcaatgtaagcagccatgtcagccgcctccacccgtgtgccgactgcccaagcgtccagaaccatgtccaccactcaagtgtccggagccatgcccacctcctaagtgcccccagccttgtcccccacaacagtgtcagcaaaagtaccccttagtgacacctagtcccccatgtcagcccaaatgtcccccaaaatccaagtag

SEQ ID NO: 30378 - DNA, 576 bp, synthetic construct
  source 1..576: mol_type = other DNA; note = Synthetic coding sequence
atggggaagaaaaccaagagaaccgcagattctagctcctctgaagacgaggaggagtatgttgtcgaaaaggtgctggatagaagggttgtaaagggacaggtggagtatctcttgaagtggaaggggtttagcgaggagcacaacacgtgggagccagaaaaaaatctagattgccccgaactgatttcagagtttatgaaaaagtataaaaaaatgaaggagggcgaaaacaacaagcccagagagaagagtgaatcaaataaaagaaaatcaaactttagcaacagtgctgacgatatcaagtccaaaaaaaagcgggagcagagcaatgacatcgcaagaggcttcgagcgcggacttgagcctgagaaaattataggcgctaccgattcatgcggcgatctgatgtttctgatgaagtggaaagatacagacgaagccgatcttgtgctggccaaggaagctaacgtgaaatgcccgcaaatagtgatcgctttttacgaggaacgactgacttggcacgcttatccggaggacgcagaaaacaaagagaaggaaaccgctaagtcatag

SEQ ID NO: 30379 - DNA, 60 bp, synthetic construct
  source 1..60: mol_type = other DNA; note = Synthetic coding sequence
atgctgaagaataagggacactcctcaaagaaggataatctggccgtaaatgccgtgtag

SEQ ID NO: 30380 - DNA, 1026 bp, synthetic construct
  source 1..1026: mol_type = other DNA; note = Synthetic coding sequence
atggaaagcaatttcaaccaggaaggagttcctagacccagttacgttttcagcgctgatccaatcgcaagacccagcgaaatcaattttgatggcattaagcttgatctgtctcatgaattttctctggtggctccaaacaccgaggccaactctttcgagtcaaaggattatctgcaggtttgtttgcgcataagacctttcacccaaagtgaaaaggaattggaaagcgaaggatgcgtacatattctggactcccagacagtagtactgaaagaaccacagtgtattcttggtagacttagcgaaaagtcttcagggcagatggcacagaaattcagcttctccaaggtctttggcccagccacaacgcaaaaggagttcttccaaggatgcatcatgcagccggtcaaggatctgctgaaagggcagtcccgcttaatcttcacgtatggcttgactaattctggaaaaacatatacattccaaggcaccgaagagaacattgggatcttgccacgcacactgaatgtgctatttgactccctgcaggagaggctttataccaagatgaaccttaaaccccacaggtcacgagaatatttacggctgtcctcggaacaggaaaaggaagagatagcttctaaaagtgctctcctccggcagatcaaggaagtgactgtacacaacgactccgacgacacactgtatggcagccttactaactcgttgaatatcagtgagtttgaggagagcatcaaagattacgagcaagccaaccttaatatggctaatagcattaaattttccgtgtgggtgagcttctttgagatttacaacgagtacatctacgacttgtttgtgccagagctggcgaaaacaaagggagaactgatcaagactaaggaggagctgaagaagcgtgagaatgagtctgattctctgatccaagaattagaaacgtccaacaagaagatcattactcagaatcagcgcattaaggaactgataaatatcatcgactag

SEQ ID NO: 30381 - DNA, 27 bp, synthetic construct
  source 1..27: mol_type = other DNA; note = Synthetic coding sequence
atggctgacacagacctgttcatgtag

SEQ ID NO: 30382 - DNA, 2628 bp, synthetic construct
  source 1..2628: mol_type = other DNA; note = Synthetic coding sequence
atgatgtacacagtgctcccggatggttcgcccgttcctcaggggatggcattgtacgccccacctccccctttaccaaacaattcccggccactgactccaggtaccgtggtgtacggccctccgccagccggagcccctatggtctatggcccaccccctcccaatttttctattccgttcattcctatgggcgtcctacactgtaacgttcccgaacatcacaatttagagaatgaggtcagtaggctggaggacattatgcagcacctgaaaagtaaaaaacgggaggagaggtggatgagagcctctaaaagacagtccgaaaaggaaatggaagagctgcaccataacatagatgatctgctccaagagaagaagagccttgagtgcgaggtcgaggagctgcatcggactgtgcagaagcgccaacaacagaaggattttatcgacggaaacgtggagagcttgatgactgaactggaaattgagaagagcttgaagcaccacgaggatattgtggatgaaattgaatgtatagaaaaaacactcttgaaaagacggagcgagcttcgcgaggccgatcgactgctcgcagaggcggagagtgaactaagctgtactaaagagaagaccaagaatgccgtggagaaattcaccgatgctaaacggtccctactacagactgaatctgacgccgaggagctcgagagaagggcccaggagaccgcagtgaatcttgtgaaagccgaccaacaactgagaagcctccaggccgacgcgaaggatctagaacagcataagataaaacaggaagagatactgaaagagataaacaagatagtggccgctaaagattccgactttcagtgtctgtctaagaaaaaggagaagcttactgaggaactgcagaagttacaaaaagacatcgaaatggccgagcggaacgaagaccaccatcttcaagtgctgaaagagtctgaggtgctattacaggcgaagcgagcggagctggagaagctgaagtctcaggtcacctctcaacagcaggagatggccgtgctggataggcagttgggacataagaaagaagagttgcaccttcttcagggtagcatggtgcaagcaaaagcagacctgcaggaggcactgcggctcggggaaaccgaagtgactgaaaagtgtaaccacatccgcgaagtcaaatctctgcttgaggaattaagctttcagaaaggagaactgaacgtgcaaattagtgagcggaagacccagctcacgttaattaaacaggaaatagagaaagaagaagaaaatctgcaggtggtcctgcggcaaatgtcgaaacacaagactgaactgaaaaacattttggatatgcttcaactggagaaccacgagctgcagggcctgaaactgcagcacgatcagagggttagcgagttggagaagactcaggtggcagtacttgaggaaaagctcgagctggagaatcttcagcagatatcccagcagcagaagggcgagatcgaatggcaaaaacagcttctggagagagataagcgcgaaatcgaacggatgaccgcggaaagcagggctctgcaatcatgtgtggagtgtttgagtaaagagaaggaggatctgcaggagaaatgtgatatttgggaaaagaaacttgctcagaccaaaagagtcctggccgctgctgaagaaaatagtaaaatggaacagagtaacttggaaaagctggagctgaacgtgcgcaaacttcaacaggagctggaccaactcaaccgcgataagctctccctccataatgacatcagcgccatgcagcaacagttgcaagagaagcgagaagcggtgaactcactgcaggaggagctggcgaacgttcaggatcacctgaacctcgctaaacaggacttgctgcatactactaagcaccaggacgtgcttctgtcagaacagacccgcctgcaaaaagacatttctgagtgggccaacaggttcgaagactgccagaaggaggaggaaactaaacagcaacagctccaagtgctgcagaatgagatcgaagaaaataagctgaagttggtgcaacaggagatgatgttccaaagactccaaaaggaaagagagtcagaagaaagtaaactggagacaagtaaggtaacgctcaaggagcagcagcatcaattggagaaagagttgactgaccagaaaagcaagctggaccaggtactgtccaaggtacttgcggcagaagaacgtgtcagaaccctgcaagaagaagagagatggtgcgagtctctcgagaagaccctgtctcagactaagcgacagctgagcgaacgcgagcagcagcttgtagagaagagcggagagctgctggctcttcaaaaggaggctgactccatgagagcagatttcagtctccttcgcaaccagtttctcactgaacggaaaaaggcagagaagcaggtggccagcttgaaggaggccctgaaaatccagcgctcacaactcgagaagaatcttctgaccgcccgtgaggccgaggctcagaaactgaagaagcaggtgtgtgcgcaaaaggcacagctggcaagtttaggccgtgaatag

SEQ ID NO: 30383 - DNA, 1188 bp, synthetic construct
  source 1..1188: mol_type = other DNA; note = Synthetic coding sequence
atggaacccccacaggagaccaaccgaccattctccacactggacaacaggtcgggtcaggtccaggttctatctgccacgcctctattacagcgaaacccttacagctccccggatataatgcacatcaagggatctgaagcatccagcgtgccttacgctctcaatcagggaacgacagcgctgcccaaaaataagaaccaggaaggcacaggacatcggcttctgaatatgctgcggaagacgctgaaagagagtgatagcgaagaactcgaaattacccaggagacccccaatctcgttccattcggagatgtggtagggtgtctgggcatccacataaaaaattgccggcactttatgcccaagatctctctgcaacactatgctaacttgttcatccggatttctataaataaggcagttaagtgcaccaaaatgtgtagcctgcttagtaaaaatgacgagaagaacactgtgattaaattcgatgaggtaaagtacttctccgtacaggtgcccaggcgatatgatgacaaacggaacaacattctccttgaactgatccagtacgataaccgcgagaagcgtgcattcctattgggcagtgtacagatacacctttatgaggtcattcagaagggctgctttatcgaggaagtccaggtgttgcacgggaacatcttcgtttgccggctggaagtggaattcatgttctcatatggaaattttggttatggattttcacaccaactcaagcctctccagaagattacagagccatccatgttcatgaatttggccccacctccggaaagaaccgacccggtgaccaaggtgattactcctcagacagttgagtatcccgcattcttgtctcctgatctcaacgtgaccgtgggaacacccgcagtgcagtcctcaaatcaaccatccgtcgtgaggctcgagaagctacagcagcaacccagagaaaggctggagaaaatgaagaaagagtaccgaaatctgaacacatggattgataaggcaaactaccttgaatctattctcatgcccaagctcgagcacaaggactcggaggagacaaatattgacgaggcatcagaaaataccaagagcaaccatcctgaagaggagctggagaatatagttggcgttgggggatttttcactaagaggatatag

SEQ ID NO: 30384 - DNA, 282 bp, synthetic construct
  source 1..282: mol_type = other DNA; note = Synthetic coding sequence
atgtcttactatcaacgtcccttctcaccatctgcgtactcactgccagcgtccctcaatagctccatcgtcatgcagcacggaacttcgctggactctactgacacttatccccaacacgcgcagtctctggacggcacaacatctagcagcatccctctttacagatcctcagaggaggaaaaacgtgtcacagtcatcaaagcaccccattatcctggaatcggacctgttgatgaatccggaatcccaactgctatccgtacgactgttgatcgatag

SEQ ID NO: 30385 - DNA, 558 bp, synthetic construct
  source 1..558: mol_type = other DNA; note = Synthetic coding sequence
atggccgctagtgtggaacagcgcgaagggaccatccaggtccagggtcaggccctgttttttagggaagcactgcccggttcaggccaagctagattcagcgtcctgctacttcatggaataaggttttctagcgagacatggcagaacttagggacattacatcgattggcacaggctggttatagggcggtggccattgaccttcctgggcttggtcattctaaggaggctgctgccccagctcctataggcgagctggcccctggttcatttctcgcagccgtggtggacgctctggagttaggccctcctgttgtgcctgtcgcgcctatctgcactgacaaaatcaatgccgctaattacgctagtgttaaaactccagccctgatcgtgtacggcgaccaggaccccatgggacagacatcatttgaacatctcaaacaactgccaaaccacagagtgctcatcatgaagggagctggtcatccgtgctacctcgataagcccgaggaatggcatacaggacttctcgacttcctgcagggcctacaatag

SEQ ID NO: 30386 - DNA, 1443 bp, synthetic construct
  source 1..1443: mol_type = other DNA; note = Synthetic coding sequence
atgctcgagagacctcccgctttagccatgccaatgccaaccgagggcacacccccacctcttagtggaacgcccattccagtgcccgcttatttcagacacgccgaacccggtttctccctgaagcgcccacgcggactgtcacggagcctaccgcctccccctcccgctaaagggagcatccctatttcaaggctgtttccaccaagaacaccaggctggcaccagctgcagccaaggagggttagttttcgcggagaagcatccgaaaccctccagtctccaggatatgatccatcacggccagagtcatttttccagcagagcttccagaggctttctagactgggccatggcagctacggcgaagtcttcaaggtgagaagtaaagaggatggcagactttacgcagtgaaacgaagtatgagccccttccggggtcccaaagacagagccagaaaactggccgaagtcggaagtcacgaaaaggttggccagcatccttgttgtgtgcgcttggaacaggcatgggaggagggcggaattctgtatctgcagaccgagctgtgcgggccatctttgcagcagcactgtgaggcttggggggcttcgctgccagaggcccaggtctggggctacctacgcgatacgttgctggccctggcacatcttcactcccagggtcttgtccacctggacgtgaagccagccaatattttcctgggccctagggggaggtgtaagcttggcgacttcggactgttggtggagctgggcactgcaggcgctggcgaggtacaagagggggacccacgctacatggctcctgaacttctccaggggtcatacggaacagctgccgatgtgttttctctggggcttacgattttagaagtcgcctgtaatatggaactcccgcacgggggagaagggtggcaacagctgcgccaggggtacctgccccctgaatttactgcaggactgagtagtgagttacgatctgtgttggtcatgatgttagagcccgatccgaagctgcgggcaactgctgaggcgttgctggcacttcctgtactgagacagcccagagcttggggcgtgctctggtgtatggctgccgaggccctgtctagaggctgggccttgtggcaggctctcctcgcactcctatgttggctctggcatgggctggcacatcccgctagttggctacaacccctcggtccacccgctactccgcctggaagccctccatgcagtttactcctagatagctccttgagtagcaattgggacgatgacagcctgggtcccggtcacccgccttgcctcgcttgtccccctgcaggactgcactcacctctcaggcttagctggcccggactgtggggggcaccacctcctccaggagctggagcacacccaggtatgccttggacctag

SEQ ID NO: 30387 - DNA, 1740 bp, synthetic construct
  source 1..1740: mol_type = other DNA; note = Synthetic coding sequence
atgtcagctgctaatcctgagacgcccaacagcacaatttctcgggaagcttccacacaaagttccagcgccgctgcttctcagggctgggtcctgcctgagggaaagatcgtgccaaacacagttttcgtcggtgggatcgacgcaaggatggacgaaactgagatcggatcctgtttcgggaggtatggctccgtcaaggaggtgaagatcatcactaaccgaaccggagtcagcaaagggtatggctttgtgtccttcgtcaacgacgtggacgttcagaaaatagtggggtctcaaattcatttccacgggaaaaaactgaagctcggccctgcaattcgcaagcagaagctgtgcgctagacatgttcaaccgaggcctctcgtagtgaatcccccacctccccctcagttccagaacgtttggagaaatccaaacacagagacttatctgcagcctcagattacacctaaccctgtaacacagcatgtccaatctgccgctaatcccgaaacccccaattctaccatctctcgcgaggcaagcacccaatcttcaagcgctgcagccagccagggctgggtgctccctgaaggtaagatcgtgccgaacaccgttttcgtagggggaattgatgccaggatggatgagaccgaaatcggaagctgtttcgggagatatggtagcgtgaaggaggttaaaatcattactaatcgtaccggcgtcagcaagggttacggttttgtatccttcgtcaatgatgttgatgtgcagaagattgtcggatctcagattcacttccacggaaaaaagctcaagctggggcctgctattcgcaagcaaaaactttgtgcccgtcacgtccagccacgcccactcgtagtgaacccccctccccctccacaattccagaatgtttggagaaaccccaacacagaaacctacctgcagccacagattacacccaaccctgtgacacagcacgtgcaggcctacagcgcgtaccctcactctcccggacaggtgataaccgggtgtcagttactggtatataactaccaagaatatccgacctatccagacagtgcctttcaggttactacgggataccaactgccagtgtataactaccagccattcccggcttacccgaggtcccccttccaggtgactgctggctatcagctccctgtgtataactatcaggctttccctgcatacccaaacagtcccttccaggtcgctactggataccagtttccggtttacaattaccaaccgttccctgcgtacccatcgtcgcctttccaggtgaccgcgggttaccaactgcctgtgtacaattatcaagccttccctgcctatccaaattcccctttccaggtggcgactggttaccagtttccagtgtacaactaccaggctttcccagcgtacccaaattcacccgtccaggtgactaccggctaccaactgcctgtttataactaccaggcttttcctgcctatccgtcgtcacctttccaggtgactacaggttaccagctccccgtgtataactaccaggccttccccgcttacccaaactctgctgtgcaggtaactacaggttatcaattccatgtgtacaattaccagatgccccctcagtgtccagttggagagcaaagaagaaatctctggactgaggcatataaatggtggtatctggtctgcttgatccagaggcgcgattag

SEQ ID NO: 30388 - DNA, 975 bp, synthetic construct
  source 1..975: mol_type = other DNA; note = Synthetic coding sequence
atggaggctctggggcctgggggagaccgggcttcgcctgcaagtagcacatcctctctggatttgtggcacctttctatgcgcgcagattctgcgtattcctccttctccgctgcatcagggggaccagaacctagaacccagtcccctggtaccgaccttttaccatacctggactgggactacgttcgtgtagtctggggcggtcccggacccgctcccccagatgctgcactttgtacctcaccacggcctcggcctgcagtggccgcacgctccggccctcagccaactgaggtgccgggaacacccggacctttgaatcgccaggcaacacctttgctgtacgccctggcagctgaggccgaagctgccgctcaagctgctgaacccccttcccctccagctagccgcgcagcttacaggcaaagattgcagggagctcaacggagggttttgagggaaactagctttcagcgtaaagagcttcgcatgtctttgccggcaaggctgagaccaaccgtgcctgcaagaccgcctgccacacacccacggtccgcatcgttgtctcacccgggaggagagggtgagcccgctcgatcgcgagccccagctcccggtacagcaggcagagggcctcttgccaaccagcagaggaaatggtgcttttcggaacccggtaagctggatagagtgggaagaggaggcggacctgcacgggaatgtttgggtgaagcctgcagctcgtccggcctgcctggcccagaaccacttgaattccagcatcctgcattggcaaaattcgaggaccatgaggtcggctggttgcctgagacacaaccacaaggctccatgaatctggatagtgggtcacttaaactgggtgatgccttccggcctgcctcaaggtcgcgttccgccagcggggaggtgttaggctcatggggtgggagcggcggaactatccccatttag

SEQ ID NO: 30389 - DNA, 780 bp, synthetic construct
  source 1..780: mol_type = other DNA; note = Synthetic coding sequence
atgcccagagccagatcaggtcggagatcccggggagcgggaggccgagaggagacgtttctgcgggtgcgcgcaaatcggcaaacgagactgaacgctcggatcgggaagatgaagagaagaaaacaggacgaaggtcagcgtgagggcagctgcatggctgaggatgatgccgtggatatcgaacacgagaacaacaataggtttgaagaatatgagtggtgtggccagaagcgcatcagagcaacaacgttgctggaaggaggcttccgtggcagcgggtttattatgtgcagcggtaaagaaaatcccgactcagacgccgaccttgatgtcgatggcgacgatactctagaatacggaaagcctcagtacactgaggccgacgtgatcccctgtacaggagaggagccaggagaagctaaagaacgggaagcgctacggggagctgtactgaacgggggaccccctagcactcggatcacccctgagttctctaaatgggcttcagatgaaatgccttccaccagtaatggtgagtcctccaagcaggaggctatgcaaaagacttgcaagaattcggatatcgagaagatcacggaagactcagcagtgacaacatttgaagccctgaaggcgagggtccgcgagcttgaacgacaactgagcaggggtgacaggtacaagtgtcttatttgtatggactcttactccatgcccttgacatctatccaatgctggcatgtccactgcgaggagtgctggttgaggaccctgtag

SEQ ID NO: 30390 - DNA, 369 bp, synthetic construct
  source 1..369: mol_type = other DNA; note = Synthetic coding sequence
atggccacaagtgccccactgcggtccttggaagaggaggtgacctgtagtatctgcctggattacctccgggaccccgtcacaattgattgtggccacgtcttttgccggtcttgtaccaccgatgttcgtcctatatctgggtctcggccagtgtgtcctttgtgtaagaagccgttcaaaaaagagaatatacggccagtttggcaattagcctccctggtggagaatatcgagcgactgaaggtggacaagggcaggcagcctggcgaggtgactcgcgagcagcaagatgccaaattatgcgaacggcatcgcgagaagcttcactactactgcgaagacgatggcaaattgctgtgcgtctag

SEQ ID NO: 30391 - DNA, 984 bp, synthetic construct
  source 1..984: mol_type = other DNA; note = Synthetic coding sequence
atggcgtcattccttaagggcgcacacgtcacaattaatgccagggctgaagaggatgtcgaaccagagtgtatcatggaaaaggtggcaaaggcctccggggcaaattacagttttcataaggagtctgggcgttttcaggatgttggtccgcaagcccctgtgggatctgtctaccaaaagactaacgctgtgtctgaaattaagagagtaggcaaagattccttttgggccaaggccgaaaaggaagaggagaacaggcggttggaggaaaaacggagagccgaggaggcccaaagacaactggagcaggagcggagagaaagggaactgcgcgaagcggctcggagagagcagaggtatcaggaacaagggggtgaggcaagcccccagcggacgtgggagcagcagcaggaagtcgtctctcgtaatcggaacgagcaggagagcgccgtccacccgagggagattttcaagcagaaggagagagctatgtccacaacgtctatatcttcgccacagcccggaaaacttagatcccctttccttcaaaagcagctgacccagcccgagacccactttggtagagaacccgcagctgcaatttcccggccacgcgctgacctacctgctgaggaacccgctccaagtacacctccctgtctggttcaagccgaggaggaggcagtctacgaagagccacctgaacaggagacattttatgagcagccgcctttggttcagcagcagggcgcaggtagcgaacatattgatcaccacatacaggggcaggggctatccggacaagggctgtgtgcccgtgctttgtatgattatcaggcggcagacgacacagagatcagctttgacccagaaaacttgatcactgggatcgaagttattgatgagggatggtggcggggttatggcccagatggtcactttgggatgttccctgctaactatgtcgaactgattgagtag

SEQ ID NO: 30392 - DNA, 438 bp, synthetic construct
  source 1..438: mol_type = other DNA; note = Synthetic coding sequence
atgcagggacgtattaccaaagtgctgaatatgaaacctcctgagatcctgtcaatgatagaagaagccgcaggcacaagaatgtatgagtataagaaaatagctgcacagaaaaccattgagaagaaggaagccaagctgaaagagatcaaaacgattctcgaggaggaaataactcccactatccaaaagcttaaggaggaaaggtctagctacctggagtatcaaaaggtgatgagggagattgagcacctttcacgtctgtacatcgcctatcagttcttgttggccgaagatacaaaagtacgtagcgctgaagaactgaaagagatgcaggacaaagtgatcaagttacaagaggaattgtctgagaacgataagaagatcaaagctctgaatcacgagatcgaagagctggaaaagagaaaagataagtag

SEQ ID NO: 30393 - DNA, 816 bp, synthetic construct
  source 1..816: mol_type = other DNA; note = Synthetic coding sequence
atggagaaggagactggtattagtcagcagcgcaactactattttacccaatcaaagggagagccccttcagatcgaccacctcgtgttcgtagtacacggtatcggtccggcatgtgatctcagatttcgtagtattgtacagtgtgtgaacgatttccggtctgtctcactgaatctgttgcagacccactttaagaaagcccaggaaaaccagcaaattggacgcgttgagtttctccccgtgaattggcactctccactccattctactggcgtcgatgtagacctgcagcgaatcactctgccatctatcaataggctgaggcattttaccaacgacaccatccttgatgtcttcttctacaattcaccgacatattgccagaccatagtggatacagttgcatccgaaatgaaccggatctatactttattccttcagcggaacccagatttcaaggggggagtttccatcgctggacattcgctcggatccctcattttgtttgatattctcacgaaccagaaggattctctgggggacatcgactctgagaaggactcgctgaacattgttatggaccaaggtgatacacctaccctagaggaagacctgaaaaaactccaattgtccgaattttttgatattttcgaaaaagaaaaagtggacaaggaggcacttgccctttgtaccgatcgcgacctgcaagagatcggaattcctctggggccacgcaagaatctctcaagtgcagtggccgtaattttagagatggtgaccatctggatgctcgccttagggcgttgcctctag

SEQ ID NO: 30394 - DNA, 1818 bp, synthetic construct
  source 1..1818: mol_type = other DNA; note = Synthetic coding sequence
atgggcggatgtttctccaagcccaagcccgtggagctgaaaattgaggtcgtgttgcccgaaaaagagcgcggtaaagaggaattatctgcctccggaaagggcagccctcgggcatatcaggggaacgggacggccagacacttccacactgaagaaagactcagcaccccacatccatacccctccccccaggattgtgttgaggcagcagtgtgtcatgtgaaggatctcgagaatgggcagatgcgggaggttgagttaggttgggggaaagtcctgctggtgaaagataatggggagtttcatgccttagggcataagtgtccacattacggagccccactcgtgaagggcgtgctgagtagaggtagggttagatgtccatggcacggtgcatgtttcaacatctccaccggggaccttgaggactttcccggtcttgacagcctccacaagttccaggtgaaaattgagaaggagaaggtttacgtgcgcgcttcaaagcaagcattgcagctccagcgcaggactaaagtcatggctaagtgcatctcaccatccgctggatactcgtcatcaacgaatgtcctgatcgttggcgcaggagctgcaggtttggtgtgcgcagaaactctcaggcaggagggtttttctgatcgcattgtcctgtgtaccctcgacagacacctgccatatgaccggccaaaactctctaaatcactggacacccagcccgaacagctggccctccgccctaaagagttctttagagcatacggtatcgaagtgctgactgaagcacaggtcgtgactgtcgacgtacgcacaaaaaaagtggtgtttaaagatggttttaagctcgaatactctaaactcctgctggcccctggttcttcacctaagacactctcatgcaaaggaaaggaagtggaaaacgtcttcaccattcgcaccccagaagatgctaatcgcgtcgttcgtctcgccagggggaggaacgtggtggttgtcggagctggcttcctaggtatggaggtggccgcatatttaactgagaaagcacactctgtttccgtggtcgagctggaagagacccccttccgcaggttcctgggagagagagttggccgagccctgatgaaaatgttcgaaaataaccgagttaagttttacatgcagactgaggtatccgagcttcggggacaggaggggaagttgaaggaggtggtccttaaaagctctaaagtggtgagggccgatgtgtgtgtagtgggcattggagctgtccctgctaccgggttcctccgtcagagcggcatcgggcttgattcccgcggtttcatccctgtcaataaaatgatgcagacaaatgtcccaggagtgttcgctgcaggagatgctgtcacgttccctcttgcttggagaaataacaggaaagtgaacattccacattggcaaatggcccacgcccagggcagagtggcagctcagaacatgctggcccaggaagccgaaatgtctacagtaccttacctttggaccgcaatgttcgggaagtcccttagatacgccggatacggggagggcttcgatgacgtgatcattcagggcgacttggaggaactaaaatttgttgcattttacaccaagggagatgaagtgatcgcagtggctagcatgaactacgatccaattgtgagtaaggtcgcagaggtcctggcttcaggacgcgctattcgaaagcgcgaggttgaactctttgtgttgcacagtaagacaggggacatgtcttggctaactggcaaggggagctag

SEQ ID NO: 30395 - DNA, 294 bp, synthetic construct
  source 1..294: mol_type = other DNA; note = Synthetic coding sequence
atgcagacctcaagctcccgctctgtccatctctccgagtggcagaaaaattactttgccatcacaagcggcatttgcaccggaccgaaagcggacgcctaccgggctcagattctgagaatacaatatgcctgggcaaactccgagatatcacaggtgtgcgctaccaaactgtttaagaaatacgctgaaaagtactcagccattatcgacagcgacaacgtcgaatctgggctgaataattatgcagagaacattttgacactggccggttcccagcaaacagactcttag

SEQ ID NO: 30396 - DNA, 333 bp, synthetic construct
  source 1..333: mol_type = other DNA; note = Synthetic coding sequence
atggaagagatccctgcccaggaggccgcaggctcaccacgagttcagttccagtctctggaaacccagtccgagtgcctgtcccccgagccccagttcgttcaagataccgacatggaacagggtctcacaggcggaatcctgctgcgacttccaactacccggatccactcagtcaactcgtgtccagcactgtctcacacccaggctagcgcattctccggagagactctcgccgtgctgacagctggaatctctaaaaggtggcccaaatataggctcccaatcgacatcgcaaggccctgctcggaaacgcccttcccccgattgtag

SEQ ID NO: 30397 - DNA, 627 bp, synthetic construct
  source 1..627: mol_type = other DNA; note = Synthetic coding sequence
atggagccaccgatggagccatcaggtggagaacaggagcccggtgccgttcgctttctggatctgccatgggaggatgtgctgcttccgcatgtgctcaatcgagtgccactgcggcagctcctgaggctacagagggtcagcagagcctttcgatcgctggtgcaactccatctggccggtctgagacgatttgacgccgctcaggtcggtccccaaataccccgtgctgccttagctcgtctgttacgcgacgctgaggggctgcaggagctcgccttggcaccgtgccatgagtggctctcggacgaagacttggtcccagtcctggcaagaaatccccagctgcgttctgtagcgttgggcggatgcggacaactcagccgaagggcccttggggctctggccgagggatgtcccagactccagcggctctcccttgcccactgcgactgggtcgacggcttggccctgaggggactagcagatagatgccctgcactggaagaactggatctgactgcgtgcagacagcttaaggacgaggcgattgtttacctggcccaaagaaggggcgcaggccttaggagtctgtcgctggcagtcaatgctaacgtgggcgactag
